United States Patent Application Publication US 2011/0183924 A1 - sequence listing, part 213

SEQ ID NO: 528858 - DNA, 1586 bp, Homo sapiens
  misc_feature (250)..(250): n is a, c, g, or t
  misc_feature (355)..(355): n is a, c, g, or t
  misc_feature (444)..(444): n is a, c, g, or t
ttctgtagagagcttatgggatagaacatacgaatgtatcgactcgacgtagtcactattagtcgtgtagttactgtctctattcttgatagtgactacaaactcatgcaagagatgcccacagtctatacttgcgagtatccaagatttctacatagactagtacaacacgtaataagcggcacggtgcggaggtgcgcacggatcatcccgtgtactctaggctacgatctcgaaagccattgcgtanctacactagtatgcgttctcaaatgatagcatcgcagtatcagacggtgaagatttatactgcatgactctctcatatgctccgtacacaatcgtaaaggacatntgtccgtgccaatatggtgcgtacgtaagcgaagtgttgcctcaaaagttcgtcgacattcttgtgcgtacccaggtgatatcgtcacncattgcgtgaacgtccaaataaagttctctctccctccacttaaacggtggtgcgggagtgcacgttaagcgactcttctgtccatgcacatatgggtcttgagcgatttccatatataccgaagcatataacatcgcggtacctgtgaacacaacccaccttacgaaccgtgtaagcgcatttgcgtcacccctaagcggaatgcggaactgcgttgcgcctcacaggaactgagagcaggaatttgagcgacataactttatacacgatgactcgcgctatcccttcgaggaacaacgaggggaataaagagttccctttggggctttcttatcgcacgtgagcgagtttatattggcacacatgggcccgacagtaccttttccaacgccacatccccatctgctcccctaagtgaaacattagagggacacgttcgcgttaggcttgggggggttcccatctgttacccccagttatacccccctacacccaattcaagggcaagatactccaagcgtcggttggacttatgatccttggtcagggtaagcatacccacgaacgaaattgacaggggaacgtttatcaggagcggcagttagctggcgataaaggactggaaagggtaccttggaacatttaggaattctcggggggaggcgtttacacccaaataagggtcggtcttattccctaactttgttcgccacagtgtgacacagaattaccccttgtgggactacgcaataacattgcgctccacaagccaaagtttccacacgtgtgttgggcctattttttcactatactgacaccgttcgacgacagattgggagcatacgtacctgtatgagctcgtatagcgcatcaggtatgcgtttccattttatgtgcactgtcctctttaaggacgccccattttgtgtgcccacgagtcatacaatacgatgatggagatactcgtgagccgctagcgttacatatcaacggtccccctattgatgagatagcggacccgcagaccacctgagagagaaaagagtcttcaccgcgaaaaatggcctatcctataggatatgacatcaaacgtgagaaaagtggcaaatataaccgcagagagatcacgcgtatgatcgag

SEQ ID NO: 528859 - DNA, 194 bp, Homo sapiens
agtgaaactctgtttctaaaactaacaacaaaaaagttgaataaacataaacaaatggagagcagcggatgatcactgttcaccgcatccttgagctcctagcctgaagccattcttccaccttggactccctaggtactgggatttacaggcatgagccaccatgcctggtctatgcaagaattttttactga

SEQ ID NO: 528860 - DNA, 460 bp, Homo sapiens
gagatggagtcttgctctgtcgcccaggctgccgtgctgtggtgcagtcttggctcactgcatgggttcatgccattctcttgcctcagcctcccaaggagctgggacaacaggtgcccaccaccacgcccggataattcttttgtattttttttagtagagatgtggtttcaccacgttagccaggatggtctcaacctcctgacctcgtgatctgcccgtcttggcctcccatagtgctaggattacaggcgtgagccaccacgtccggcctcaatcacattgttttcttatttatgagttttaagagttctttgtatatattggataccagttcaatatatactttgtatatattggagaccagtgagacagggtctcactctgttgcccagccttgacctcctgggctcaagtgatccctcctgcctcagcctcccagggtcgacgcggccgcgaa

SEQ ID NO: 528861 - DNA, 446 bp, Homo sapiens
tcccaatcagacgagcgccgatggtcgtggctttacaccagcaatcagactgaccccttcttcagtcctgtcaagagcggctaggccctgatctatgatatgcccatggaggagcaggaggtggctgtcatgtggtaacgcaacaatcctgatccccagacgtggaacgtgagccatattcatagtgagaccttggaggccgagcatgccacatgagccctgttaagaccctcttatgaacccgtgatgcacgtctctatagactaggctactccgcgatgaccatgcacaggatgacagacggcgacgagacggtggcccagagctatgtcttcaacgccatgcgcctgaacatacaggaccctgattttgcgaatgcgaatatacatactgcgcatatgtcattctagcgctgatgttccaggctactggataggaggactctc

SEQ ID NO: 528862 - DNA, 1300 bp, Homo sapiens
  misc_feature (254)..(254): n is a, c, g, or t
  misc_feature (387)..(387): n is a, c, g, or t
  misc_feature (694)..(694): n is a, c, g, or t
  misc_feature (1060)..(1060): n is a, c, g, or t
cccacgcgtacgctcttaacttactaccagagcaaccttaagccaaaccatttagcccatacatgcaaacgttatacggcgactatgacattgacacaccttggctgcacagttcatgccatctaagatatcccgggccaggcgtaatagcatgcagacaaattgatcaactcataagcattgatatgagcgcaaggtgacttacacccgcatatacgcttcatgccatagagtgcaatctaacatagcaaatngacttcttgacaaggcacggagtccaaagcgtgaagtacccccgataaaactagactcagcatacgctttaagaactagcgtcaagagagaagtcaccactcgcaggtccttatgttcagcaatcacataagntgtgagaccgcattttcatcacgcgctagcagagcggaggagaaaccttagccgcagcactgggtggcattagcctgcgtgtgttccatacgcactatgagaatcttacgcttcacacctattacaaattttgcgccatcaagataccgccttccttagagaatgcccctccttgttcaacactttgtaagactggtctcaggtacctacatagatgggaaacatagctcctttggggaccaactatgagatatagaaagcctttggtgatgcagtcagacgtaacatagaacttgtgagatccaanctcattagttagggcgtctataaaagcgagcccaaccaaggttcaagcaacagtcgttccaatgctacaaatattccagataaggctaaattaaaatgcctcaaaacaatttttaatcgtgagacttcccttgcagcattcgccaaagtgtgagacccaagtcttattcgacccgtgattacgaaggaaactcaagtggttaagtacgtaaagcctaaccagtgacaaagcatttattccctccggaataaagtccttgagggtttccacctttggcgcatacgaacagccgggggggcggaaacataagaagaatattcgcacgaagagggggccaagggataaaggggtggcccagagatgccntggtacagaaggagggcgcccaataagaagaaagcggacacattataaagcaacaagcgacaggggacggccgaattaaaacagccgtcgaacggcggagacacgcgtagcactgacgaaccgttcgtggaacggacccacaccactggcgcggggcacacatgtgcgacacctcacgcaaggaataacacacggcaaaaacacacacggacgatgtgaaacaccatactggcggaaaag

SEQ ID NO: 528863 - DNA, 262 bp, Homo sapiens
tgaaagtatcgtgaccatgtggcccaccagcagcctttccaaaggggaactccagagacatttcataatgcaacagcacttttgctttaagaacaaggctttggaggtggctaaatcgcacgcacgttgtaaaggccatcccatctttgcctccagttggagctttcagctgttaaacagtcaggaactattgattcttcctttggaaaaactgctcaggcagacggggtacatccacagaggatcggacgaaggatgtaca

SEQ ID NO: 528864 - DNA, 833 bp, Homo sapiens
  misc_feature (316)..(316): n is a, c, g, or t
tggctcacaaaaggtatactttaatttttaaagggagtaaatccagtggccgggtgtgttgtggtggctctcccacctgtgttaatctcccgagcactttggggaaggcgtgagggcggggtggactcacctgtgagaggctcgaggagttccaagacatcgagcctgtggccaaagtgtgggtgaaaacctcattctctcacataaaaatttcaccaaaaaatttagcgcgagggtgggtgaagtggctgtgtatcaccttatataatctcccgagcttacctcgagggaggcgtgagacacgggaaaaactcgntctggaaaactcgtggaggaggggcgaaggtttcgcagtgtgaaaagcgagaaatcaaccacgcgagctgtggcacctcccaagcgcgtgggcgaacgagaagtggaaaaacctcgcggtgttcacaaaaacaaccacacacattcacaacaaaacacacaaacaaaacaaaacacaacaacaacaaaacgagagggggcggcggccctcaaaagaataattacccccgggcgagaggggggggccccccacaacacctctcagacgcgcgtgctatcacgccacagctttctcgcgcgttgcaaccacagagggggggccccccccaaaatacgaggaggaggcggacactatcacacacgcccgagagagcacggggggcgcggggctatcaaacaaaccgtggggagcaaagggggcaacaccaccggcgtaccccgcgcgagggcaaccacctgggggagaaaaacgaccaccccataacccccccgcagggggggcggcccaccacacacgt

SEQ ID NO: 528865 - DNA, 454 bp, Homo sapiens
  misc_feature (18)..(18): n is a, c, g, or t
  misc_feature (79)..(79): n is a, c, g, or t
  misc_feature (256)..(256): n is a, c, g, or t
  misc_feature (335)..(335): n is a, c, g, or t
  misc_feature (403)..(403): n is a, c, g, or t
tgttgccctgaaaaaccnaccacgtttgagttgaaagaaggccagattgaagagagacccgaagaggagactgggcctnaaagaggaggaaggcgagacagcaggggaggttccagtttcccaccatgcgggccaccgagagaacgtccccgggtcaagtctctggtctcggtttgtctagttcctgggagtcactgcagccagagccctctcacccctacttagctcagcccaggtggaggcgagattgagttgngcagccccgcccttccatcctccccacatcccttgcagccacctcccagcagagcaggctacgtcctcactgaggtgtntttcatgagagtactagcctcctccactcctccccacagctgcagaggaaacagccagcccagtgacnttgacggttattagttttgttttcctaattgtaataaattttattgtataa

SEQ ID NO: 528866 - DNA, 208 bp, Homo sapiens
aggggctttttttcccccccttttttttttgggggggggcccccccccctttttccaaacgggggggttccttcccaacccggggggggggggccccccccccccctttggggggggccaaaaatgcttttttttttttcccagggcccccgggtggggttggggcccttctccccgggttttttaataaaagaatttttttttttta

SEQ ID NO: 528867 - DNA, 762 bp, Homo sapiens
  misc_feature (267)..(267): n is a, c, g, or t
agaaagaaaaggacaggaaggaaggacatactacagaaccccgacagaagaaagaacgatagaagaaatcagctagctcaacatagctttcttgacgctagagttgagagaacttaggggcactgtccaagctgaggggacaaggtgaaccccagaggcctaggagttaggtagtccaggtctcggtctaacgcagaagccacagcggcgccatgctggctccgctacacttggtggccaccattggagaagcctctcggagctcgntccgccgctttgcggttcgtcctctgcagggccgtcatcccatgccccgaaggaggcgaactagggcctctgcttaacgacagctctggctggaccatcatcaggcaccgagatcgagtgggaagtttctaccttgcagcacgcagcactggcgtgtaccctggagccggtcgactccggtgcctctcatcagcaccctagagctgacgcggcgggggcgaggtggccacgctggagctccagggagagaagcttccacgcgggggctcaaggtgtggataggggacgtggaggcagaaaccatgtacatggagcccgcggtccctggtgtgcgtggtgccggacgtggcggccttctgcagcgagtggcgctggctgcgcgctcccgatcacaatcccgcatgagcctggtgcgcgccgacgggctctgtctaccctaggtgccttctccttcagctacgacccggaatacgagcgtgccggccgggtatcccg

SEQ ID NO: 528868 - DNA, 307 bp, Homo sapiens
aaaacacaaagtcaggtgccttcttgtcgatgggtttaatgacaaactgtgtgtcattgaaagagatgttcctgatttcactccaacgaaagccaatctttgctgttaacttatcatctttctcataaatattcagtccaagggcgatcaactgcaagccaaagggctgttcctttcttgatttttatctcgaaatagttgatgtccatacatttccaggtcctgagcaatcttcaggtattccaacctaacattatctttgagcatcccacggtgtttcgcatgccccactgctggcattaactaa

SEQ ID NO: 528869 - DNA, 159 bp, Homo sapiens
cattcccaaattaaagtaaaacactagtcacatccaagaaccttaaagcaaattggatacaaggtcagtttaatatccaaaaatcatttaatgtaaaccactatactaataaaggacaaaacccacatgatcctttcaatagacaaagaagcatttgaa

SEQ ID NO: 528870 - DNA, 115 bp, Homo sapiens
tcgactcaagacagacataagtccccttcccaggacaccaactacccagaggagccagacccagacctatcagcccaaggaatgcgatgatgtcaggcgtaccaggtaggagacg

SEQ ID NO: 528871 - DNA, 1001 bp, Homo sapiens
  misc_feature (891)..(891): n is a, c, g, or t
tgccgccctgtactagacccccgggggcggtttcctccctccgccggggttttttctagttgtcccgcgggtggggtaaacacttttctctcagccgggagagcctgttgtttgggctcccttctgcggcccttttttttggcggcccccctagttgtgagacggagtgttggtcggccacaaaaaccagggcggtgtgtggttctcctgctcccgtaggttttctcccggggagtgttttgttgccgcccgccgccctctccgcgtgtcgcggaaatcttctcagttagcgtccgttgctcttctggatggatgatccgccgtgccccctcccgcgaggattattcctccctcctccctcctccctacgatgagacgagggggtttgtacgcgcggggttcttctcccctcgcggcgtcgttctcttattattgagggcggtggcgcctcccccgctcctcatcttctgcgtcgtggactgttctctccgcccgccgcgcttggtctctctcttctctttttcagtcttcttgttgtgtccgtcgtgttgtactcactcttgtgtaggtagacagacgccgagcgaggtggtggtgtggcgccacgctattattagagtggggttcggcctgcgcgccctctctcgtcgcacgaggaagatgtccgttgtccaccacagggcagcgcccctctcctcttccccatcgctgtgtattttatctgttgctggtcgccgcgagcggagagagaaaacaaacctcccctctgttgtgtggtagaagagaaaaaatggggggcgaaaaaaaatgggggtggggcaccacagcggatattgttaggtggtggatacccccgcggtgccccacagtttctcctcccgcgcgcggcgntgaatccgaccttataaagcacgccccctctttttttttgttccaagaggttttttatttgggagcggccccctttttttaaaaccccaaaaaaaagtttaaacctttta

SEQ ID NO: 528872 - DNA, 353 bp, Homo sapiens
tcacaggattctatcaatagcatgtagcatctgtaatacacgaacatggtcaacaaaatcatgtacacttcaaccccatttcatttaaattaaagaacaaaaccttttaaatacagtggttcattcaaactattaacttccttagtaccatgctgcagattacagtactgttaaggtattgcaagaatgcccaaccctctgatgtctgatcatgtatctagcaacattgcagtatgaagaaaagagatgccccggtctcagcccatggactagttaatacagtgaagcaggttcctgtctttaacccttcctgctcagaacataaaagattaagagactaaaatcaaggaaga

SEQ ID NO: 528873 - DNA, 633 bp, Homo sapiens
  misc_feature (495)..(495): n is a, c, g, or t
  misc_feature (593)..(594): n is a, c, g, or t
  misc_feature (609)..(609): n is a, c, g, or t
  misc_feature (629)..(629): n is a, c, g, or t
gggggggaaatttatttttttccccccccggcagagaaaaaaaggcccccccccccctggggggggggggggatactcctccccgggggtgtgtttggggggggggggggggagaaaaaaaaaaaccccccccccccccccctccaaaaagaggaaattttttttttttttttttttctgttttttaaaaaaaaatttggtgccccccccccccccccccctttaaaaaccgcaaaaaattctggggggggggggggttttttttccacaggggggggggcttaataggggggcgctttctttagggcgctcttaaaagaggggcccccccccaggggggcccgaaaaaaaattttttccggggtgacccgggggtttctccccgggccaaaaaaagggggaaaacccaggttttttaagggtcccttgggaagggggaaaacctttccttgcccagggtggggtttcccccaaagggggtcggtaattcccaanctgcatttgggccagtttaggaagtaagggggcccatgaacggtggggcctcatatccaggcaaagaattggccgatgtagttcatcttctccacagnngtgtgtgtggtgtcnccatacgtctgcactacagnaaac

SEQ ID NO: 528874 - DNA, 162 bp, Homo sapiens
  misc_feature (12)..(12): n is a, c, g, or t
ccggcaaggtanctgtactggtgtggctattacatattaagtttagtcctcatattttaaggagtttgcatgaagcaagatactaaatacaatgtagcactggttacaggcatctttcttcaaagtgctcaaagacttaattgcagtacaataccgtccgtc

SEQ ID NO: 528875 - DNA, 205 bp, Homo sapiens
cgggcgcaggtgcacaccatgatctcccccgtcttgatgccacggtcggtccggaactgagcgcagcaacttgcccggcgcgtaccgggagatcacctccatgacggagggcagcactggccggtgagtgcacagggccaccggcacatcccgatgacgcaggacatcggagacgaccttgcgcgccgccttgcgggaatcggcg

SEQ ID NO: 528876 - DNA, 418 bp, Homo sapiens
agcggggacaactcactagttatggtggattcaaagactccctgatttgtgattggttaacggaagcaaagctttgtctaacaacttggggtccgcagaaaggaacattaacggtctggccaggcccctcaggaagaaactgagagcaaagaatggaggtcagagtttagtccctggtgttcccccttatctgacgtctttgtgaatccatttggtgggggtctgggtttctgaaaagtagctcaggggcacgtgttaaggatgtctctaggtgactctaacttccctggctattgtttgaaactgttatgaccttcttgcttatcagcttgctggtttccttctcggggcgagctgggtgcctggagttttcggtgaaggaaactcaagattctcctttatttctgtgcttgtggga

SEQ ID NO: 528877 - DNA, 315 bp, Homo sapiens
  misc_feature (165)..(165): n is a, c, g, or t
cccggggggggttccccccccgggttttttcttggggcggggggggggttcctattttcccccggggaccccttttgccctttgggcctttttgggggcccctttaacccagttttgtccaaaaaaccggggggggccggggcgggatttcccggggtttttttnccccccggggccccccccaatttttttttttttttttccccggggggttttgggggtttggggccccggaacccccccccttttgggttttttgagggggaattcccccccccccgggttttttttttttttttttttccccccccctta

SEQ ID NO: 528878 - DNA, 164 bp, Homo sapiens
agcatgcatctggttctaatgcttgtacagtctcttcaaactgcattttctgccttttaagtatgcttgtaatttgctgttgataggtagacatgatacactgggtaaaaggaattgcagtaaacagggctttcatcctgttttcaggtgttggggataacata

SEQ ID NO: 528879 - DNA, 265 bp, Homo sapiens
ggcctgtctagtgagagacagctaatgtgacaaaagtaaaatatatcagatggtgagacaaccgaaaaatgagatcagaagtggagatgttggggccaggcacagctggcccaggcctgtaatcccatcactttgggaggtgcaggcaggcagatggcttgagcccaggaattcaagaccagtccgagcaacatagcaaaagcccttatctgcaaaaaactcaaaaattagccaggtgtggtggtgcgtgcccagggcccgagag

SEQ ID NO: 528880 - DNA, 199 bp, Homo sapiens
agaaccagatactgaaatggattagaaactattaaaaaaagttcactatttacttttttatgtaggaaaatatggttataaaggaattggataaaacatacttttactagcttatttggttaattggtaaagggaccaagtggagcctgcactagtggtaaaagatagattactattaaatgtttcagataaaaggttt

SEQ ID NO: 528881 - DNA, 355 bp, Homo sapiens
aaattttcactaggaggggagttcagcagtcttcccaaatcctgtgaccagcaaaagctttccagtcatctgatgagaaggcagcagcaggcattcatgtgtatccacaccatttcatcttccaattcctttttatacctgcgaagttttcattgtgcatggaaataacagcacagagcagaaagtgcacagtggtgatagctggttattgaaatcaccatagaaacccctcataaacacacactctcacatagttgtttacgaaaacacacacacagccgctcacacaacacacaccaatactccacacaggtgtgaataggaaccacctctctctaacaaccatacgagggca

SEQ ID NO: 528882 - DNA, 415 bp, Homo sapiens
actgcagtctcgaattgatcaggcctgtcatatcatcttagagctagcgaagaatagagcaaacggaatttctcgagactgatctcaaacagtttcttatatggattgccagctataataaaccataaagccttcaatgtctacttcccacatgtagaaactgacatcttcaatgtcactctttcctgccccccacttttgagtgccttccctggagactgtggacggatgaccacaaacgggtacactcacagggggggacatggaggacggcggacgagcgaacggacggaggacgagacacgctggggaacgtggcatgctcctgggatgtagatgagactgtctccagaccagggaccacagcagcagcaagtagcagaacgcagcaagtcgcagcacgcagcagcaggag

SEQ ID NO: 528883 - DNA, 179 bp, Homo sapiens
cggtgtatcactttgtctacaataaatataaaaattagttgggcatggtggtacactactgtatagtcccagctactcgggaggatggcttaagcccgggaggaggaggttgtagtgaaccaagatcacatcactgcactccagcctggcaacagagcaaggccttgtctctcaaaaaa

SEQ ID NO: 528884 - DNA, 327 bp, Homo sapiens
tccgtacgagcgctccgtacgtacctccgtaacagctttcctgtaacgagcgcctcctaacaccctaacgagcgcctccgtaacagccctccgtaacgagcgcctccgtaacacctcagtggtggtggtggtgggtgttgtctctgaggtgggtgctggtgtctctggtgggcgctgttatctctgagttgggtgctggtgtctctgtggtgggtgttgtagtctctggtgggtgctggtgtctctgtggtgggtacagttgtctctgagttgggtgctggtgtctctgtggtgggtgtagtagtctctggtgggcgctgttacgga

SEQ ID NO: 528885 - DNA, 130 bp, Homo sapiens
tgagaaagaagcctgtctccatcttgctctgtatccgctgctcttgtgacgttgtggagatcgggagcgtctcgggctgtgctccatggcgagctggataccatgtttgttgtggaagtccccgtgtttt

SEQ ID NO: 528886 - DNA, 83 bp, Homo sapiens
tgtgaccccagcaggatgtctaaatatgtcttttttttgttgtttttttaataagacattgcaaacagtagctatttcttatt

SEQ ID NO: 528887 - DNA, 138 bp, Homo sapiens
cgactcatagaggatacccagactgtcgatcaagaatagtacaaacggcattcacatgtcttcagaattagccgttccctcagaactcttgcaccacgaggtggtagcactgcccagtgtactgggtgtcttctagag

SEQ ID NO: 528888 - DNA, 958 bp, Homo sapiens
ttcgtattcttggctagagcctgtgtcttgtgctattagagcacagcacatgatggggccccagttgtgagaagtacccgacatttccagcatactcagcctcttcgccataactccctttccgaagcctgcgagtggcgaggttctaagactggaattatggtgctagcattagtaccatgagtgacttggaagtgagctacgtagtcttctttatcggtttgcgatttttacgtaccttgttccaatatagaaaaatggatgagttttgtatagcatggtcagatacaaataatagtgacttcacagtttagtaattataatgggtacttgttagaatattaggtactgaaattgatgttgctgcaagagtagatataaaattgagtatctatagctagtttctggtgaattatgcattttatttggtactgtaagttaggcagcactgtagttgctaatttaagcaataagtcaatttgctattcatgaagaaacggattcctgagaatctctgtcaggaattggggaatgaaaaaatacggaaaataatggtactttgtcccagtagaggttcatagtctatttagtgtgcatgtatatccttaaatgatgtattttgatctgactttgtacttgtcaatagaatcatactggggatttcaggtaccgtttgatgtttatgctggataaggtgaaaaagttgggtacagggagatttataactttttcacgttacacaaggtattagtattatcctttgtagtgaattggttaccaaagagagtattagccaatgtttagtgaaatcgggggttagaaaaattgtggtgcataggggaaagggagggtttcacagagacgaattctgggttgggcaaagtgacaccccggttgggtgcagcgcagaattgattaaaggcatgagaacaaagagagacagagagatagtataagg

SEQ ID NO: 528889 - DNA, 113 bp, Homo sapiens
gtgacctgggctagaaatctctgaggactgattaggctaggcctaatagggcatctccaggatccattcccaagctcccaattccataagaccagtagagcggttttattttg

SEQ ID NO: 528890 - DNA, 388 bp, Homo sapiens
ccacgacaatggcattcattgaatttgaagagataaacttgactgagttgtggggagacatggataatcagaaacacatttatgaaggttttgacaaagtgctcttggagatgaatacattactttctgcaaatcatgctagcaaaacccaaagtaaattattagaaagtccagatcaacctaaacttaacgaacagagaacatcaacaccatcaccaaacccgccagaacagcagagaggagtaactgcagaacaaggaccacaaagaatttcaattgaagaacaacaacaaggcaaaaagccaactgcagagcaagaactgtacatagaatcagtaatagaaccaggaacacacacagagtcaactctagaacaagggtcaagtag

SEQ ID NO: 528891 - DNA, 102 bp, Homo sapiens
cccatgtcagcctatcaggtcatttgtgtccagccactgcatcaggccagcacagcatcatcacctgcaggcaggccattccagatgcatttccagctgcac

SEQ ID NO: 528892 - DNA, 359 bp, Homo sapiens
tgagtatagcataagcttgaaaattattcacacccggctgggcacagtggctcatgcctgtcatcccagcactttgggaagccaaggcaggcagatcacttgaggttaggattccaagaccagcctggccaacatggtgaaaccccatctctacagaaatacagaaattagccaggtgtggtggtacatgcctgtaatcccagctactcgagagcctgaggcaggagaattgcttggacctggtaggtggaggttgcagtgagctgaaattgcaccgctgcattccagtctgggtgacggagtgagaccctgtctcaaaaattaaaaaaacctttttatcctaccacggtgctataacg

SEQ ID NO: 528893 - DNA, 180 bp, Homo sapiens
ctttaaaaaaaaaaaattttttggaacccaaggggcggggggtttttaaagtttttcctttcccctttcctcctttttggggcccccgttaagcctgggttagggaaaggggttttgggggttggggttgggggggtcaaaaaaaaagagggtttttttcccataaccttggggcaccca

SEQ ID NO: 528894 - DNA, 110 bp, Homo sapiens
tctcccaattacaaaggtcagccattggattaacctaataaaccaagggaccacaacaagaaccccttcagaccccaaaccaggtctgaccccatcttggtcttatcgag

SEQ ID NO: 528895 - DNA, 445 bp, Homo sapiens
cacctctgaccgagttccctcccctgaggcaactacttgttggaggccaaaagaatgagggtcatgatcaactcagtataccactggaggttatatgagtaagcaggaaactgtttttcataaatgcagaatgttggcaaactgacagactgcgtatgccacccagaaggaatgctgaaggcagtcatgcccaaagcacagtgtttcttgtgattaggtacatctgacgcctgttagtaacagtatgaacctgtgatcaattaagcagctgaccaatccttacctccttctccctgctcttgttacccaataaatatgaagggctgtggaagctcaggggctgcctttgctcactagaagcagggagctcttttcttcttcccctggcccttcctttaagacagttcctttcgtttctgggtgatttccatgtttgtcccttcct

SEQ ID NO: 528896 - DNA, 863 bp, Homo sapiens
  misc_feature (25)..(25): n is a, c, g, or t
  misc_feature (118)..(118): n is a, c, g, or t
  misc_feature (161)..(161): n is a, c, g, or t
  misc_feature (187)..(187): n is a, c, g, or t
  misc_feature (189)..(189): n is a, c, g, or t
  misc_feature (204)..(204): n is a, c, g, or t
  misc_feature (258)..(258): n is a, c, g, or t
  misc_feature (264)..(264): n is a, c, g, or t
  misc_feature (317)..(317): n is a, c, g, or t
  misc_feature (352)..(353): n is a, c, g, or t
  misc_feature (360)..(362): n is a, c, g, or t
  misc_feature (400)..(400): n is a, c, g, or t
  misc_feature (426)..(426): n is a, c, g, or t
  misc_feature (433)..(433): n is a, c, g, or t
  misc_feature (467)..(467): n is a, c, g, or t
  misc_feature (475)..(475): n is a, c, g, or t
  misc_feature (515)..(516): n is a, c, g, or t
  misc_feature (522)..(522): n is a, c, g, or t
  misc_feature (525)..(525): n is a, c, g, or t
  misc_feature (528)..(528): n is a, c, g, or t
  misc_feature (574)..(574): n is a, c, g, or t
  misc_feature (592)..(592): n is a, c, g, or t
  misc_feature (599)..(599): n is a, c, g, or t
  misc_feature (635)..(635): n is a, c, g, or t
  misc_feature (697)..(697): n is a, c, g, or t
  misc_feature (722)..(722): n is a, c, g, or t
  misc_feature (725)..(725): n is a, c, g, or t
  misc_feature (780)..(780): n is a, c, g, or t
  misc_feature (849)..(849): n is a, c, g, or t
tcggtagcttttcttaatagcacanctgtatgttaacataaaacaactttactttgtcttccattctccctttaaatttgttcaatggtgttaattatcctttttcccctcaaatganagtccagacatggtcattcctggatcacaaaatatcagttccncttagtaattcggttttccatttttntntgataggtaaatctntctgcattaaattttatgctttcatgtggccaggtgtggtggctcatgcctgtnattccngccctttgggaggccaaggctggcagacacctgaagtcaggagtccattaccngcctggccaacatggtgaaacctgtctctactaannatataannnttagctgggcatggtggtgcacggctgttattccagcnactcgggaggcagaggcaggagattnatttganctcgagaagaggaggttgccgttagccaagaccncaccactncccttcagcctgggcaacagagcaagattcagtttcaaannataaanatnaancacttcatgttttttccttccacatttcggactgatttagctaganaatttcaagggaaaaggnaaactgncattctttctcccctgttttgctacctacagcacanggcccttcatcatggagttcagggacaggaaaggacaggagaattctttcttcactgaaatnatttagttgatttagcttcactgcnctntgggtttggcattaagtaatccatccttgtattgtggaacagtttcacggatgcnttggagagcccatggctggaattcttccacttgcaattttctttgagaaaaggcatatccattccagcnggttgtttgctcct

SEQ ID NO: 528897 - DNA, 988 bp, Homo sapiens
gtgatggtgcgagaaagtaccagattcaacttatgaaatgattggtggactgggacaaacagatcaaggagatcaaagaagtgatcggagctgcctgttaagcatcctgagctcttcgaagcattgggcattgctcagcccaagggagtgctgctgtatggacctccaggcactgggaagtactacttgttgggcccgggctgtgggctcatcgataacgggactgtaccctttattccgtgtcatcttggcatctcgaattgcgttagagcatacattcattacgggggaaggcgcgcacagaatggtgtggcatgggcagctcgttagtcaattgcgctactggcggaaccattgcctccgatcgttatcatcattcatggcaccgaaggtcgcactcacatcaggatccgtcgcgagcttggatgggaggtgttcgtggtagggagtgatcagtgaaaagatagcgaagggctagcagatgctgtgagttgctcgaacgcgaggctcgacggcgtattcgaaggccactcgaagtagagcatcgaacggttatcatggctactaataggattgatatcctggatctcggcactgttcgcccagggcgcattgaccagaaaaattgaattcccaccccccaatgaggaggcccggctggacattttgaagattcattctcggaagatgaaccttgacccgggggatccaacctgagaaaaacattgctgaggtcatgccaggagcatcaggggccttgagagtgaagggcgtgtgcacagaagctggcatgtatgccctgcgagaaacggggagtccatgtcactccaggagggacttcgagatgggcacgttagccaaggtcatggcagaaggacgtggagacaaaactgtccttcaagaaactttgggaactgagtggccagctttgtggtgttttcccccaatagggccctggggggccagtggaaatgcaaaaaggagaaac

SEQ ID NO: 528898 - DNA, 1217 bp, Homo sapiens
agcgggcgactcccacctcgcgggcacgccggtgggctgtgccgccatgccccagccacaggctgctcacgggcctaggcgcggcggcccgacgataggggcccctgagcctcccgggggaggagagaggcagcgagccgcgcgctccgcccctccccccagggcgcgccgccgcgcctcgcccgcccagcctggcgggacaaggacggaggagcaagcaggcctccgcggcccggcgccgccagccgcaggacatttctgattcatctgcatccttgcaacgagcatctgtagaagaggaagtaccagatggcgctgtgaaaacatttactcatagctcctcttcccacagccaggaactgcttgcgaaagctaaatatgctgcgaccactgactcggacatcccggcggatactcactacttcgtgtccaggaccaaacaatcttccgggccacataaggtgcgtaactacgcaagcttgcagtgacttcctttcgcaccaaacttgtcaggccaagcccccaggacttgacgcaccaacggaactgctgctgcggcacactcctgcactcactgcttacccgctgaccccggcccctcaactcccctccattacaggaaaactactgcctctgacacacgcccaccctcttatcacaccttaaacacaccagcaaccactaactacgtcgacgtgactccctcaccacggcaacgaccacgccaccagaagttgccccgccgcgggcccccgccggtccgcccacggaacgccctgccctccacgaccgttcgaccgcaaccactccaggacgatctcactggacaacgtcgaccacccacaaaacgggcccaaccgcacgccacaccgccggtcgcacgacacggccctgggccacacacaccacccacccattaccaaaacgctgggcacacatagtacgcgatgaagacccgacagaatacggggaaggactctcgaccaccacgcaggcatcaacacacacagatctgacacacgggacggaacaagaaacacaacaacaccaacccacacggggcacaccgacccgaacaacttacacacccgaacccacgagccgccacgcgaaagcagcccacacgcacgcacacccgccacaccgacagaacacgaggaccacgaccacaccacgcagacaccacaccacacgaccacccaccgaacaccacaccg

SEQ ID NO: 528899 - DNA, 678 bp, Homo sapiens
tcgagatagaaacattcctggggtatgtgctgggggaaaacagggcttccttcttaaatggatttaataagagattcagtggactgaccaaaggacaaatacagggtctggaattttccacctatcactccctcctgggttgatgaagacctcaagactgtctcttcagtgtcatgggagtctagatgggcattggggtgtgagttattttccttccactaaatcaaagtcctctactttttactatttttctttctagctttttggggattaatgactatcatcagaaggaattgtcaatgtaaagaaacctggcctttttgagttgaaatcttggcttagataggccttttccacactaggaggaaactgcttcccaagctgcccttgttagaaagttggaagactcctccttttggttccagttccttttgtgcacattccgtaggactcacttagacttggtgctattttctaattttctctttctctctttcttttgtctcaaatttctttccagttggctgagaaagcagatatattctgtggatcaaaccagaagaaacaggtaagagtcattcagttttttttctgaatcactttggattttcgatcctcattctatctttaaaccttccaagggggtgggagcatgacttgtcgggagcaaggcctcac

SEQ ID NO: 528900 - DNA, 378 bp, Homo sapiens
tctcttttgctaaaacccctgtgatttgagatggagtaacactctttgtttgcccaggctggagtacaatggcgcaatctcggcttaccacaacctctacctcccgggttcaagtgattctcctgcctcaaactcctgagtagctgggatggcaggcgcatgccatcatgccccgctaatttttttttaaattttttgtagagacttggttttgccatgttgccctgggatcaagcaatccttccaccttggcctcccgaagtgctggaattacagacttgagccactgctcccggccattgttttttttggttttggtttttgtagttggtttgggccttttctatctctttagtcttagttgtaaccaagtcatga

SEQ ID NO: 528901 - DNA, 383 bp, Homo sapiens
  misc_feature (23)..(23): n is a, c, g, or t
cacatgccagagccagacattcncaggaccccccaccagccctcaccatgtgcatttgatctctttccctaatattggatcagtggctttccacagggtccttggatcctccatggaaaatccccccaaatctctgctaattaacttttttcaaaaggcggccaccactttatcatggtcttttttttttttttttttgaactctccttaaatgttctgaggacactcatacatcccatttgggattcactaggccaggtgctgtggctcacgcctgtaatcccaacactttgggaggcttgtgaggcccaggcaggagaattttttggggccaggcattgaagaccagcctgggcaacacagcaagactccatctctacaaa

SEQ ID NO: 528902 - DNA, 220 bp, Homo sapiens
gccgaaatgttcattgtgggagcagacaatgtgggctcaagcagatgcagcagatccgcatgttcccttcggctggcgaaggcgctgtgggtcgctcggatggtggcacatgaacgacccattggattgcgggcaaagtggcccattcccggatgggtggcacccttggtggaaaaaacaaaacccaatggcttccttgcggacgaaaaacctgtggctg

SEQ ID NO: 528903 - DNA, 531 bp, Homo sapiens
  misc_feature (48)..(48): n is a, c, g, or t
  misc_feature (50)..(50): n is a, c, g, or t
  misc_feature (110)..(110): n is a, c, g, or t
  misc_feature (136)..(136): n is a, c, g, or t
  misc_feature (149)..(149): n is a, c, g, or t
  misc_feature (209)..(209): n is a, c, g, or t
  misc_feature (212)..(212): n is a, c, g, or t
  misc_feature (294)..(294): n is a, c, g, or t
  misc_feature (326)..(326): n is a, c, g, or t
  misc_feature (349)..(349): n is a, c, g, or t
  misc_feature (366)..(366): n is a, c, g, or t
  misc_feature (421)..(421): n is a, c, g, or t
  misc_feature (460)..(460): n is a, c, g, or t
  misc_feature (466)..(466): n is a, c, g, or t
  misc_feature (472)..(472): n is a, c, g, or t
  misc_feature (518)..(518): n is a, c, g, or t
tgtatgttatggtagtgtagaaaactgggcaaggacactaaaagtcananaaggcaagggaaaagggggctccaaacacagcctctgccctgtccaggccctgtcccctncaaacagggtatcacagtgacctccnaggccgggaacgncagctcatgcctgaaatccaagcactttggaaggcctgggcacaaaacaagaccccaacnacngcatttaaaaaaaaaaaaaaaaaaaacctagccaagctgggcgggtggctcacacctgtgatcccagcactttgggaggctnaggtgggtagatgacctgaggccaggagttcnagaccagcctggccaacgtggtnaaaccccatctcaaacnccgtctcaaaaaaaaaaaaaatagtgtgtggtggcacacgcctgtaatcccagcnactcgggaggctgaggcgggagaatcatttgaaccccanaggtgnaggttncagtgagccaagatcgccctactgcactccagcctgggcgacaggnagactccctctca

SEQ ID NO: 528904 - DNA, 232 bp, Homo sapiens
ttctcttctgcctattcttctagaccttagaagacattcaatttttttaaattcctgtagctcaagctggtcttatttgctttccttgccaaggcttcattgtgtgtataccaatatttgtgtcctctactgacctgaaggttccatgtaacctgtatacacatgaatacttaaatgccaaatatttaaaataatttgataaagtctttgtagccactcaagtcaaaaaaaa

SEQ ID NO: 528905 - DNA, 141 bp, Homo sapiens
catgatgatccatattatgtctacgattggtgaaaacatcctagatgtcatcacaaactcgccaaattgtggaactatgaaatgtattatttgtagacataaggacttgattgctttccagtttaatgaaagcttaaatgt

SEQ ID NO: 528906 - DNA, 299 bp, Homo sapiens
  misc_feature (182)..(186): n is a, c, g, or t
cggggggggggggcaagaaatttgggggttttttttttccccccccccgggggggggggggggttgggggggcccccaagatttttttgccctgggttgggtttgggggccccttttttccccccttgggggggaaggggcccctttgggcccccggggtgggggcctggagggttaagaannnnnagggaaaccctcctttccccccccccccggcccccggggggtttttttttggggcccccctgaaatttcccccccaacggtttggggggggcctttttttggccagggaggga

SEQ ID NO: 528907 - DNA, 328 bp, Homo sapiens
gaaattcatagtgaatctggcgtctgagcacggtggttcaggctggtaatctcatcgttctgtgagtccgaggcagcaggtatcacattaggtcagaagtttgagactaagttggccgacgtggtgagtctccctctccgctagacatgctagaattctccagtgtatagtggcttacgtctgtaattccagagcgttggagaatgaggtgtgataagtgcttgaacgcaggagtcagaggtcacagtgagacgaggtctgtcctctgcacaccagactgggtgacatagtgagactccatcgcaaatggtagattagtgcactgaac

SEQ ID NO: 528908 - DNA, 499 bp, Homo sapiens
aagtgtacacatacaggctattggtaaccacgtattctaagaatatggtaagtacaaactaaacatactgaagatgtgtgcgattctaagtttcataccagaagatttctacactaaccacatcatttactattaatgacacattaaaactagtaaaaagctttattacataaataagttacactcgcttccagcttacagtataaaacaattttatttcgcacggacatgcaaaatgattgtttgccactgaggcacttcttgaacatactgaccagtgtctggattttcttgtgtacaattcgcagttcacgtggggacactggtcgtgtttaaaacccttacacttaatgtatacaagctctgtatcttcatcggtggtgcctattaggatatgtgatataagctgcagtatccctttggcgaaggggggaggcgattactttacctcaagtcctaatgaaactataattttcatcttttcatcatttggcgcgca

SEQ ID NO: 528909 - DNA, 323 bp, Homo sapiens
tatgaacagcaactacaaatacttgattgactaacactagtacaactaagatatttatagtacttaccatgcaccggagagttcacacacattattctttgccttttgaccattttcctcctttgagataattgtctcctcatctgtctctcctctctctcctttaggcatttcatctgtgaaactatttatatcccttaagggatgcccctccatatctttatatctacttctccttcatcccagctccaatattgtgtcttaccatcattatgttttgtaaaaggaaaaaagaagccattccctactttaaacttctctgc

SEQ ID NO: 528910 - DNA, 113 bp, Homo sapiens
  misc_feature (109)..(109): n is a, c, g, or t
tatgtgtaagaattttatacttaaagtatctgtagcttttggggtgaaaaaaaaacttttctaggttgggggttgtgaaatttaaatgttacacacaagaccctgtttnaaaa

SEQ ID NO: 528911 - DNA, 220 bp, Homo sapiens
cgtagcagaatatcataagttatatctccagatgaggttttcagaatttcccagtgatatcggagaaaataagttgtttacttagtgatgtctgataccctggcataatcactttatataccttagctcgttgaattctcataacactgagatacgggttgtcattgcccccattttatagatatgaaaactgagactcagagaggagaaatactttaac

SEQ ID NO: 528912 - DNA, 178 bp, Homo sapiens
cccgagcttattatgttgacagcatactatgctgtacctttccccaccttactcttttttggaacatcaaaaggatctgacgaaatgcattgacaataggtagtaactgctgctgtcaatctccaaacacacttatgtagcaacattaaatgctgacatatctgacaatccctaatat

SEQ ID NO: 528913 - DNA, 1244 bp, Homo sapiens
agggaactcgggggtgtcgtgacttaactagtggtttctgtgactgggtaacctccctataacattaaaacgacaaaaaaaaaaacaacacaaaaacaaaaaaaaactttttgggcccgccccggccccctgcaaacacagctatataagaccccatcgcgtgtgcgagcgcggcggggcccccacagtcgcggtcagaggcgcacccgtgtggccaagcacgcgggaaccccaaggagaaacaacccggggcacaagcacccagaggggccggggaattcccaccacacaaactatacaacaacacagcggcgcgggagggggggacaaacccccgagacgactgaccccgggacaccgacactcctcccaggaaggggaggcacaccacccgagggcggcccccaccagcggggggaacctcacgactcccacacagggaggagcacccaaagggcagagcaccccccagagataatacacaacaagaaattatcacacgccccagacgaggggggggggggaaacacgagacagagacaaacaacacacgacagaaagcgcacagaaacacacacacagaacaaacaccaagagccacagaaggaacacaaacaaaacgaagaacccccccaacaggccaagctacacaacgaacacaacaacagcacaaacagcagggaggacacgcacgacccaggcgcccggacaggagcggcgcgacgcgaaggaaagacgacggggggcgggacggagagagggaggaggacggaggcgaggaggaagcagcgaaagggagccagcggccacgagcgcgagcggaccgacgaagaggcggagacggaacgggaacgagacgagcgcgaggagggccccagacagacaaaaagcagagaggaaaatagcgaaggacagaccccgagcgcgacggaacggcgaacgcagaggagagcggaggaccgagagcagacagacaccgaaagaagagaagacacagggaggagagagacgaagaaggaggaaacaagaaagaacaggaaaaggaacaggaacaaagagaagaaaaagaagaaaaaaggagagaaaggagacgagcgagacaaggaacgaagagggacaggcgagcagagaaggagaaagggaagaaggaagaaagaacaagaaagagaacgacacaggggcacacgagagaaggacgaagaagagcgcagagcggatccaagcagcgagacgagaaaaagcaa

SEQ ID NO: 528914 - DNA, 147 bp, Homo sapiens
gtttaagatgattcagattatccttgtacttggaggagaagtttcttatttggagtctttgggaaacagtcttagtcttttaacttggaaagatgaggtattaattcccctccatgctctccaaaagccaataaagtgattacaccc

SEQ ID NO: 528915 - DNA, 447 bp, Homo sapiens
aagaatatctgaaaacaatgttatcttttcctcatataaaggaaagctagagacaggcattcccagcacaggtacaacaacaacaaaaacacttttagggacatcaagactttttgaagacacagttttactctgttgctcaggctggagtgcaatggccccaatctcggctcactgcagcctcccacctccccaggttcaagcgattctcctgcctcatctcccaagtagctggaactgcaggtggccactaccacatctggctaatttttgtatttttagtagaggcagggtttcgccatgtggccagactggtctcaaactcctgatctcaagtgatctgcctgccttggcctcccaaagtgctgggattataggtgtgagccaccacacctggccctaggacataaatcttttttttgtgacagagtaagactccatctaaaa

SEQ ID NO: 528916 - DNA, 185 bp, Homo sapiens
aaaaaattttttaaataaggacaatttgtcattatttcagtatatgacaatatatattgacaatgtcaatatatgacaatatgtagacaaaatgtttacgttgtttatttggtttgagtgtgagaaagggaataatgatttctttgttcaatggaccgagtcgcccacttcctattaaaataggc

SEQ ID NO: 528917 - DNA, 396 bp, Homo sapiens
ttatggtgggaataaggagtaggctaaaggtagacagcatggaacgagagaggccagcacagtatgccggggtggaggggtacccgaagtcctcctggcccacgtttctgttccttactctgttcactagcttcatggagccactcagtccttggatagcagtggagcaaccatccacttagccgctcattgaccaacccacccacccacctgtccatcatccatccacataccgtccattcactcttccatccattcacccactcatctatccccccatcatccatctatccctcatccatccatccatcatctacccacccacccacctatccacccatctacccacccatgcacccatccatccacctaccccaccactgactcgtgccccac

SEQ ID NO: 528918 - DNA, 410 bp, Homo sapiens
  misc_feature (359)..(359): n is a, c, g, or t
ggcacgctcctgggcgtgccaggagagcagaagctggaaaaagggtcactcgttctaaccggagcgtacacaattcttcggcccgagagtcctgcgccgctccacgggggactgagccaaggatgtgttatcgctgagccaagttccgcaccgctcaggaccctgctgagccgagcaccttcgccactccgccgcagagactcccttgccgggcgactctcggagacccagggcgcggagctctgcgcagctaggctcaggactcgggcgcgtttcagacccaagaccatggtttcttaagcacggccccgcacccctttcctcctcgtcgcccgaagcccaggaccccaagaagggcncgcagtgcttggtccctagttccagcccctgctgcgccagcggggcagctc

SEQ ID NO: 528919 - DNA, 505 bp, Homo sapiens
gctagactaatcatgctatggtcatattggagagacccatctttcaagggtggaagaaactctggacttggcatcagaagacttgagtctgagcctcacatctgcccgtgctgagctctgttgccttgagcaagtcagttcatcaaaagtagaagatagttatcattaattttatcatcattattactaccagtagtaggaactctctgaaattcaatttcacaatctaaaagatagataatatttgtgtaagcatcgtcagaaggtttaaatggaataaaagatgtggaagtgcttagtaaactataaagtaattcacaaatacaaaatattaacaccaagagacagcttgacgtgctagaaagagtttgcattggcatcagacagatatggctgcttacagactgcttcatctgaacgcatcacttacatgctcagcctcagttttctatcagtaaaatttcttagtgtaaatctgtaaaatgttctacccatgttacaaacc

SEQ ID NO: 528920 - DNA, 471 bp, Homo sapiens
ggccgaggcgaatcgcggaacaggtcagccgaaagtccaggtccatctgattcactgcatcggtttgtggcacggtgatagcgtccatcgggaattctccaaaagtcaaaaagcgttgaacttgcttttggtgatggcgaacatcaacaaataaccgatgacttgcccagatgttgactacgggcttcgagcagcggagtggttcaacggcgcgctgatcatatcagaatatcggtacgtgttatgattctttgcgattatttgctacgaattttcgatctgccaggccatcggcctcaaaatggtgtcacttgcatccaactcgaggagctcggtggtaggcagcaactgaacatccagggcgctgttcaccgtctgtaccacgtcgagctcgtgtgcaggagttgagtgggggccaatggcaatacgcacagaacctgtcaccaaaacgagttgtccgcctgcggcgtt

SEQ ID NO: 528921 - DNA, 177 bp, Homo sapiens
cgtataatacgtcctcacacgtcattctcaagcccgacaaaacatatagccgaccccttccttgtactatccctataaggcttacctcataacaagctccatctgcctacgacaaacagaccttaaatcgctcattgcatactcttcaatcagccacatagccctcagtaagcttgt

SEQ ID NO: 528922 - DNA, 1284 bp, Homo sapiens
  misc_feature (795)..(795): n is a, c, g, or t
aggttgccgtctggtgttgcttgcacagacaagtatttgtgtggccccggtgtgttatcacacaacggattcgccgggggggcgccgcccacattgttttgatcgaagggggggggccgtcccaaatagcggccggtggtgttgtgcaacaaataagacgtttgaggagagagtagttgttgtcagcaggcaccgcagggggctgtccgcccccccttcgtgtgtgtggtgtttgtgtttgtggtcgcgccgcctcttgttgcgccggcagcgcacgcgccccccggtgttgtgcgcaccacgtcccgccctcactgaggtggggcggcaaaggggggagacacaacccccgccccactactccgtcgaatgtacaccccccgcggggggcaacgacgccggggcgcaccgccgcggcgggaagaaagacgggggagcacaacacacggcaggtgatctcttcacacacggcagcttttttctcactcgtgggggacaacagccagcccacaactgccgtccgattgtagacacccgctggtgggtgtgtcgccaccgtcggttcccaccaacgagggggccactcttgccgctgtgtcgcgcccacaagaggggggacatctcgcgcctctcttctttcgtctcctcacgcaaacagagggggtgtccaccctctcgctcgcgctcgtgtctgtcctccccaaacagagagagtggcttatctttctccaagagggacaccctcttcttctccgggggggcgtctcccgcttggagaggccacaccccctcgcnccgcactatttgcgcacaaaatatggtcttcggctgcagagagtgtgtttctctctctctctcccccgctctcgctccccctcgcacagggggccacacaagggggttgtgtgttaaaagggggcgacaccctgtgagagacacacttgtgaaaacagcggtgtgtttccccttcttctcacttaattatttttctaataaacagaccacacccagactgtccgaaggcgccataatagagggacccaggcgcgtccctctcttttcttgtaaaagagaggtagaaaatttagtggccccggtagacccacggccctgtgatacagcgccctctacaccgccaacacgtcccagagtttccgcgttttgcggcaatttaaatttgtgcgggaggggaaatgggtttaagaggaataaaaagaggcccaaaccaattgtaaatagaaacccgttttcccctttccttttttttaacacaccaacaaacca

SEQ ID NO: 528923 - DNA, 353 bp, Homo sapiens
gtccccatttatgattttgaattttaaagttggaaagttctaagtatcaaagtttttaatataaaaggcgggtccaatctattcataataattttcaagttcaggagccgcagagacgcccaactttacacttatcatttctaccagtttatgggataaagaggttactcttctatttacggttaaaaacgggaagggccttttttaggcctttagctttgttcccccagtaataaaaaagttaaaaaaggcttccctagtcacccattccccaaaccatttggggttattcccattccccggcccatttcttgttattcacatggccagtaaaacaattgttttttaaatta

SEQ ID NO: 528924 - DNA, 113 bp, Homo sapiens
gctgcggttattgacttagaggatccccctgtggtgtttaacatggacccttaaaatggttaccagtagtgaagcagatgaatgatgtctatcatctcacacgggtaccgagc

SEQ ID NO: 528925 - DNA, 141 bp, Homo sapiens
acttgctagctatccaagctgaagtcgttgtaaatgatcatactctacatgttgatgtagaacacacagcctgaccgctgcatatggagagccagtctcgtcccttgctcgaagggctggtcctaggcagcaatctcctgg

SEQ ID NO: 528926 - DNA, 278 bp, Homo sapiens
ggtctacgtggaaagggacgtggtctaggatggaacgcgacgtgggcaagtagcgcgctgagcatccagttcattcagtcctatttcgtgtctgactacgaccccatgattgaggagtcctacacgaatatctgccgtgtggatggtgtcccagctcgggtggagttcctggacaccgtgggccaggaagagttcgggggcaatgagatatcagtacatgcgtgctgggcacggctatcctgctggtgttcgtcattaacgaccggcagagtttcaac

SEQ ID NO: 528927 - DNA, 115 bp, Homo sapiens
tagctggaccaggtgtggaggtcgggctgtggagagttctccgagggacactcctatgcagaccagacgttcctgctgaagcgaggcctcttggaggaaactctccacaacccta

SEQ ID NO: 528928 - DNA, 488 bp, Homo sapiens
gttgaggtagacgagtgctatgtctggtcattccttaagctcgtcagatggatcgtatagcccttgattaatttccagacgtatctgagaaactaaatagcagctcttgcgaaaagtctaggtcttgttagtgttttgtgatctcattaaaaggtggcccagctgatgaacacaagttatgaaatgacctatgtttgtgtaactggctggagttgcgtaatgctcaggccctgaaaccgtaatatctctaagcagacaggctagggcatatatctcggagatgttttcctaggatagttaggagagaaaaaagaacagcaaaaagaaaatatccaagaaggggaggtgtgtgcaacggttactgactaaaacaaaatcaccaatgaccaatctttgagattaaaactataacttgaacaggacatatctttcatgcctcaagttcctgtcatatataagaacagaggctgtaacagagactagtctgt

SEQ ID NO: 528929 - DNA, 1599 bp, Homo sapiens
tcacaaagaagcagaaaagaagaaaaaagtactagaaaccttttatattagaacactgagtaattagtgttcacttgttgtgtgctacattatgtagtgcaacgacgtgagtactgtctctactatgatgatacgacgtggtcttctatgtcacgctgtagatcgtgtgttcttctagtagttcccatatatcagcgtgtcctaaattcttggtttctccaccctaggtcttccggtaattttcccaccttttttgggagcccctgggggtgtcgtctgctctccctcgtgtcgtttttgtgagtgttcgcttgttgggggcccgtcagtgttgtatcaccctatgtatggtgctttggtacctactatacgggtgctctcgcgtgttaatacagttgttcataggtgtggataatcatcgtttagctaatacacatgtatgcccgtatctactatgcctcttgtgggggtgatcatgagtagtaaatcttatgttttaaaggcccgtttttttatatgcccacagggtgctaaaccacatggtttatgaggagaaaggaggacgtgttggtgttcacatggcgaaatatatttcctacggtgtggtcaccagagccatccactcagtattgtgtgacccagcttgcgctgagaagcccccccgtgtgtcgctgaggcacacttgtcaaggggggacccagtacaccttgggcgacctcaaagttgggaatggtcaattaccacgggtttctttgtgtggtatttcctcacggacatactgtttggggtgtgtgggtgctgacaattagtggggggtctgtgtaaacacacacaaatgggccctatacacgcgggtattggcgccgtgaaatgtgtgttttttgtttgtgtgtcgccaactgtgcgttgttaacaacggcccacacgcgtggtgtttaaacctcatatgttggtacgttttttcgtggcgggaaaaattgtgtgttaacccactgttatcgtgtgtgcactaccaacaacttggttgtataatgtgcctgtgaaacacgctgaacacaaccccttgttgtgtcttccacatgtttttcccacactcctcccaatgactataataatgtcttcacaccttaacacacctatatagaccccccacatggaatatataaccacgcctttatgagtcaccaaattggttttgacttcttatacactgagtacacactctaaaccactgtgggcgcacacaacaaatcttctccacacattctcttctcaccaatattattagtaactattgcacctgacagtctctcctcaaataattttttggggtttacacaccaatcactccctacacacaccccacatctcatactttcctgtatagggccctctcacaagagctacaatcccccaccacccccagattgttccctgtagagagaatctaacactccctgtagatctaaccaagagccaaaagtgacaccaagggccacggaaccctgctccttcggaggacctgccctctaaccctcactggtccaatggcttgtagactctaccccgtttgccccagttaaagacctttttgcacag

SEQ ID NO: 528930 - DNA, 896 bp, Homo sapiens
ccctcagtgtggggaacccccctcccgtgattttgtggggatcacaaaggcatgttggttgtagacgaaaggacggaaggggctgtcttttgtcctactagaggaatatatcagggccagtagcgaaacattttttggggggaagacctttttacaagctgctaatttaggggtcggatcattcaaaaatcggatgcgatccctgtgactatgcgggagaacgctggggcaaactctagtaaagcgggcttaaataacaatggcggtaaaacaacatcgggggaatatttattagctgcctcctcctgacaccttaacgagggatctattgggttaaacatgcagaaaaaattaattgttatgagcaaaggtctagcaccgcgaaaaagaaataacggtgatgcggccccccaagggttcgagcgcagttaggctccaaagaccagagaatctggaatatggcagcgaatgccgtggtggaagaaaatgcccttctcgggggggcgaaaaaaatggacacaatgaaccgccacctgcgggaacactgggcccccaaccatgtcggttacagccacacagagggcagcacgcactgagtaacagaaggctcctgtgacgaaacgccgaacagtctccccccagacccacaataggccgtccccgaggcgcccgggggcatttgaaaccacacacgcggagcacaccctcggtgtgccccggcccaggcagcagcaggcagattgggagaccaacgaagtcccacgcagggcggagaccgccgggggcacagccccatccccgcgaccccggttgaagcagcactcgcacggcctatgttgaatgaccaacgacaaaagaaaaaaatagggaggaaacctagaaccccaaacaaaaca

SEQ ID NO: 528931 - DNA, 951 bp, Homo sapiens
  misc_feature (951)..(951): n is a, c, g, or t
gcctggtgggattcgctgatcgtgtggcaaaagctctgcggaatgcggtgttctcccactgatgttttcgcagctctgtactagaatatggccgctaggcttttgcgtaagggggataagtccctggtcccgtggcgccacacagaagcacgtgggaggccgagtccttgggtgccgagacgctatcctgtgtccgtgcatgcgcccgcaaccccgaatgactcatctgggatctctcgttgcagggtagcgtaaccgttataccctgtgagtacttccttgaatgttctacgagaggacagcgctctggagggtcttatccagaatgagattacggtacgttgtaaaagtgacctcgcgtgttaatgataccctgcccaggaactgggagtgctatttattctattgaaaggcgagatgctgaggtacagaaacgttatgctccccctatttcaaccaaggaaggttctggttagaagactactggtacacgttgcatactatactgttagtaagattgtaccgcgggggtcctgcctgtgacacctaggtgaacttattcgggctggacttgatgactgcatggaagtggttcctattgtgtggggcagtgtttccagtggagatgtggcgttggggtgcacgctctgttggttccttttttttggaccatcctaagcatcgtgaagtttggacacgtaggaagtgttacgctagtttcgaatctgctgcacagtcacccttgagatgcgtgtgatgagatgttttttgcttaggcttatggatttaaagggcttgtaagacacggaaaaagtgaagggagttaaccaatcagacgtggactttaagggaataggttaaagaaggggagatggcggtatacttggctgaggagggggttgaaaggggaaagaaatggtggtattgttcagaaaattaaaacggagattn

SEQ ID NO: 528932 - DNA, 379 bp, Homo sapiens
  misc_feature (10)..(10): n is a, c, g, or t
  misc_feature (118)..(118): n is a, c, g, or t
  misc_feature (376)..(376): n is a, c, g, or t
  misc_feature (379)..(379): n is a, c, g, or t
aaattttccncccccatccgtgggttgtgttttccacctttaccgaataatgtcccttagacatataaataaatttgtattttaaaagtgaccttgaatttggctgtgccaaggtgcntcacgcttgtaatccccagcactttgggagactgaggtgggtggatcatatgaggaggcctaggagttcgaggtcagccctggccagcatagcgaaaacttgtctctactaaaaatacaaaaattagtcaggcatggtggtgcacgtctgtaataccagcttctcaggaggctgaggcacgaggatcacttgaacccaggaggaggaggttgcagtgagctgagatcatgccagggcaacagaatgagactttgttgnaan

SEQ ID NO: 528933 - DNA, 399 bp, Homo sapiens
gatcgagcgcggagacaggaaagaagagttggagatgagatgaagagaaggactataacaaataaaaaaggaaaagaaacaaaaaaaacagaagagaaaaggaaacctggtaacttatgggccttgagattctctctgggctcaagatgacctggatgccaagccattgaccctcctctgggggcctcaacccatctacaaccggatgaaggttcgcctgatatactagggaatggggtagggtaccttgttcactccaatggtggcacatttttataccttcacttcaaccagaccttactataatgtgtccagaaaatggaggctagaaagcaggtgaaaggtccctcctggtcaaagcaacaaggtctgtgccggccttccaccatcaataacccc

SEQ ID NO: 528934 - DNA, 195 bp, Homo sapiens
ggcaggatccctaaccagccgtctgtgtcgcgtgtatacgcgggttcccgtacgaattaccggcgtcgcccgagtcgtccttacgctccttcagaagagggcatagaggcgcaaggtaggtgaagcgaccaactgagaacgctgttccacccacccaggagagcagtgcggatctaacatccaggtcgtcctcgg

SEQ ID NO: 528935 - DNA, 284 bp, Homo sapiens
atcgagctcggtacgcagctcgctgtcgctggtcgatacgacggggcggggacttgaacgcggcggggacggtaagggtgcggggactagacactcggggactcggggacgacggacacggggtgtgaataacaacaacgggacttgaaaaccaggagaggggtggggcgcagtggtttacgcctgtaatcccagcactttgggacagccgaggctggttggaccgcttgagctcgggaattcaagaccagcccgggcaacacagcaagagccagtctctacaa

SEQ ID NO: 528936 - DNA, 910 bp, Homo sapiens
attaatcccctggcccaacccgtcatctactctaccatcttggcaggcacactcatcacagcgctaagctcgcactgattttttacctgagtaggcctagaaataaacatgctagcttttattccagttctaaccaagaaaaataaaccctcgttcccacagagagctgccatcaagtatttcctcacgcaagcgaatcgcgtatccatgaatccttctaatgagctatcctcttcaagcaatatactctccggagcagatgaagccagttaaccaatactaccaatcaatactcatcattgaataatcataatggcgtatagcaagtaaaattaggaatagccccgcttttcaacttctgagtcccagaggttagcccaaggcacccctcgtgacatccggcctgcttcttctgcaccatgacaaaagagtagcccccatctcaatcatataccgaaaatctctccctcgctaaacgtaagccttctgcctcactctctcaatcttgatccatcagtagcaggcgagttgaggtggattaaaccagaccagtacgcaaaaaggcttagcatacgcctcagttacccgcataggatgagtaatagcagttctaccgtacaacccgtaaacataaccattcgtaattgactatttatattatctaagtatacggttctaatatcagttaaatccagacagactatagattcggactgaaagtagtgatagacctgatgctcgactcttctaggggtgcccgtaaggtttgccagtggctttgagattgaaaaagtttatccgcatagaataagttattattaaggaatccaaaatccttagaaaaagggggaaacccccgtgggttttttaaaaaaaggggttgggggggtttcgtgtttgttgcttgtga

SEQ ID NO: 528937 - DNA, 137 bp, Homo sapiens
tcagctcggcacctttgacgttccgaaagctggttgatttggtataacacttgaaggccgtatcaaaacagtcttgacgtgtatgggtcccatattccaatctctcatattgagcagaatcacctttttcacctcgt

SEQ ID NO: 528938 - DNA, 483 bp, Homo sapiens
  misc_feature (350)..(350): n is a, c, g, or t
  misc_feature (440)..(440): n is a, c, g, or t
  misc_feature (476)..(476): n is a, c, g, or t
ggagaagcattgctcaggacagcgtgtaaatcgacttcttgtgaggtgccctgcacgccggtcctgggagcaggcgggctcccgggggtgcggggagccctcgactcctacctggtgtgtgtgttgccagtttgcttgcgccacagtcgtggaggatgcgtgacagtgccgagagctcgccccaggcaccagcccagggaacaggtggaggacatgcatgaccgcggtcgataggacacactggtgacacacagagtcacgagagagctgtctggggatagtactgtccagagagacccaagtgcggcttcgccggcactaagacgcagaggagcctgaacgtatatagntgaacgaaccaggaggagccgtcaccctgggcgtagaggcgccaccgaggactggctcgcatcccttgtgagtaggaggagtgttactgngaaggctcgtacgtgtgacagcgtgtgtctactagnccgaggg

SEQ ID NO: 528939 - DNA, 169 bp, Homo sapiens
gaaagatcctagtacaaggaaggcatcctcctgaccagcagaggttgatctttgctgggaaacagttggcagatggacgcaccctgtctgactacacatccagaaagagtccaccctggaccattgtgccccgctcttagaggtgggatgccgatcttcggtgaagacc

SEQ ID NO: 528940 - DNA, 1402 bp, Homo sapiens
gtcagtagtcttaagagtaaagctttccagtatgaatttagatgatcacgcaaagaagaaattaatttaacacttgtaggcagcagcgcatactgcaagaccacagatgtgcttaccatcaaaaccagatcaggtgccctttaaggcaggcagcaattacgattcatgcagtgtatctactaacagtgttatacccatgcagtctaggaaatactgcaagcacatgggcaacgacacagtaagcacttgacagcagcacgatggcaagcagtcatcatcatgaggcaacacatagcatccatctagcaacagcacacatcatccttggcgcacacacgcttcgtcccagcaattgcaacaagcgtggctgcaagcacacacacatccatggcacacatacacagtcacagagtcacaggcagacgtccgatgtggggtacctaacaaggcaaaatttgcagcagccagtgacaaaacaaagtgcgtgttctgtatcagtttcgtataaacacatgcatgggaaggcacacagagtggcacaacattgtcaccatgtgtacatcgaggataacgaaacaggcacatccaggtagaaagcaaggaacgttattgaaaaactggtagaaacccagatgggacaagtagaagtggggcaagctacggaacacagagaagtcggaggaaatacgcaactaactcactaaacaaatcatatgcactgacgctcactagatcgcgtggcaagacccaggaaagcatagctacaaacatcagacggaccgaacactcagcaaagcaagacgcgagacacaagagagagagcacagcgaaagacacagagaatcgcgaacgagacaagcacacacgcggacagaacacggctaggatgaaccgagagcaagaccacgtacagaaacacaacacaacacaagaacgactcacaaaataggacatgcacaacacgggaggaaacacaaaggcagcagatactacacaccaagacagtgaaaaatagagaacaacacacaaacggagacaaataccataggcagagaacaacatagacagaaccacaaaaacagaaagaagaaaccatagccacagaacacaaagatgatcaacacagagaggaaaaaatgacacaggaaaggatatagaggcaccacacaaaaggaaaaaagcaacgaacagcatagcaagcaaggccacaatcgaagcaagacatcaacaactggtatatataaacaagacagtagcaaatacaacagaggcaacacaaaatgagagataccacaccatagaacaaaaaatataaacaaaacacacaagaagacaaagggaggagcacacacatacgcccagacaaacagagaaatgaagaaaagagaagaggaggaagaca

SEQ ID NO: 528941 - DNA, 469 bp, Homo sapiens
ctcaggcgggcggctggctcatagcccacactgtactctacattattaccttagatgtcaacaagacctggtcctgaactcttactcgccacttagctctatgacctaggacaagtggcttcccctccctcccgtaagtctctgctacatcataggtgaaatgggaaaaaccatagctcgctcgttagttatttgtgaagattagttaattactggattgaaagcacctagaaaagtgccaggcccagggtaggcacatggcacatgttagctatcatataagacataaatcaatacggggctccatcactatactgccaagctgttcccactgagtctgggatatctattacccaaataaaaagaaggagccagtttcacttgcccttaccactgggcaagcagtagactacatgctgaaacagaagagatgacatggtaaatccttctttaccatccatctgtgcta

SEQ ID NO: 528942 - DNA, 353 bp, Homo sapiens
atttgtggggaattttggtcattgaggagatcttatgacatgtacgtgacatgtagtcatcccatttcctgattgcggaaggatgaagtttcccttgccaaagattgttaaatcacattaggagaacgaggcaacttaagatggaacaatgatagaacaatgtttgtaaacactgccaaatacattttaatgtgaaaatttttataaatattaacgtatgccttttactgtaaagatatttcagtttagcttagtgaaccaacttttgttgtgtttccactatatatcagaccctatgctgtatgcttgagatagtcgacgcggccgcgaatttagtagtagtaggggccgct

SEQ ID NO: 528943 - DNA, 166 bp, Homo sapiens
gctgctacaagacgacatgtcttagacaaatactcatgtgtatgggcagaaactcgaggactgtattgtgactaatgtataacaggttattttagtttctgttctgtggaaagtgtaaagcattccaacaaagggtttcactgtagattcttttttttgcacccca

SEQ ID NO: 528944 - DNA, 265 bp, Homo sapiens
  misc_feature (68)..(68): n is a, c, g, or t
  misc_feature (73)..(73): n is a, c, g, or t
  misc_feature (82)..(82): n is a, c, g, or t
  misc_feature (105)..(105): n is a, c, g, or t
  misc_feature (115)..(115): n is a, c, g, or t
  misc_feature (245)..(245): n is a, c, g, or t
agcgctttgcacatgcccttatggcaggggcaacgtgacctgagtcaaatctcaggctgatcactctnatttnaaggaaatnagggcggggggcagaccctcgtnagcgtttttncacccaaaacccggctgctttaactgtttcccaagttcccccctcagaaggaagtccttttcgaaaggaagggcaaagtgagagaagagaggagtcagtgagaaagcaagtgggcatgtagatgactgangctcacattatctgagccac

SEQ ID NO: 528945 - DNA, 412 bp, Homo sapiens
  misc_feature (60)..(60): n is a, c, g, or t
  misc_feature (63)..(63): n is a, c, g, or t
  misc_feature (118)..(118): n is a, c, g, or t
  misc_feature (120)..(120): n is a, c, g, or t
  misc_feature (125)..(125): n is a, c, g, or t
  misc_feature (144)..(144): n is a, c, g, or t
  misc_feature (184)..(184): n is a, c, g, or t
  misc_feature (296)..(296): n is a, c, g, or t
  misc_feature (338)..(338): n is a, c, g, or t
agcagtagcagctgcagagcgcggagcagagcacagcctcagccaccgcctcgccatggnggntagcagctcgctggaggcggtgcggagaaagatccggagcctgcaggagcacgtnantgccnggcaggagcgtgcgggcanctgcagcgcgactgaccaggagcggaactgcgggaaaccntgaagctgacgtagcttctctgaacagacgcatccagctggttgaggaggagttggatcgtgctcaggagcgtctggccacagctctgcagaagctggaggagccgagaagntgcagatgagagtgagagaggcatgaaagtcattgaaaaccngagcccaaaaagatgaataaaagatggagattcaggagatccagctgaaagaggccaagcacattgctgaagat

SEQ ID NO: 528946 - DNA, 1262 bp, Homo sapiens
  misc_feature (216)..(216): n is a, c, g, or t
  misc_feature (259)..(259): n is a, c, g, or t
  misc_feature (270)..(270): n is a, c, g, or t
  misc_feature (375)..(375): n is a, c, g, or t
  misc_feature (392)..(392): n is a, c, g, or t
  misc_feature (404)..(405): n is a, c, g, or t
  misc_feature (430)..(430): n is a, c, g, or t
  misc_feature (435)..(435): n is a, c, g, or t
  misc_feature (437)..(438): n is a, c, g, or t
  misc_feature (440)..(440): n is a, c, g, or t
  misc_feature (442)..(442): n is a, c, g, or t
  misc_feature (456)..(456): n is a, c, g, or t
  misc_feature (459)..(459): n is a, c, g, or t
  misc_feature (464)..(464): n is a, c, g, or t
  misc_feature (472)..(472): n is a, c, g, or t
  misc_feature (477)..(477): n is a, c, g, or t
  misc_feature (483)..(483): n is a, c, g, or t
  misc_feature (486)..(486): n is a, c, g, or t
  misc_feature (489)..(489): n is a, c, g, or t
  misc_feature (494)..(494): n is a, c, g, or t
  misc_feature (496)..(496): n is a, c, g, or t
  misc_feature (507)..(508): n is a, c, g, or t
  misc_feature (512)..(512): n is a, c, g, or t
  misc_feature (514)..(514): n is a, c, g, or t
  misc_feature (521)..(521): n is a, c, g, or t
  misc_feature (528)..(529): n is a, c, g, or t
  misc_feature (533)..(533): n is a, c, g, or t
  misc_feature (540)..(540): n is a, c, g, or t
  misc_feature (543)..(543): n is a, c, g, or t
ctcagaagtatgcgatgtaattaaagaaattattggataacctctacaaataaagataggggaactctgaaagagaaagtccttttgatttccatttgactgctttctatgagcccacgcctcatcttcccctgtgcacatgtttacctgatacagcagtgctgcgtgttgtacatacttggaacaacaaactataaatactgtacttctgtaccnacattgcctcctagcagagaagtgtgtgtgtgacaagccagtnctacaggcatnacctaggtgtgagactaaaagcttttcttattgacttaaatttggataacagcaaggtgtgaggggggtggtgggtatggtgtgtgcttggatgggaaagaaaangctccactcacctatangagatattttanntggaatccatttaaactcaaaacanttatnannancnaggtgaagaacatnaanctgtntcttattnatttnattccnaanganctacntnttaagtgaaanntatnancaaccanattaaannttanccacatnctncattttaaggtctaagtttaactggtcaacatatacaatggattggagctattagtaccatcaagtgtgatggggctatagttcccaactactatgtacatcgtccacataaacacttcaacattgggccttaagaagaccccatacattactcatcattaccatcatactacgagatgtactagtgggtatcctcaagataaataacataagataatagcctcttaataaatcctatatgtcaaaaaacagaagttaaggatcctaataaagatgagaagggctgacaaatacatatgaatggaaatactagaaggtaattacaaagaaaccaaatagaccactcatggagacatgatacatttaaacagaactgatacagccgtgttggttaataaaacggataacacaggtaataaccttaactaggcggtggaatcgagccacatgacaaagcaaagtagtaaccaagcattaaggagagcagacacgcggataagagaagctaaagaaatggagacataaagggtagcacaacaagccgcgacaggaaacggcaaagacgaaggccgccacgaatagcactacgaacgataagagacgaaaacgcgcgcggtacgagcaaggcagaaacgacagagacacaccagacagcacggcaggagcacgggagcagagaaacaaaaagagaataaggaacggagcaaagaacccacatg

SEQ ID NO: 528947 - DNA, 755 bp, Homo sapiens
  misc_feature (638)..(638): n is a, c, g, or t
cgcgagctgcgggcgctgttgctgtggggccgccgtcctgcggctttatgctgcgggcgccggcgctggtggtcgtgccgggaggaaagaccaattctgtgtcctcggaggaccacagcccgagatggcggcccctaaggcgagaaaccctagccgtgagagcttgcgggctaggacgactgttcaggccacgctagacgcgccgatgcacaaggaaggaagcccctgcactcgattatcagcaagcacagagagcgtgcagggttccatttccaaacatgagttccaggccgagaacgaaagaagcttgtggacattgtcggcccggtccctgttagctcagaaaagaggaggtgtcatatacgggagctgatctccaatggccagcgatgcccttggaaaaacctgggtcacaaacctggtgtctgacgggccaagcacgtgccatgaaattggagattcactttgcagaccaatgccggagaaaaggctaccatcaccatccaggatactggtatcgggatgaccacaggaagagctggtgtccaacctgggggacgatttgccagattcggggtcaaaggccttcctggatgctctgagaaaccaggctgaggccagcaggcaagatcatcggncagtcgaagtgggtatctactcaggttcatggcgggctgacagagtggaggtctattcccggtcggaaccccgggaaacctgggttacccagtggttccagatggtctggagtgtaa

SEQ ID NO: 528948 - DNA, 629 bp, Homo sapiens
  misc_feature (216)..(216): n is a, c, g, or t
  misc_feature (259)..(259): n is a, c, g, or t
  misc_feature (270)..(270): n is a, c, g, or t
  misc_feature (375)..(375): n is a, c, g, or t
  misc_feature (392)..(392): n is a, c, g, or t
  misc_feature (404)..(405): n is a, c, g, or t
  misc_feature (430)..(430): n is a, c, g, or t
  misc_feature (435)..(435): n is a, c, g, or t
  misc_feature (437)..(438): n is a, c, g, or t
  misc_feature (440)..(440): n is a, c, g, or t
  misc_feature (442)..(442): n is a, c, g, or t
  misc_feature (456)..(456): n is a, c, g, or t
  misc_feature (459)..(459): n is a, c, g, or t
  misc_feature (464)..(464): n is a, c, g, or t
  misc_feature (472)..(472): n is a, c, g, or t
  misc_feature (477)..(477): n is a, c, g, or t
  misc_feature (483)..(483): n is a, c, g, or t
  misc_feature (486)..(486): n is a, c, g, or t
  misc_feature (489)..(489): n is a, c, g, or t
  misc_feature (494)..(494): n is a, c, g, or t
  misc_feature (496)..(496): n is a, c, g, or t
  misc_feature (507)..(508): n is a, c, g, or t
  misc_feature (512)..(512): n is a, c, g, or t
  misc_feature (514)..(514): n is a, c, g, or t
  misc_feature (521)..(521): n is a, c, g, or t
  misc_feature (528)..(529): n is a, c, g, or t
  misc_feature (533)..(533): n is a, c, g, or t
  misc_feature (540)..(540): n is a, c, g, or t
  misc_feature (543)..(543): n is a, c, g, or t
ctcagaagtatgcgatgtaattaaagaaattattggataacctctacaaataaagataggggaactctgaaagagaaagtccttttgatttccatttgactgctttctatgagcccacgcctcatcttcccctgtgcacatgtttacctgatacagcagtgctgcgtgttgtacatacttggaacaacaaactataaatactgtacttctgtaccnacattgcctcctagcagagaagtgtgtgtgtgacaagccagtnctacaggcatnacctaggtgtgagactaaaagcttttcttattgacttaaatttggataacagcaaggtgtgaggggggtggtgggtatggtgtgtgcttggatgggaaagaaaangctccactcacctatangagatattttanntggaatccatttaaactcaaaacanttatnannancnaggtgaagaacatnaanctgtntcttattnatttnattccnaanganctacntnttaagtgaaanntatnancaaccanattaaannttanccacatnctncattttaaaaactaacattaacttttctacatttaaatagaattgaacctattaatacaataaatattactttttaaccctttttg

SEQ ID NO: 528949 - DNA, 363 bp, Homo sapiens
gtctagaggatcccgaatagggcggtctcacaagagggatgcaaaggcacattgaacagttagaagaaagagtcagaaaactgaagagaggataaggaaattattgagtctgaggaacagaaagaaaagagatgaagaaaggtgaaagcagtctaaggaaccggtgcgatacctcaaccagatcagcatacacatggtgataactacagaaggagaagagagagaaaaggctggtgagaatatttgaagaaatgatgaccaacagcttcccatatttgatgaaaaacatgaatatgaatatctaagaagttcaataaaccaagtaggatgaactcaaagaaacacatactgagacagcataca

SEQ ID NO: 528950 - DNA, 1195 bp, Homo sapiens
  misc_feature (506)..(506): n is a, c, g, or t
cggcacgaggccggaccccgcaaccgcgaggcgagagagcagcgccggcgaggcactggctgggctctgactgtcacgttaattccctgctgctttttctagtccccagccgcctcgcccctcctccctcattcccagcctgggtttggaggcgatttccctctattgactgagccgactgcatctctgggcaagcggcgctttgcctctctcctgtctttgtctgctcttcctgcaaggctacggcgcctggagcagggtctgcagcgggcagcacgcacgtaaagcacgacggcaaccgcacagtgcccttccgtacccgggagccacggagggactgagacgcatcggcatccgcgcggcgcgggcaccttagagagcaaccggggccgcaacgaaagcggacatagcgacatagtagattgacaggaggacacagtgtggtgagcatgcaagccgcccgccgaaactacgcccaggaacggacaattcacactgcgctggtngcgcacacgccgcgtgcgcacagcgttgtgagcccagcgtcttgctttggcacgtcagatggaaggagcaagtcgggccgtgcgcggaattcaattgctcgagcatgccaggccatgaactcttggtacgaacctgttcgcgtataaagccctggatataccccttcgtacgcattagttgatgcgtacagtgcccgtaacaacaaggtctctcggttccctggcgtagcacttgagctggtaggccctgttgccactctttccttggcacaggggataatggatgctttacccatatatcgggaactagctactatttggtggtcatatacaatgctagggcgcgcgttttgaacagactggattcccaccacctgggacaagggccacactgcgcacatacagttcagctagagaggggcagacgaggtaatcgcggacaggacagcaattttcatattcccactgcccttgtcgaaactagccacggtcttgaaaccgtggggcattctcggggaagtattccgctccgatttcaaggaagttcaagcacattcttaactgtgcgcccaatagatgcaaaccattgtgttagcgaaatggcggaagccactgctcctataccaaactctgtggcgacgcacagatcttccctcacagtgactcgttggtttccccatacgacgata

SEQ ID NO: 528951 - DNA, 180 bp, Homo sapiens
tgttcacttgaagctcttgccctgattgaaggctttgccacatgctggaaggccccctcccgggaaaagtcctctcgacccagcgtctgggtctcctcgctgccgggttccagtttccgccatgtgtttgactcgtagtccacctgccattctggactcagcggaagggcaggctcctgg

SEQ ID NO: 528952 - DNA, 142 bp, Homo sapiens
  misc_feature (1)..(1): n is a, c, g, or t
ncccttgtcaagtgattgatcagaaaaccagctctcggcaaggtcggaaggtctgggaaaaactgcgtgcagtcatcagcggactttcgctcactcgagtggggagcagagcggcagcgacacggacacagacaaacacgaa

SEQ ID NO: 528953 - DNA, 167 bp, Homo sapiens
gaacctatgcaaactatacatttttgaatgacagttatcattgaagaaatcagggtaaagtaaaaagatcctagaatcaaacagaaatgtctgctcgagccaggcacagggatttttgacatccaagctcagaccctgttacttacacagcaagtgcttggtgaatt

SEQ ID NO: 528954 - DNA, 350 bp, Homo sapiens
agtttgtattgaagatataatgctgagcaaaataagccggtgacaaaaggacaaatactgtacagttccactcctaagagctgcctagaatcatcatatttattgagacagaacgtacaatggtgggtgccagggactggggaaatgggaagttatgtttaatgagctgagagtttcagttttgcaggctgaaaagagatctggagctggatggtggtgatggttcacagcagtctgaatgtgctccatgctactgacctgtacccttaagatagttacagtggtacattttatgttacatataatttaccacaatttaaagaaaattaaaaaaatttacaaattccctt

SEQ ID NO: 528955 - DNA, 798 bp, Homo sapiens
gcacgagaaattttgtaacattaaaactggttaaagaagatattgcgtgtcgatattctccgttgaaaaacttattgaaataatttattagtgacaacgcatccatacagctaaccataaagtatttcttgtagaatgggaagatacttttatccttagtaattagtgtttcaaaatgcaagaatacggccattgaagttctcaacatcaatagtttattcattattcgattgtgaaatgaagaagaattttctgaagataatatattcatttctgaaatcacattcatgtcatcaaggtctgacttatcctgtgcgacacttttcaatggtactatgggaaagttttcctccacaaaaatctcaattttttctcttatgaattcaattgagtgcaaatggaaactaccatagtatgtcatcgtcaagttatctaagtctgacaggagtaacgcaagctgggctctcttaaatgtaaattcatgaattctcaaaagtttgtgattattgatatcgcttagatcgcccctaactcggttcatatataccgtcagagaatcaggatccttaatatttaggaataaggccattaaagatatcggtgagacagaatgtctacccttgagacttgcttcaaacgaacaaacggtaacgatactcaaccagagtattcttctgtgattcaaggttcttttatctgaggtggacggggaaatcaattgagggaaatctgaaggatctctgggagaccaatcgaggtggaaagcatcattatcaaactactgataacatcggtggg

SEQ ID NO: 528956 - DNA, 342 bp, Homo sapiens
cgggtctccctgcccatgtacaagtctgtaggcatcctggtcaagggccatcagagactgaaacacagtagtatatgttaggtggaaaggtcctgagccctccaagcacaagattatgagtgtgctgaagacgaacataaggaatatcacagagatgctgccaaacaggtcagggctgtaccactgttactattgaagcagagaccactagtctgagtgaacctctgaagctggtaatgaccacagcttatgacaaaccctttctctcaatcatgccaggcactgaggtggcatcacgagagaatatgaagttgcaatgtttctcaaaatttgaacttggtt

SEQ ID NO: 528957 - DNA, 154 bp, Homo sapiens
  misc_feature (77)..(77): n is a, c, g, or t
  misc_feature (119)..(119): n is a, c, g, or t
caaaaccttaaattctagagaaatagagggaaaggatttaggacagtatttcttgtctatgacaccaaatgcaaggnaacaaaataaaaaaacaaacaaacaaatggggctacatcaancttaaaaacttctgcatagccatagggcacaatca

SEQ ID NO: 528958 - DNA, 250 bp, Homo sapiens
  misc_feature (6)..(6): n is a, c, g, or t
  misc_feature (35)..(35): n is a, c, g, or t
  misc_feature (38)..(38): n is a, c, g, or t
  misc_feature (203)..(203): n is a, c, g, or t
  misc_feature (210)..(210): n is a, c, g, or t
  misc_feature (246)..(246): n is a, c, g, or t
cggcgngagggaacttgcaccgaagcatcactcanttntcccaaacctccaggcctgagccaagccagcgcccaatggatgacaaaaagaagaaacggatcccaagccctgcctggcccagcacccaggccccaggacactatggagggtccctgtgcctaccagccacagcggctccttggcctaggacttcctcatctgcnatccccnaagtagcgggccaagttcaagatagtaggcaaaganaagt

SEQ ID NO: 528959 - DNA, 162 bp, Homo sapiens
  misc_feature (158)..(158): n is a, c, g, or t
gttggtcagttcatggtaacggcatgaaggaccatgtcagtgagcgagtgtacaatttgccagtcctgacaagaactgcccaccaacataaccaatttatgacaagtcaattcattacaaaggtatagacacctctgtgttgggcagactggtcatgntgca

SEQ ID NO: 528960 - DNA, 618 bp, Homo sapiens
  misc_feature (479)..(479): n is a, c, g, or t
gggtgctgactgtttaagtaatttgacccagtctattaaaggcagagtcagaaaatgaaatgaggcagtctggctccagagtctaagctcttactgttatatatcctttcaaagagacacaagtttcacttttttgaaattcacagcccagtaatgagctagagagaaacaacacaaaaagagtcagaaggctaatatctattcccaggactgccccttacaaggattaaggtttaggttaagtcatttgatcctcatgggactgaattgtaactaatctgttaattagggatagaagtagttgcttaggctctctcattggcctgctctgagaacccactgagagggtacttataaaatcttttgcaaagccctatataaaagttggtgttattaagtttaggtcttatctttagattgctcaagcacttagcaccttttatttgtacctgttctgtgcaaatcaaaggaactcaccnatcaataaatgtttgttaactgaatggtttcagagatcactttaaatatacttggtgctagatttgaacatacaacccaaagttcagaggcccactttagctaagttctaatattcacaaactctagagtctagaagac

SEQ ID NO: 528961 - DNA, 89 bp, Homo sapiens
aaaccttcctaccctacctaccttacagggctgttgttaggacccaggggagtttggatgtggaagtaaaagtgctgctaaaacctaaa

SEQ ID NO: 528962 - DNA, 272 bp, Homo sapiens
gggggccccttttttaaagggcccccccgttccttggggggccccccttggttttttgggggccggcccccccccttcccccccccccgggggggggcccccttttttttttttggggggggggccccccccccccccccccccctgggggggtttttttttgggtttcccttggggggggccccccccccggggccccccggtttgtggggggggtttttccccccccccccggggggggccccccctttttagggggggtttttttttta

SEQ ID NO: 528963 - DNA, 328 bp, Homo sapiens
agctttcattgttgactttggcatacctttcattaatgtagatcgatatctgcatcatcatatataaggacgtctccggatatatttgtctcgtaaatcaatctgtaattaccagatctatgaccatcctgtcaatttactctgtggaaggcacatgtgttccatgaagaagactattggatgttgggaaaaactcttctccatgtttttctctcagtctctcatatgtttccatgtcaggtttgatctgcttggtcaaccgatgatactggcgtaactgggcagcagcataatctgaaaatcccagatcagggtttttcctctcctt

SEQ ID NO: 528964 - DNA, 795 bp, Homo sapiens
ggcgccgcgcggtgaagtgttgtctagtgcacgctcggaggcatgccgtccaagggtccgcatgcagctcggtgcaggtcttcggtacgctactaagacagcgacagctgtggcgcactgcgaacgcttgctatggtctcatcaaggtgaacgggtcggctccctgtgagatgatagagccgcgcacgctacagtacaaagctgcttaggagccacgtgctgcttcttctggcgcagggagcgatttttggaagggcgtttgggattgtatcacaatcccgtggtcctggtagtacaaggggtgtgttgtgccacggtggctcgcagattatatgcatatccggtcgacgtccaatctcgcaaagccacgtggtggccgtattgaccgatgaagatcttgtggatagaggccttgccagttaaggaggatcagacagagcatccgtcatcgcagatagtgaccggtagccctgcgtgggtagactgaccctcgatcgatgcgagtccatcaaagtttgggaggccctggtgcccgcgctcgctaccagaaatcctaccgataagcccgtcgtgactcaaaactgactttgtattagtaaaccagttgtccgagggacttgtgaatacgtttcaaatacaccagagagtgaaccctaagaggccacaattctgacgtaccattccccacccacccatatgagaaccctaggcagtggacttcccaaaggccagaaggggaccctttgcgtggctggttgtgattaggaaccagtgcgccggcgtattcttgtcgac

SEQ ID NO: 528965 - DNA, 280 bp, Homo sapiens
tagattgacgaaatgaatcaaggctcgtgggcggcgcactgccacctcctcggaggacacgctggggctcggcggtgaagagtctgtttccgggggcgctctcccttgggtgccccgatggctgctgagggcctgggggccatttcctgcattccggggacccgtcatcactctcacattgtggtcaggacacaggaccaagaagggcccttcacaaaggatggaggtggtcacttgagggtggccggactgggcgcagctgtggacctgcccccctaaa

SEQ ID NO: 528966 - DNA, 395 bp, Homo sapiens
gcaaacccactccaccttactaccagagcaaccttagctaaaccatttacccaattaaagttttagggcgttaggaaattgaaaacctggcgcattagatatagtaccgcaagggaaagttgaaaaattttaacccggcttaatatagcaagggctaaccccttttaccttctgcataatgaattaactaggaataacctttgcaggaggggccaaatttaagaccccgaaaccagacgggttacctcaggacaactaaaagggggcaccctctttttttaggaaataaggggaggttttgggggagggcgcaaacccaccgggcttggtttacttggtcgccacgtagatcttagtcactttactttgccacagaccctctatatcccttgtaa

SEQ ID NO: 528967 - DNA, 292 bp, Homo sapiens
aagtcatataagcgggagagattggtccaaggcacatgttggctagcaggagagctgtgactggaactcaagtcgtctaaaattcagcgtacctttcaaatgcctaggattttctcaggaatccttcctaaagaagtggattttcagtcacagaaatctatctcttgaagctccaaagccttttatttcggttttggatagacatttattggtttcttttcgaatagagatcttgctgaaatgtatcatatacatccctattttgtcttaaagcatacctgaaagataattt

SEQ ID NO: 528968 - DNA, 802 bp, Homo sapiens
tataaaaatactttcactttattttaaaaaaatgaaaactcatagagtaagcttatcacaaacgggcctattaggagtcacagaattcacaggaaacaattcctgaaaaccaggtgcctgctgccacctctccaagcaggccagagtccagtagagaaggcgattcaggaagagggctcctcagagggcagggaggttagctacggaggccgctcacggtggaaagtgtccagttgaaccatgtgccaaggaagaagataaaattctcgggggcgtgaccacaacagggggggggggataaagacaacaccactggccgtgtacttctcatctctattggtccatttcacggcgggaaggtgacctcttttcccctaatcttctttcaacccacgagaagtgtaagtgcttttctcagagctaaaatctataatccacccctatttcccagtggtctctactcctgggagaccagcccgggtggcatctctccctccgtgtccctgggccagaatcttggtggagtcaagggtctggcgggagtaagagggcagagtccaggtactggacctcgacggtggtgtggtcacctggaagctcttcgttggcaggcctagatctctttaccgtggagaggtcctgggacgtgccattttccctgggggggctcgcaaattgtgcgaagtgggccccatgacaggaagatttaggccgtgggaaaaaggaactcttccctgttgtccatttcccgagcctggtcccgcagggtctggtctgaagcctttgagttccagaaacccgg

SEQ ID NO: 528969 - DNA, 487 bp, Homo sapiens
atctgctgctttaggctttaagaaaggttgagtgtagggagattgattggtctcctcatacttttttagttttctcaaattctgttattgtccaatttcctaatgtcctagaaaaattgacaattgtggaatgcatgggactaatggacgctggctctgcagtcagtcattattaggcatatggtaccttcaatccagcccacacaaacaaatgatttagggtatcaagtgtcagaggagagttaagtgtatcaaagagaaggaatcaaagactaaagaagagactgcctagagattctacaggctggttagaaaatatacataatagaaaggggtttcaacctgtttaagtgcacagatccatgccaccaccatgctttcttgaagataatcacagatttgtaatgtaaggtaatatgtatcctgtgatatagtcgtctagttctggtgtaagaaagaccccaaaagataaagagataaaagtaaa

SEQ ID NO: 528970 - DNA, 779 bp, Homo sapiens
agtcatcctgctcaggttgggcatagtggctcatgcctgtaatctcagcactttggtgaagccaaagtgggaggattgcttgagcccaggagttccaaaccatcctgggcaacagagggagacccaaaccatcctgggcaacagatgggagaccctgtctctaccaatgaaaaaaaaaaaaaaaaaaaaagagtgttaaaaaaaacaattaggtctgggccctggggggtgtggcaccctctccaggtagggcctggaggttgagaaagggtttctcttttaacctctggggaagatctggagagccgtgcaaggtggagcccattggactcggtgcccacgtgccacctccagagttctggggtggcacaaaggtgggtgcacccttattcttaaaaaaaaaaaaataaaagagagagtctctctctcctcctctctccaaccttggctgtgtttgagcacattatgggtcactactcacaggctcctcgcaacacctcctctcagggggatctcgggggggactccctatagggggggtgtcctattttgtacatcgagcgtggggagagaagggggagcactttttagggggagacgtggtgtgtggcggtgtgaactgcggatttttggcccccatttttccctgcggggtcccggggtcctcgtggccgcgcgtttctccaactctttcctttttggccccgcgtgtggtgaaacctccaggggggtggcatttgccccgagtttccacttcctgggggctggggggtttccct

SEQ ID NO: 528971 - DNA, 151 bp, Homo sapiens
tcctagacgcacaggtacagatataaacgtctgtcctatggcctccctaatccctggtcttcccagctgtctgggacttcagtgtgacccccatccccatgcccccacgtcaccaaggcctcgctcgtccctctcgtctgacatgtctgtg

SEQ ID NO: 528972 - DNA, 217 bp, Homo sapiens
ctagctgtaccagaggatcccttcacccattagtccaaggggattttatggtctgggggcagaaacactccaagttgattagaaagaccaggccaatgtcagtgtacctggtggccaaacccacctgctaagtgtgaatgaaatgtactttcaatttatggtttcctggtgcgaggtggcaaaagcaacattacatagtctttgggcagaaatggct

SEQ ID NO: 528973 - DNA, 310 bp, Homo sapiens
actgggcagtattagcccagtggtatattaaaaaaaaataaactgtagcaatcaagacgaagatttagcagcagtaactggtttaaagtagatagaaccaccttataattaatggatataattcatagagtcatagtgcatggctccaagtagaacggatgacaaaaagtatgactaataggaaaggaaatagttgaggaaaaatgtcccagagaagaaaagtcttcctaagacagaaagaaaaacaccttacctataccagggaaaagacttcaaaaagactttttggaattaaactcaggtatgcatc

SEQ ID NO: 528974 - DNA, 956 bp, Homo sapiens
gggaaactctgggcggcataaaactgagaggtatggtttatcgtagtagcctctgcattgagaacagctgcatcgcggcccacgaccagagggggaggtacgggaccctgttcacgatggatcgggtgctgacccgcccaatggggactgtcatggatgtcctgaagggagacaatcgcttgagcatggctggtagctgcatccagtctgcaaggatctgactggagaccctcaaccgtggaaggagtctacgaacagtcttatgctcccacgaaatgaaggccgttccgagccctgcacagcatagagaacgggagcgagactcttgggagatgccgaaggaacttgcctaatcgagtccgtgaaagtaccacagttggtgatgaaatcctggttagcgggaggcactcggggccctggtgcggctaaagtctctcgcaaggtgacgaagctggaagtcacgcttggaaaaacaatgtggtgagtgtcaacaaggagcctgttgccgagcctgacatcatgggcacataatggcgtggtccattgtcatcagccatgtgtacgtgacagtctccagtacaagcagaacgtcaggacaagaggggatgaacttggcagaactctgcgacttgcgatcttcagacaaggcatcagcggtgaccagggcttcccaggaggtctgctcgaactacgcccctggtctatcaaaacgttatgaggagacggatgactgcattagactgggaaggcacctacgggacggggaaatgcaactaacgggttaaggatcagtccgacacaatgtgctcgtcacgagttaccaccagaggactggtgtgtgacagtggtcccagaaaaataccataggatatcaagacctgaagagtgtaccaatgggccgagcgaccaagagtgaagaatggacgcggtgttcccatgagggggaacgacgtaac

SEQ ID NO: 528975 - DNA, 805 bp, Homo sapiens
ctgcgctatgctctccgtgtttcccgctggggtcgtttccccagggcctcaccagtccccgtttgtatgctctcgccccagctgttcgccctccaacccccatgtgtcgccgtgccccacggttcaccggcgtggaccgttcctgtggccactgccccttggcggcaatgcgccgtggatctctgttccaaacccttgctgggtttctttttgcgtactgcatcctttcggcgtcaccttcgtgtgaccttgggacgtcccaggtcgtgatcgcccagtgaaccctttggcccttcgggccccttttggtgaggtctctggtatgatatgtctctgggcactagcctgcagcttccacttgtcctacaagatgctgcgtggtaaatccaccagatcaggctacacttaccgtcggttggtccactgaaggaggccatccaaggatcaaggaggaacactctgcatatagcccagacccggtctgtaccctgccctcacaccggcccatacatgctaggctgtgccgcgaatcagcccagttcagccccagctcacaccccctcacaacacaccccaagctggtgagtgaggtggatcgagctgtgacaagtcctatcacagcgctgcaggagaagcgttctacaagcagatcagtccctgtgcaacctcgaggacatccacatgagcctggagcaagaacatcactgccatgaccaacagtgctcttcatcgaccgccagaagtgcattgggcccaatgcgtacatgctaccccaccatcctgcaataggccggctacccgtgaa

SEQ ID NO: 528976 - DNA, 168 bp, Homo sapiens
aaaaaagaaagcataccctaatgcagtgatatcacatatctttcatgtgtgtcatagttattatgtatgtcttctctggagaaattgctatacaagttcttatgctcattcttaaattgggtttgtttgttagtatgagttatcgttctttatatatccagtgataat

SEQ ID NO: 528977 - DNA, 290 bp, Homo sapiens
gctccataaaacaagaaagaggaggatgtgagatctagttgtattagttcgttttcatgctgctcataaagacacacctgaaactgggaacagaaagagggttaattggacttacagttctgcatggctggggaggcctcagaatcatggcatgaggtgaaaggcacttcttacatggcagcggcaagagaaaaatgaggaagaagcaaaagtggaaacacctgataaacccatcagatcttgtgagacttattcactatcaccagaataccagaatagcatgggaaaga

SEQ ID NO: 528978 - DNA, 302 bp, Homo sapiens
ccatcttattgaacagcaaatttgaagttatcaggaaactttgaagaggccaggtgtagtggctcatgcctgtaatcctagcactttcggaggccgaggtgggtggatcacctgaggtcaggagttcaagaccagcctagccaacatggtgagaccctgtctctactaaaaatacagaaactagccaggcatgcggctgcatgcctgtaatcccagctactcggaaagctgaggcaggagaatcacttgaacccaggaggcagaggtagcggtgagctgagatcacgccatcgcattccagc

SEQ ID NO: 528979 - DNA, 458 bp, Homo sapiens
  misc_feature (23)..(23): n is a, c, g, or t
  misc_feature (385)..(385): n is a, c, g, or t
  misc_feature (413)..(413): n is a, c, g, or t
  misc_feature (428)..(428): n is a, c, g, or t
  misc_feature (442)..(442): n is a, c, g, or t
  misc_feature (458)..(458): n is a, c, g, or t
ggaggcaagcagtcgtaaacacnttgacacattgcaggtgttgaaaagtaattgaagtttgaagaggacataaaatcagtctttcactaactaacctctattccttgggattgtagaaatttaattttttaatgtgtaaattactcctacccctgtacagctgtttcctacccactcttgtaaactctgctgcttcccaacactagagtgcaatgttgatgtcctagaagggaaacgacagtttacaactgcggccctgtttgttacacggtgtgtccttccgtgtcttcactgtgctgagtaactgtgttgagggactctgctccttgattttgcctttctgtgagtgtgtaatcctgggttacattacatagctgccaatgcntttcaatttcccctttccactaaaatgncctttttttttaaanggaatattggacanttagattaaatggccn

SEQ ID NO: 528980 - DNA, 1075 bp, Homo sapiens
  misc_feature (12)..(12): n is a, c, g, or t
  misc_feature (94)..(94): n is a, c, g, or t
  misc_feature (130)..(130): n is a, c, g, or t
  misc_feature (145)..(145): n is a, c, g, or t
  misc_feature (154)..(154): n is a, c, g, or t
  misc_feature (169)..(169): n is a, c, g, or t
  misc_feature (198)..(198): n is a, c, g, or t
  misc_feature (254)..(254): n is a, c, g, or t
  misc_feature (276)..(276): n is a, c, g, or t
  misc_feature (287)..(287): n is a, c, g, or t
  misc_feature (316)..(316): n is a, c, g, or t
  misc_feature (318)..(318): n is a, c, g, or t
  misc_feature (325)..(325): n is a, c, g, or t
  misc_feature (343)..(343): n is a, c, g, or t
  misc_feature (346)..(346): n is a, c, g, or t
  misc_feature (356)..(356): n is a, c, g, or t
  misc_feature (362)..(362): n is a, c, g, or t
  misc_feature (366)..(366): n is a, c, g, or t
  misc_feature (390)..(390): n is a, c, g, or t
  misc_feature (405)..(405): n is a, c, g, or t
  misc_feature (407)..(407): n is a, c, g, or t
  misc_feature (438)..(438): n is a, c, g, or t
  misc_feature (443)..(443): n is a, c, g, or t
  misc_feature (450)..(450): n is a, c, g, or t
  misc_feature (460)..(460): n is a, c, g, or t
  misc_feature (466)..(466): n is a, c, g, or t
  misc_feature (505)..(505): n is a, c, g, or t
  misc_feature (512)..(512): n is a, c, g, or t
  misc_feature (527)..(527): n is a, c, g, or t
  misc_feature (545)..(545): n is a, c, g, or t
  misc_feature (566)..(566): n is a, c, g, or t
  misc_feature (570)..(570): n is a, c, g, or t
  misc_feature (588)..(588): n is a, c, g, or t
  misc_feature (619)..(619): n is a, c, g, or t
  misc_feature (681)..(682): n is a, c, g, or t
  misc_feature (686)..(686): n is a, c, g, or t
  misc_feature (688)..(688): n is a, c, g, or t
  misc_feature (693)..(693): n is a, c, g, or t
  misc_feature (710)..(711): n is a, c, g, or t
  misc_feature (734)..(734): n is a, c, g, or t
  misc_feature (742)..(742): n is a, c, g, or t
  misc_feature (746)..(746): n is a, c, g, or t
  misc_feature (748)..(748): n is a, c, g, or t
  misc_feature (758)..(758): n is a, c, g, or t
  misc_feature (763)..(763): n is a, c, g, or t
  misc_feature (786)..(786): n is a, c, g, or t
  misc_feature (858)..(858): n is a, c, g, or t
  misc_feature (867)..(867): n is a, c, g, or t
  misc_feature (870)..(870): n is a, c, g, or t
  misc_feature (880)..(880): n is a, c, g, or t
  misc_feature (889)..(889): n is a, c, g, or t
  misc_feature (891)..(891): n is a, c, g, or t
  misc_feature (915)..(915): n is a, c, g, or t
  misc_feature (924)..(924): n is a, c, g, or t
  misc_feature (939)..(939): n is a, c, g, or t
  misc_feature (951)..(951): n is a, c, g, or t
  misc_feature (955)..(955): n is a, c, g, or t
  misc_feature (959)..(959): n is a, c, g, or t
  misc_feature (961)..(961): n is a, c, g, or t
  misc_feature (963)..(963): n is a, c, g, or t
  misc_feature (967)..(969): n is a, c, g, or t
  misc_feature (976)..(976): n is a, c, g, or t
  misc_feature (980)..(980): n is a, c, g, or t
  misc_feature (984)..(985): n is a, c, g, or t
  misc_feature (998)..(998): n is a, c, g, or t
  misc_feature (1007)..(1007): n is a, c, g, or t
  misc_feature (1014)..(1014): n is a, c, g, or t
  misc_feature (1058)..(1058): n is a, c, g, or t
ctggacaagtanggcgtgcgtgctggatacatcgacctgtgtgactccggacactcgtcgtgaagacatcagcgccatctccccgcctgtaggnttcctccgcacagaacccgtttcggggcctcagcancgtctggtgagatgntgttgccgntgctgctgctgctanccatgtgctggagccgtcgcgaggtcaanagcgccccggggcgtctcccctccaccgagatgcgatcatctgtgctacgatgganatcacagacgacctctctccanctgaccgtggnacgagtttcgggccgacccaatcctcacntntgaatcnagagatccaagcggatgnacntaattgccgnacgtgncaanagaagtggtcgtcgtgcacggagnccagaggcacggacngnccctgctccgtaaatggccagactctccganatgtnacccaancacctggacntaatanagccccctggtaataatcccccatccatatccggagctnaacagantggatgatttgctgnactgtgtgacgaatgganacaagacggagttacaaacangcgngcgatcagtctcgtgaanaatcaccctgtcaaaggagcaagtggcccgntaatggacgagtagcagttcccttgccagccagcaatggtccggagagatcaccccgacgtnngggntntccgntcctgcaagagagaatnncttagttcgagagagctgtgaanaaagagcncggngnagcgaagaangacancaaaaaagcctcaatctgagccntaccagagcctggagaatgagagatcttctgggatagaaccaaggctggatgactgcatgcgggacagctgnaagtgaggnaangctgaatganagccagcananatgatggccaaaatgagccagcanccagaaagnctgtggggaaggagnagactggtctgnctgncaangncncaannnagggagncagngagnntgggcgggctgantgcctttcnagggagnctgtgaatgaatgaacatggcactgggaacggttcttcgggtgntctgtagtctgcgagac

SEQ ID NO: 528981 - DNA, 997 bp, Homo sapiens
aaatgcaggctgtactggcctgggattttgggcttccggttggggggttccaggctcccacagaaggtgacgttgggtgaccacatgagtatcctgaactgagtgaagatgttaatgatgcttaggaagtttagtgtacgtgcacggagaaagtgtccaggtagagggaacatggatatgcagaagccaggaagtgaggtgagatcatagctgtatgctttggaaacagaaagaagtaataggcctgagtggatgggagagatggggaacgctggagaagaggacttgaggcttgtgtggcgcatgcagtgatggtcaccactttgtactacacccagatacagatgtccactgaggggcccattgccactcccctccccaggtccctgaatgacttcatcgtccgcgagagctgtttgacacatgtccaagttgtacatcatcaccaatgccagagctgcaggacacaaagcgttatcactgtctatgtgcaacatgactgctgagtcggatagtcctgtgtgcatcgaaacactaagaagtacagcacgaatggctctcctcttcaacctgtggcttcgtaggtgtgatgcaccaggacaatgaacctgcgcacctacgagcccacttgtttaacaatgctggctggactaatctgatactacacataagaagggtctgcaaattgagaataggagctttgtagatcatacacagacaagtgcatgaagttatggagcgaaaaggtgtgttccccattagtactagccaataaggttcacccacataaaccgtagtgtgaccaccttgtcaaaagcgacaagcttcaaatcgacattcaagggggcgaaagccaaatccagagccaacgggggggttcctgagggaatagtagcagccaaaccgaatagcattctctcaatagcatatctggaatgacgccttacgactgacggatagtgttcagatcggttccattgtgacagagaagatgcaa

SEQ ID NO: 528982 - DNA, 280 bp, Homo sapiens
  misc_feature (21)..(21): n is a, c, g, or t
acagagacagagggtgatgtntgaggtggactctgaagaagatgtaggattatcccacaaggacagagcggaagcagagtcctcaggcagggggaatcatccaagtggctaccaaggcggcacaagccatttattaaagaaatgctattgtgaatgccaggaaaggaggtttggggagatggtgttttcaattgatttccttagaatcttttgaaatgacccaataagtaatcacctcttaacccctgtctccatctcagattttatccagaattccaga

SEQ ID NO: 528983 - DNA, 167 bp, Homo sapiens
aagagaatcgagagagagccgacaagtgaggtccaggagagggcaggagaagaggagattcccatagggggattacactttcttttcttttttctttctaagacaggtctcactctgtcgtccaggctggagtgcagtggcacaatcttggctcactgtagtgtagg

SEQ ID NO: 528984 - DNA, 400 bp, Homo sapiens
  misc_feature (254)..(254): n is a, c, g, or t
cctgaaaagaggattctctaattctgtacatgagctgaattccgtgctcagcccagagctgcacatacaagagacagagcccaggcaacacagccacactctgaactgacactcggaccaccaccaccaaacaaaaggcaacgcaggacctcagactaaggctaagaggctgattgcctgacaaaacagaaaaaaaagaaacattcttcagggattttagcagaacacagagtctcccaacaaaaacagacagnctcatgcacagcagttcagaactgtaaaaataccttccaacctgaaaatacatgtgctgtcataatcataagggaaaatgtattttttcctgtattgaaaattgcaaaacataaatctgactgttaaaagaaaggaacaaaaagta

SEQ ID NO: 528985 - DNA, 159 bp, Homo sapiens
catgagtgtccagtcgtgtgcatgaatttcaccccaacttgtgactgctcacttatgacggctcccccagtaccctccatctcaaatagggttggggggcctctggaaaagaagagagacaaaaagacagtgtcttaatcagattgcagattaggctca

SEQ ID NO: 528986 - DNA, 765 bp, Homo sapiens
tgggttataaaaccttagggactaaaataaatataaaattgggcataaggtgggatggaatctacttttgggcaaaatttaaacttccccacttattgtcaaaattaatccattcatgtgcagctctcgtggtttttgtggctgggggttcgaattgtgggttgtgggttttggagtctcgtggcctcgtgtcacccgaaggctgttgcagttgcagcgtggcgttgactcgtgcaaccttcgtgcccccgcgggttccaagcgattctcgcgtgcctcaggccctcccgagtatagcctgagattccgggttgcgcgccaccacacttgggccatacattttgggtatttaatacagataagaagacgggggtttcacacgcaatgtggtggtgctaataggcgccgggatcatcctcccttgaccctccagggttgactcagccccaccttcgggccttcacacaaggtgcgggagattacacaggcgcgtagacgcacaaccttttgccccaaagccccaccattttccatcccaatgttgctcgacatctgagacactcttgtggcgcaacaaacccaacgcctttggtgcttgtcccgccaacaccacacttttattatcaccactggaacacctggtttgggacaactcacacgcgttttatatcctatatcacatgagatgcccagcactttaggagttaccctcccaggggcttagacaaacacgggttggtccccagttaacaaaatcttaacagg

SEQ ID NO: 528987 - DNA, 218 bp, Homo sapiens
ccaatggtgaccaatgactggacacgcagctaatagcggctcccacggcctgaccctgggccggggtgaaagctgaggcacttgtcagtagcacatgggcacctgctggcttctatgccactgcaggcgggctgaggtcttaaaagcgagaaaaacactagcttagaaaacccctttttcctaaaaaagtgccctggaggagtgagcagctgactgaa

SEQ ID NO: 528988 - DNA, 450 bp, Homo sapiens
tatccggcagtaagcgctgtttggggccagtgccaggtccgcatccgctacttgggggaaaggagaggggagccccactcccttttgcccctgagccgcctgtgtgtgcgccccaacctgggggatacccgggtcggccaggtgtttgccctgcccttgccccctgccataaagggctacctgttttaccagtgagccctgtgataccccagattgtgttgaggttttgcccccacccctccccttggggaggtggggaggcactgttggcctaaaccagctgttgaaagctggtgggggtaagcccccccccccccccaagctttggggaaatcaacacccccaaacccccttggagggaggaaaaaagggagccggcgttcaaggctatgccagtttgctaccccaaacattttttcaagtaaaaaaagtaaaaaatgttgttataga

SEQ ID NO: 528989 - DNA, 377 bp, Homo sapiens
agcaggtcccagtgtctattgttcgtttctttatgttcacgtgtactcaatgtctggctctcacttattagttagaatatgcgatattaaggccaggtgcggtggctcatgcctgtaatcccggcactttgggaggccgaggcaggcagataacctgaggtcgggagttcgaggccagcctggccaacatggtgaaaccctgtctctacaaaatataaaaattagctgggcgtggtggcaggtgcctgtgatcccagctgctccagaggctgaggcaggagaattgcttgaacccaggaggtggaggttgcggtgagccgagatcgtgccactgcactccagcctgggcatcagagcgagactctgtctcaaaaaaa

SEQ ID NO: 528990 - DNA, 130 bp, Homo sapiens
cttagaggatcctgttgctagctggagtgtagtgcggggtatacggcttactgcagctcaactcccaggcccaagcagctctcccgcctcagcctcctgagtagctgagaccacaggcctgctgcactgg

SEQ ID NO: 528991 - DNA, 554 bp, Homo sapiens
  misc_feature (406)..(406): n is a, c, g, or t
  misc_feature (427)..(427): n is a, c, g, or t
  misc_feature (440)..(440): n is a, c, g, or t
  misc_feature (491)..(491): n is a, c, g, or t
  misc_feature (514)..(514): n is a, c, g, or t
agaatgtttcattaaagtgtttaattgaagtaaatgaaaccataacacagatttcatgggagaagatacatggcaaaagttcacagactgttgcagttcaccatccccaatatggattctctgttcaaggagaatatcagggaagagtcttgtttaaaaattactcacttaatgatgcaacaattactctgcataacataggattctctgattctggaaaatacatctgcaaagctgttacattcccgcttggaaatgcccagtcctctacaactgtaactgtgttagttgaacccactgtgagcctgataaaagggccagattctttaattgatggaggaaatgaaacagtagcagccatttgcatcgcagccactgggaaaacccgtttgcacatattggactngggaagggtgatcttgggtgnaaatgggaatccncttgccacttcttttttcccaaatggaaacgggcaacgatttttcaggccngtaacaggcttttttcccaaccngatttgctagtgggtagggcgattacttgtggttgtaaaa

SEQ ID NO: 528992 - DNA, 324 bp, Homo sapiens
cgtggcctggcttacttggtgacgtgcatagctctctctggggggctgcagctcatcttgggcgggagctggactcagatgcccccgtaggtgcaatagcaccatccaaatctcactcctcccggtgctttttgcggtattcctgctgcgctttctccgccacggttctccataaatttagggttcttcctgcagacttctatcaggcaccgtcacagtgatgggatcagagtcgaatagcttcacgaccacctcagtgacaccggaaggaacgtccgactcagaagtgtgggaagccaccgtggtgacccacatccgtactgg

SEQ ID NO: 528993 - DNA, 872 bp, Homo sapiens
  misc_feature (70)..(70): n is a, c, g, or t
gctaggtctgccatgtatgttggttcctctctatcatattatgaggaaaggcacccattactccgtgtantatagcctgtccatgactacatttaaccgtaaatgatgctgtccgtcagtctctgcagtgtcctcttattaacacgtaacacattactacttatctgaatatttaacatgactagcttataaccctcgtttacgcactgtcgttcagtgcaaaattagcacacacctgcttctcgatccatgattcgctgtttcccgtcccatcttttccttaagttccatccaatacgtaactccctccatacctcttaccaactatttcgttacatagttataaacctcagcatcggagggtttcacccctctaaaccgctcccctgttgattcatagctagtttccaatatgggaacaaccaaatagggttactagagacattaacgaagataacaacacggaacataaccgggacggcacatacacatcctttacaaacgtcccataacaattactttatcccccacaaatgaattttcccaataagaaaacccagggacgaaaacagtgggcgaacggtcgctttgaacggttgtgaacaaactccggagataagtacttccccggagttggagatgccccccccgagttccggggcattacatacgcttaacatttcacgagaggacggttccttggccagcttccatgaaagctggtccccccaaaaatttcaggggccttcaacacgagacccagaattgcaattcccccgagaacggtactcaaaagccaataaccaactttcaacgcgcgtaacaacggactcgcggggggtattactaacgtgtcccaatgtctcctggaa

SEQ ID NO: 528994 - DNA, 1085 bp, Homo sapiens
gacggtcagccaggtacccccatggccccattgcccctacccccaaagggtgctaccctagcaggttccctacccccaatggggctacccacatgggtcccctgaccacaacgagcggctgtacccacagggatccgctaacccgcgaatgcgggaccatagaccatcagcgtgcccatgagtcacccagagacaacttgaacgatcacagatcattgtctccccctcgagcgcacagtactccgattgtggaatcgtgaggctccatcacttgtcctcgctgtccacccttccaggcacgactgttgtgatcatgacacagcaggaggtatgacgacgtccggccccctcgcagtcggtaccaaccaggaaaatgcattcgtaggcggagctagtgaccgtgtagttcgctgttagcagccactcttcgtctgaaccagaaagcctagacttggctgcagaagaaagctcatggactgagcatctgggcagtgggcctttcaactggctgataaatgggactatgattactcagatgcacaggagctgtttcgttggtgacaccaaaaccttacgcgcgccttcgccatacctcccccggcaaccttccacacacaactcgtgcactccccccgagctcgactacgcgtccaacgcccccgactacaccggacggtgaatgagtcacaccggaagccaatatacacgcccaccagcgacgaattccacaaaaacgatttgtcttggacccgacttaacaccgtggttccgaattttgaccccgaccgtagatccccgtcctccatgccccactgccgacggacgactacctagcatctgatcccaacaccaaattcctcaaccaacaccatcccgagcactacaatcatcccccttcatctccccccccccttgcaaacagacccacacccaccaaacaccctctcatttccacatagcagacacccaatcctgacccccaccatttcctcactcttgcccaaaaaaccccacaaacactgcacattcaaaacaaacacactccactgccactcgctcgactccacaacaactgaacgaccacg

SEQ ID NO: 528995 - DNA, 248 bp, Homo sapiens
taattgcaggacttgtgagagttactttatgtatgctgttcagagagaggtggagctatcaaggcgaagcctcgagcagcttgttgagaagcacctcaggcttagcagggtggccacaccattttgacgcccctcgaccgccagcagcaggttggagacctcccctccttgcccgtttgaggaccaccttcagccctcctaaacccgccccgccttggccgcctgggtttaagtgggtctctttaagc

SEQ ID NO: 528996 - DNA, 188 bp, Homo sapiens
tatgactttatcttgaactttaactgcaacttgtcctttcacgggatcttgatacataagaatggaacacggacttagacagtgtcttgaacattataacaggaactcccgtgacagctgcctctagaaccagcgtcccaacgatgaggaacaccaccacgatcaagaagctgctggcccatcatggt

SEQ ID NO: 528997 - DNA, 254 bp, Homo sapiens
ggcacaaagggtattatatggctggcttagtcaaagaagagagactaaacaagggtaaaaattttaacagtacagaattggccatcatatcatggcctggattctaacggttggtgtcctaagatgcaaaagaagtcagtggcttttaactgtttacaaatagaaggtgatggtaaaaggtacagttgggtggtgttggaattatgaaatttcttcagatataataaaccatgacttttgggcggctcaacatt

SEQ ID NO: 528998 - DNA, 327 bp, Homo sapiens
taggtgactctgaggatcccctatctgctccatcagtctaacataggaaaatgctactccctaggtcaccactggtctcctaattgtcaaatctttcttctgttctcattctttcatctgtctctgtcattcaaaacatttcatacggctaggcgcggtggctcacgcctgtaaccccagcactttgggaggccaaggcgggtggccttgattgcttgaggccagaagttcaagaccagcctgggcagcatggggagacctggtctctacaaaacaagtacggaaagtactgggtgtggtggcatgtacctgatgggagaagatgcg

SEQ ID NO: 528999 - DNA, 1384 bp, Homo sapiens
gacactcgagctaagaccggcgacattggtaggaacgtgtcgtggggtatcgggaagagcgagtaccgtcactatgcgtcacatattcactctactacaattgcctattcccttaggcaagcattttaatagtaatgtaagtatggcctggaaggtaacgtgccacctaatgtgtagatggaggacggtgcgtcgcacagtgttgaccgttgtcaggcccgaatgacttgtgtggcaccgtcatgatccctgtgcatcatctacatagccttgtaaattccatacgaagggagatgtactcgcatctacggggtcagctatagatcctccgtagactgcgtggcgtagcactggcgcgttgagaaccgacggaatttcggctaagtagtaccgcaagaccatgaacaaggaactcccctctctggtaagcattgtgtgcaccgatgggttaaccacggagccgtgaacagccatttggtagccttcattacgcccagaaaccgcaacagcgaaaacgggtagcgcctctggaacattgtttggtgtgaagaacaagcaaggtccctttgtgcgccatggagccctatatagctgtagactcttacttgttgcaactagaattcccctggggaattccccaatttgggccaataggctggttgagctagcttaaactggccatttacacatgcgtgtaatgcgggcattctgtgtcaaagaagccattggagcttcactagaaatccaagtttccttcgccaattgaggattagcgcgccccagctcctagctggttgcattatgggccataatcaaaaactttccttgggcgcctacacctgtgtggcgcatggtgtcgcgcgcacacgacaacaaccacggaagcggctggcgagcatggaatttccaacccaaatatgtccacaccacaccagggcacttgaaacttgcaccccaaagggtaagtgccatgtgggcaggaagacatcttaaactaaggctatcgaggaagggtgtcctccattatatcaacctttgactggggcagttggcctatggaatcggcaattgagggtttgaaggtgctcccaagttccgcgtacagggggcagttgctcgccaacagcagacttgacatcccctaccccattgctttcacgacgaactgggaattcacgcaaccaggacgggtccccgtgacgcaaatgtaataatatgtgccaagtagcggctcccaaaactagagacaaattgtggtctgacacaagaaaatgaccaggtcctctccgaggagctcaggtcataagtggcagtagtgacccaactccaaccccacttacactatgggtgcagcaacagaggcaaacgcgtatttcacaaacgg

SEQ ID NO: 529000 - DNA, 325 bp, Homo sapiens
tctaaggatctcgagcacatctgacccagagagtagcagtatgcagatttattgcaaagagcgaaagaacaaagcttccacagtgtgaaaggggaccggagcgggttgccactgctggctcgggcagcctgcttttattctcttatctggccccacccacatgctgctgattggtagagctgagtggtctgttttgacagggcactgattggtgcgtttacaatccctgagctaggcccaaagttctccaagtccccaccagagtagctagctaatctggtggggaggtggagaactttgggcctagctcagggattgtaaacgg

SEQ ID NO: 529001 - DNA, 598 bp, Homo sapiens
gaatttatttggacaaaaacgcactggatacaaggctgtactgcaaacgagcttaatgcgtattaacacatggggaggtcttgcccctccggattggataacctattaaaccagcgttggctatggaattacttagccttatagagacggacggtaaaaaggcttcccatatagattttaagaccgccactcaagttttattggaggatgatgcttcattcccgaatgagggatacaagggctttattcatgtgcgatagtagaaatcaggacgaagcgtagatatacaaccataaatggttatataaaatcgttttttgcgctgggctagcggaaaacccacgggctaagtatttctggatcttgaactacaaaatccacttattttaccagaccaaagtggaacttcgaattgacgaagctatattgaggttgagagaaaatctaggaaaaaacggcaagcatgactttgaaggtgtgtctacagtctaaacaggtaattatccaacaaaaacccccacgtcatacttatacggtaatatcctgagtcccagcacatagaacactttcaaaagaagataggttgcgtctcaccccc

SEQ ID NO: 529002 - DNA, 534 bp, Homo sapiens
  misc_feature (6)..(6): n is a, c, g, or t
  misc_feature (64)..(64): n is a, c, g, or t
  misc_feature (70)..(70): n is a, c, g, or t
  misc_feature (79)..(80): n is a, c, g, or t
  misc_feature (82)..(83): n is a, c, g, or t
  misc_feature (87)..(87): n is a, c, g, or t
  misc_feature (89)..(89): n is a, c, g, or t
  misc_feature (101)..(101): n is a, c, g, or t
  misc_feature (146)..(146): n is a, c, g, or t
  misc_feature (179)..(180): n is a, c, g, or t
  misc_feature (182)..(186): n is a, c, g, or t
  misc_feature (190)..(190): n is a, c, g, or t
  misc_feature (212)..(214): n is a, c, g, or t
  misc_feature (262)..(262): n is a, c, g, or t
  misc_feature (338)..(338): n is a, c, g, or t
  misc_feature (356)..(356): n is a, c, g, or t
  misc_feature (431)..(431): n is a, c, g, or t
  misc_feature (451)..(451): n is a, c, g, or t
  misc_feature (466)..(466): n is a, c, g, or t
  misc_feature (470)..(470): n is a, c, g, or t
  misc_feature (478)..(478): n is a, c, g, or t
  misc_feature (481)..(481): n is a, c, g, or t
  misc_feature (488)..(488): n is a, c, g, or t
  misc_feature (510)..(510): n is a, c, g, or t
  misc_feature (516)..(516): n is a, c, g, or t
ggttgnggagtcactgggcctcatgggatacgcccagggcaagcaatgatgagactccaaaccncccccnccccgtccnncnncagnanggcagccaagcntcctgacccaaaaggccctatacagcaatggagccatcgcggaantccgtcctcccaatgaggatgttgaccacaacnngnnnnncgtntcggcactgctgctgggcatcnnncagcaccttgaccacctgatcctcgttctcccgtgagaacagcaagcnccgggcccccagacccatggctgccttgtgataatcagtgtaggccaggccacaggccacgttgctgcccagaaanggcacctgttcccgaganatctgtgtccagccagcatcattccctaccaaggccatcactgggatcttgtgtctgacgaatgtatcaaattcnatgaggctgtagccaaaaantccgtccccaaaaangaancagacctnagnatctggncggcacagcttggccccaagtncaaatnctgcaccaattcccagag

SEQ ID NO: 529003 - DNA, 200 bp, Homo sapiens
tgctgcccaagttggagtgcagtggcatgataatagctcactacagtcttgaactccgggactcaagcgatccactcacctcagcctccccagcagctaggaccacagacatgtatcaccatgcttaattttttattttattttattttttggagacatagggcctctcctttctgcccaggctgctctctcacgttccc

SEQ ID NO: 529004 - DNA, 157 bp, Homo sapiens
cggtccagaatatatatatatttgatgtactttcatatttatatacagtaataatacatgctttgggtactttgatatttttgtacagtatagaatatataccttgggtactttgatattttatgtacagtatataatataaactttgtgaactttg

SEQ ID NO: 529005 - DNA, 505 bp, Homo sapiens
ctctcaggctgttcttgaaacaccatgaggcttctgcgtgtagtccctgccccaaacttagcaagcacaggggcctccacagcccaggtggccccagaaaatgttccagagcccagcttggtacatagtgagatgctgctggggttggcctgaggtgggggccacttcctccaccccagtgggtatgtctgaggtcagccatggggatatctgggttgagattcaggttttggtgaatatggggcaggcgtccagatgtgtttgtgtcacctgctgcaacgctgtagccaatgaagattccagcgggatggcctgaccagcggggccggcactttggagccgtgggtgcagccaggtaccccgtgcagggcctgggaggctctccaggccacagtcctcagagcgtgttgggtcccatgttgtgtgtgggttccatgccctccacacagcaggagagggcttccctgaccacacctgccccctcagtcctgcttctccccagtaa

SEQ ID NO: 529006 - DNA, 651 bp, Homo sapiens
aggacgggaagcggccggggaaatgtccggcgccaaatttggctttaccaggggttttgtgtataaaaccttccccttacaggtgggggccaaaaaaacccaaatccctcgggggcccccccggcccctccggagaactaacccctgtgggaggaaatgcccaacccctccccccgggaaaaggggtttttagcggggaaaaaggggtccccctaaaaccaagggcccccaaaaagggggtgggaaaaatcccgccccgtttcttttggggtgcaagcgccccccaggggaagggtccaccagggccccccccccccttggggcaaaaaaccctaggaaacccctttttaagttttccccccccccccccgggggaggggtttggggcccctcttttgggtccccccctttttttaaaaaaaaagggcggggcggaactttttttgcccttgggtaaccccagaaaaaaccccccgggggaatttgggccttaaaaaaaacaagggtttttttttgaaagaaaaagggcccctaaaaaaagccccgggggcatcttttttaaaaagaagttttcaaaggtttacaaaaaaccccttttaaaaaaagggtttttaaaaaagagggttttttaaaaacttttggtgggtgggg

SEQ ID NO: 529007 - DNA, 992 bp, Homo sapiens
taggggaaattccgctcacgggctccttccaacgggttctgagatgcgaattggctgaccggagacttttgtgtggcgaagtcagagccggagaggttacaggcccaggatccgggtcgatgaaggtctcgtcctcacagcttctgtgtaattctggaccgacttgtgagtctcatcgattccctcccgcttgcaacctacctccagcgccgagacttaactgtgatggccgtaccaactctctcgatgacttcccctcaccgcttccccttccggctcttccccttctgtgcaactgggaccgaggcctcaggcacggctccaggtttatcctgaaagttctcgatgtgacctggctctcaaagagccaagccactctaatcgtcatggtctgctactctccccgatgcctcgatggggctgtgtcatgccttgtcctcacggagctgatgcagcccagagctagaaggctgagctggcagagggtagcccttcgctgggacctgcctcagggtgcataggacggctctcaactctcaggccgttttcctagatggacagtcccagggcccccaggacctcccagccatgggctctccacctcggcctctcctctggggctgggccctgccagtctcttccttcgagcttccccggcacacgtgctctggcctccaggtccgattcctcaggctggccttcaggccatgcggcaatgccaacccccacaagtgggtgcgacacctaagccacagcgacgcctatgtcattctggatctgaggctccccaaacgaggacacgacggtccaaggtggcagtttgtcccacgggaggacagtcgtttcttttccagccatcctggccttcggactctgaatctgggcaggaagagtcctcagtcccaacgaccaggagggggcaatgggcccagcctttctgtggtatctgatgcaggaaggactgcagtggatataacccacggaccaacttt

SEQ ID NO: 529008 - DNA, 383 bp, Homo sapiens
ttgagtaccatacacagagactaaaggacgaacctgagtcatcgttgtagtactagtatccttgggtcagttgagcattgccacaccgtaagccgtcctggactcctgcctcactcatttacaccaaccacccaactatctatgaacctagccatggccatccccttatgagcgggcgcagagataataggctaacgaacataagattaaaaatgccctggaccacttcttaacacgaggcacacctacacccctaatacccatactagaaataatcgaaaacatcagactactcatacaaccaatagccctggacagtacgcctaaacgctaacattactgcaggccacctaatcatgcacctaatagtaagcgcgtgctgt

SEQ ID NO: 529009 - DNA, 355 bp, Homo sapiens
agagtatgtagtaatatgctaaagctttgtaaactctttctttgttgttttggaagatggagtgcagtgatgtgattttggctcactagagtctccaccttctgggctcaagcagtcctctcacctcagcctccctggtttgtggaactacaggggcatgccagcatgcccggataatttttgtattttttttcttttgtagatacagagtctcactatgttgcccaggctagtctcaaactcctgagctcaagcagtcctcctgcctcagcttcctgaagtgttgggattacaggcatgagccattgcacctggccctaaattttaacagatacaaaactataagtttatactt

SEQ ID NO: 529010 - DNA, 407 bp, Homo sapiens
  misc_feature (43)..(43): n is a, c, g, or t
  misc_feature (48)..(48): n is a, c, g, or t
  misc_feature (98)..(98): n is a, c, g, or t
  misc_feature (117)..(117): n is a, c, g, or t
  misc_feature (132)..(132): n is a, c, g, or t
  misc_feature (148)..(148): n is a, c, g, or t
  misc_feature (182)..(182): n is a, c, g, or t
  misc_feature (339)..(339): n is a, c, g, or t
  misc_feature (359)..(359): n is a, c, g, or t
  misc_feature (364)..(364): n is a, c, g, or t
  misc_feature (394)..(394): n is a, c, g, or t
  misc_feature (405)..(405): n is a, c, g, or t
gggacgaaaacttaccctgggtgcatcccaagccccgggggtnaccgngcaacaaaagtgtatccgaaaggcttccggccggccgggcttcggggctncgggcgtctcaaccaaaanggcttcaacaccggngccggaaactcgttcntcgccgggccgcctccttcctccttccctttgcngaacggccctcttccccttctcccttcaggctgggctcttgctgagctcagacgggctccgggcggtgcgttttctcctgcgtcacctcctcctgctcctcctcctgcagcgacggcttcaccttcccctagtcgccgcttctgtccccgctccagnctggtggctttgaagtagcntctcnctcctcccggcgccgacccaagcaccgggnctaaggcgtgncc

SEQ ID NO: 529011 - DNA, 789 bp, Homo sapiens
agcggaggggagaggcgagaccccgcgcgtgtgggagcgggcgtgaagaggggagcaggccgtgtcctgactggacgtgtgcttgcatgcgtggctcgcaccgacagaggtgcctgccggaggaagccgctccgaggcggaagatgacggacgatcgaggactacgtgccctatgtgcaggttacggtcagcgccggcagctactgctccagaacgctgctgcagcgaagacgcaagggagctgcggaggaagagcagcaggacagctggtagtgaaccccggggcagatgaggacgacatcccgactaggcccgtcagctccaacggtcgagcctccgtggactcagcaccagcaccgttaaagagaaggctgaagcgcgcaaagagtctgccagggagaagcagctgaaggaagacgagaagatcctggagagtgttgccgacgggccgtaggcattgcatgtcagtgaaggagatggctgaacgggcattacgtatgatgaccccatcaaaaccagctggactccatcccgatatgttctgagcatgtctgaatgagcgacagtgagcgcgatgcggacagaaataccacgatcctggatggagggagacggtaatccatgacccatcaagagcttcaaggaacatgaccgtttcctggcagtcatcctgagaggcctgaagaagaaagggcattcaccgaccaaaagccattcagatccagggcatccgcacattctatctggccgtgacatgataggcatcgctttcacgggttcaggcagacc

SEQ ID NO: 529012 - DNA, 127 bp, Homo sapiens
ggcgaaggtctccttgacctggacctctccgttctggtcgatcacgaccgtgcggtcgtatacccacatgaaggagggctcaaagcccgagctcgggttgccgtagaagatcgacgtggtagccggt

SEQ ID NO: 529013 - DNA, 573 bp, Homo sapiens
tattctgtcacccaggctttagtgcattggtgcgatctcggctcactggaacctctgcctcccaagttcaaacaattctcctgcctcaacctcctgagtagctgggactacaggcgggcgccaccatgccctgctaatttttagtagagacggggtttcaccatgttggtcaggatggtcttgatctcttgacctcatgatccacccgcctcagcctcccaaagtgctgggattacaggcgtgaaccactgtgtcccgcctaattatgacctcattattatctttatttgaagattatgtataatctcaggagatgtgtatgggttcagttgacaaggggtggacttgtgatggtaaatattgagtgtcaacttgattggattaaaggatgcaaagtatttatcctgggtgtgtctgtgaggctggtgccaaaagattgacctttgagtcaatgggctggaagaggtagattcacccttcaatctggtgggcacaatctactcaagtttcagggaatataaagcacgcaggaaaaagatgtgaaaaagagagataggcctagccctcctgcct

SEQ ID NO: 529014 - DNA, 1645 bp, Homo sapiens
ggccgcctgccatcgaatgcccgaacccagacgactatgtccaagcacaggctccgattggatatctaggcacatatcatataggcggactgtgcagaccttcgctgcattcctcgtctgatgcggcctgatatgcgaacaacggctactgactgtacattgaccatactcatggcccaagcattggcgcaggtaagggaacgacttctcaggaaggccatggaatgaacgtgcacctgaaggcgttggggccaaaaaggatgtatcagttgaggatgtcagcagggagtgtgtggaagggagttacatactcgtgccaccgtgcctatccaggtacgcagacagcagctgctactgtacggacacggcctacactccctcgtggtcacccttcatctctagcactagggccctgaaatcggcgccgacaaaacaaagtgggtaaaatcgtcccaaactggctatgggggcgccaagtatgtatcccacgggggccacaaggagaaactggggaaccgactcagggtcctggttatgaggctcaagctgctactcactgggccccccagaataaaggtcattgctccctgggaggatgcctgaattctaaaaccggttcaagggccgcaatgacctgatggagtacgcaaaggcaacatgggattccatcccggtcactcccaagaacccgggagcatgatgagacctctgccatcagtacaggttgaatctgagaacccagaccagcgctccaggtcttacacaaaaccaggaccagcaaagcccaaaccctgaatttgagatcgtcaaaaaggccgtaagtgacacgtatgtggcacccaaatctggacttgtcaaaattggaacatgggcgatatggaacatgaatccggttacacgcccaacatagcaaggagaacgtcttttgctttctgtagcatcttctgctatgaacgagagaaacaaaacgagaataaaaaagcaaaaaaaaagcagaaaaaaacacagaagaagcaacaataaaaaaaaaagaaaaacaaaaacaaacaaaaaagcaaaaaataaaaaagagaaagaacgcagacaaagaagagagaagagagaggaggaaggaaagagcgaagaaaaagcagagcgaaagaagacagggagagggagaagaaaagagacaggaaagagacaaggaagaggaagaacaggagaggaaaaagaagaggaaacagagaacgagaggaaagaagaagcacaaagagaagaccacagacgacaggggaagaagaagaaaacagacaaaagaggaacagaaacaacaaggaggaggaggaacgaggaagggagagaaggaggacagcaagagaaagagcaagaaagaaagacgagaacagagaaagcagaaagacaacgggagaagaagagtgaccgagaggaggagagagaagaagagagcgagaggatgagaatcaaagagacgagaaaagaacaagaaaacgagagagagaaacagaaagcggagagggagaaagcagagagaagaagcagaggaacacagaaacagacaacgcgaacagagaggaagagcagagagacgcgaagccgaggcgacaaagaagacaggaccaaaaaacaacggagaaagaggagaagg

SEQ ID NO: 529015 - DNA, 160 bp, Homo sapiens
tgagccagactagagctagtgagacacttaccagagttagctcagtagttatacacattgactcatccaggaaaagtaggccttttaaatatatataggtgggcagtgtatccatatccatacttggagttagcggcagtcactgagtcagatcagacac

SEQ ID NO: 529016 - DNA, 199 bp, Homo sapiens
ggttatgccatgtgtccccaaggtgggtgtagggtacagtggcaacatgctggaggctgaaggtgtccctatcccacctctctgaggtcacgcgaggctgggcagagacagggtgatggtgggtcagcgccccggacaggctgcccaccgctgagccctcctctcctctcttctcccacaattaatagcgcagacacag

SEQ ID NO: 529017 - DNA, 377 bp, Homo sapiens
  misc_feature (12)..(12): n is a, c, g, or t
  misc_feature (223)..(223): n is a, c, g, or t
  misc_feature (348)..(348): n is a, c, g, or t
gtctcaaaaaanaacaacaacaacaacaacaaaacttcctaggccagaggtggtggctcatatgtataatcttagcactttgggaggccaaggcaggaggattgcttgaggcgaggagttcaagaccagcctaggcaacatagggagacccccatctctacaaaaatttaaaaattagcctagcatggtggcacgctctgtaatcccaaatacgcggtaggcngaggctgaggagggtggattgcttgagcccaggggtttgaggctgcagtgagccacagttacgccactgcattctatcctgggcaacaaatggagaccttgtctcaaaaaaaaaaaattcctganatcgctatgtattcccaactttatcattt

SEQ ID NO: 529018 - DNA, 801 bp, Homo sapiens
gggctggtctccagctcctgaccgtgagtgatctgcctgcctcggctcccgaggtgccgggattgcagacggagtctcgctcactaggtgctcaacgttgcccaggctggagtgcagtgacgtgatctcggctcgttacaacctccacctcccagccgcctgccttggcctcccaaagtgccgagattgcagcctctgcctggccgccaccccgtctgggaagtgaggagcgtctctgcctggccacccatcgtctgggatgtgaggagcccctctgaccagccgcccagtctgggaagtgaggagcgcctcttcccggtcgcatcccgtctaggaagtgaggagtgtctctgactggccgcaccatcgtctgagatgtggaggagcgcctctggcctcggcgccccggtctgggcatgtgaggagccgcctcatgccctggagcgaccccgatcatgggaactgaggagctgtctctgccggaagcggacagccgtgttactgggaggtgaggacgcgtctcacgcacgagtgcgccccaggctgagaagtgaggagcccctctgaccagctagcctgactccgcatgctggggaacgttgacggagcccctgtcgccagaacgagccctaaccgcgaggcactgcgacgttgagagcagccgcgtaccggccctggacagacaagacgaacgaagcaaggtgggaaaggcagaccccaacgcccaacaacagctgcagaaccgcgcaccaacggagcagcacacagacacgcgcgcactaacagagcaacagaaagagc

SEQ ID NO: 529019 - DNA, 973 bp, Homo sapiens
  misc_feature (2)..(2): n is a, c, g, or t
  misc_feature (92)..(92): n is a, c, g, or t
  misc_feature (166)..(166): n is a, c, g, or t
  misc_feature (219)..(219): n is a, c, g, or t
  misc_feature (222)..(222): n is a, c, g, or t
  misc_feature (232)..(232): n is a, c, g, or t
  misc_feature (242)..(242): n is a, c, g, or t
  misc_feature (246)..(246): n is a, c, g, or t
  misc_feature (248)..(248): n is a, c, g, or t
  misc_feature (255)..(255): n is a, c, g, or t
  misc_feature (323)..(323): n is a, c, g, or t
  misc_feature (380)..(380): n is a, c, g, or t
  misc_feature (504)..(504): n is a, c, g, or t
  misc_feature (507)..(507): n is a, c, g, or t
  misc_feature (775)..(775): n is a, c, g, or t
  misc_feature (800)..(800): n is a, c, g, or t
  misc_feature (969)..(969): n is a, c, g, or t
cnagagcgggcactgggtggggggttgggaaaactgcccaggagccaggtctctcttctcgcctgcgggcgttgcgaggagcggcagcgccngctggcggcgagtgcgtcgaggccctgcgagaggactgtgcggcccaggcacagcgggcgcagcggggccgaanagctgctgcagctgcaggtgttccagctgcgagcgggagaggcggcggttgcnggncgacttgggncagctgctgngggngngcgaacngctggagcggcgctgcgccaccttggtgcgcggagcagcgggagctcgggccgaggcttggggagacnaagtgggaggtgtgccagatgtcaggcgagatctccctgctgtagcagcagcgtgtnagggtctcaggcagagctggtgcggaagggcggcgagctggtggtcgtctgcgggtggcgctgcggggggcccgtgctacgctgcgggtcagtgagggcgcgtgcgcggggtctacggggggcngcncgggctcgggagctggagctggaagcctgttcccaggagctgcagcgacaccgccaggaagctgagcagctgcgggagaaagctgggcagttggatgctgaggcggccggactccgggagccccctgtgccacctgccaccgctgacccattcctcctggcggagagtgatgaggccaaagtgcagcgggcagcagccggggttgggggcagcttgcgggcccaggtggagcgattgcgggtggagctgcagcgcgagcgtcgggcgnggtgaggagcagcgggacagctttnagggggagcggctggcctggcaggcagagaaggagcaggtgatccgctaccagaagcagctgcagcacaactacatccagatgtaccggcgcaaccggcagctagagcaggagctgcagcagctcagcctggagctggaaggccgggagctcgctgacctggggctggncgag

SEQ ID NO: 529020 - DNA, 539 bp, Homo sapiens
  misc_feature (162)..(162): n is a, c, g, or t
  misc_feature (198)..(198): n is a, c, g, or t
  misc_feature (223)..(223): n is a, c, g, or t
  misc_feature (241)..(241): n is a, c, g, or t
  misc_feature (273)..(273): n is a, c, g, or t
  misc_feature (291)..(291): n is a, c, g, or t
  misc_feature (294)..(294): n is a, c, g, or t
  misc_feature (301)..(301): n is a, c, g, or t
  misc_feature (307)..(307): n is a, c, g, or t
  misc_feature (377)..(377): n is a, c, g, or t
  misc_feature (391)..(391): n is a, c, g, or t
  misc_feature (412)..(412): n is a, c, g, or t
  misc_feature (450)..(450): n is a, c, g, or t
  misc_feature (470)..(470): n is a, c, g, or t
  misc_feature (490)..(490): n is a, c, g, or t
  misc_feature (525)..(525): n is a, c, g, or t
aatctgcgtaaatcttttcaacactagataggccttttgtcaagctttatgacctaggaatatcttcctcaaggaactgaaatgtaaacagcaaggtagacagcacccatatctcccagtttctgtgggagggtagaagcctaatttggggccgggcgcggnggctcaagcctgtaatcccaccactttgggaggctnaggcgggcggatcacctgaggtcangagttggtgaccagcctnaacatgggaaaccccatctctactaaaaaatntaaaaattagccgggctntgnggcatgngcctgnaatccagctatttggcaggctgaggcatgagaatcgcttgaacccaggaggtggagggtacagggagctnagagtgcccactgnacttcagcctgggtgacagancgagactttgtccaaaacaaaatagtgaggggatagcnaatgcacttaaggtcaagantggagtttaatgctcttttnacttaattaaatggcaggacctgatagaggaccgntttacactggatgt

SEQ ID NO: 529021 - DNA, 208 bp, Homo sapiens
gcgcaccaaggtttccccacatccttcccagcacccttgaaggcccaggcaggcctggaaagcagcggacctggctgttctgtgttgaaggagtttgccagtgcccttgcagggacctgtgagagccacctcacaggcagagccccaccaggcagggcaaggagactcctctcactcccacgccagctggcacagactaccttcttca

SEQ ID NO: 529022 - DNA, 427 bp, Homo sapiens
aagtgtatctcacgtctatcttattgtcattatttgaaaacagctctgtgggtacaccaagctgtggttttgtaaaaagtatacatatttggaggacatctgaaataagatttctattatttattatctttagagtttcataagtaatttctgaaaataattttttcttgtgaatttccaatctggaaaatttctgtagtctatgaaaaagcaaagtatgctaaaactccataagagtttgttgtaattgattattataaagctactgatggtttcttagtgttttcatactataaataatgtgccatggccaggcacagtggctcatgcctgtagtcccagcactttgggaggccaaggtgggcggatcaccaggtcacgagatcaagaccatcctggctaacacggtgaaaccccctctctacta

SEQ ID NO: 529023 - DNA, 491 bp, Homo sapiens
  misc_feature (233)..(233): n is a, c, g, or t
tgggtgcagggaacacagcaggaagctggcctagaagaagggggtcagggtcagtggagatgctcctaccttcaggtaaatgccctcatttgttagggccagtttgagcgagctttctgtcatttaccaccaaaagaatcctagaaaataaatacacagggatctacccccaaacactggagacaataaagaaaaaggaagcagccagggccagtagctggaaggaaattcanccggaggagaggaggcgcggggctgtggtgggagggaggcaatgcttcctgaatcttacttccctggtctttccatcggcctgagcccgtgccagtctggggatctgccggccagccagcacaactgcgtctcccccaggggcctgactcgttgaaggaatgaatgaatgaatgattttgcagggatgggaggctgggagactgagaggtttcattaaacggaaacgctcagatctggtgtttcacaacgtaaaaaaa

SEQ ID NO: 529024 - DNA, 179 bp, Homo sapiens
tggtccgcgtgtcagaagcgatctgaaactggattgagtacgcgggcgcatgccgcccgacaaccggaatgccggtcttggacgcccctcggggcgtccttttttttggttttacggcggctctccgatgcgatacaacagcacttcaagcgtgctcagggaaatccgcagcgagatga

SEQ ID NO: 529025 - DNA, 432 bp, Homo sapiens
gggtccctctgattagaaaagaggctatatggcagatgataagtcatctgtgagaaattaggagtgtgtggaaataaatgtaaacagtggtcttgtgtcatgtaggacacttagataaaaaaaaaaaatgaaaagggatccagtccaccttcagaaaggaaaaaagggcccttccggtactaagggacaaggtaaccccttagagctagtaataaccaagcccctcgattctcgctagaacaaaagaggaacgtgtgaccttaggaatcacggggccggactgaaccctcgagtaaatatctgggttcgaggagaagtttacaaacgctctcctgagccactgtttcaaactttctatgatgaactgaatgtgccagtaccaggtggaaaagaaaagacagttcctagaggggctgagcatgtagactccac

SEQ ID NO: 529026 - DNA, 150 bp, Homo sapiens
cgtgtcgaagatcgggatgccctcgaaggcggtgccgcccttgcccggcgtcacgccggccaccatctgcgtgccgtactccttgcacgtcttcgtgtggaacggacccgtcgcgccggtgatgccctgcgtgacgaccttggtgttctt

SEQ ID NO: 529027 - DNA, 240 bp, Homo sapiens
cagtcataaggcacggggctccaagtcatccaagctctacaggatcttacactcttcatggtacataccaggcacttataaaatgtcaaatcaaattcctgtcaatatcagtgtcactagtagctttccccaaatatagctgttaactcacattaagcatacgtggattagtcatgaaattaaagacagtgccatagcactgagttgcttctcttttcctctctttcttctctttttttc

SEQ ID NO: 529028 - DNA, 786 bp, Homo sapiens
cagctggatgtctggatgaactactgaaagctgctgagtgtcctgcagcaggccatttccaatccagaggaagaccttctagaagaagtgatgggtgggagagtgctgacatactatgtgaagctactatttggagttggacacgagtgcatgtgaccttgtgccacagcgggaatgtgagctggatgacaaatggagatttggacttgtgataattggcctctgtgtcattgtgtggaagactgactggtccctttatttcctgtagcttgactaccacacaaattaatccactcaaatgttggcaagtggagcagagtcccaggacggggtctcactctgtcacccaggctggagtgcaatggcatgatctcggctcgctgccgcctccgcctccagggttcaggcgattgtcctgcctcagcctcccgggtagctggagctgcagatataatacgtaagtttggaggtggatgctttcagccattaagttcaaaagtactgccacaagggccaggcatggtggctcacgcctgtaatcccaaccctttgggaggtcaaagcaagcagatcgcgggatcaggaaactgagaccatcctggccaacatggtggaatcccatctgtgctaagagtacagaggttggctgagtgtggtggtatgtgcctgtggtcccggctgcttgggaggctgaggcgggaggattgcttgggcccgggaggcggaggttgccggtgaagtcgggattgcgccattgcagcgcagctggttaacagagtgagatcc

SEQ ID NO: 529029 - DNA, 1863 bp, Homo sapiens
tcaggacgcgcgcccggcccgcagtagtcgctgtcgtccgcagagccagttcctagcgcagagccgcgcccgccatgagggagatcgtgcacatccaggcgggccagtgcgggaaccagatcggcaccaagttttgggaagtgatcagcgatgagcacggcatcgacccggccggaggctacgtgggagactcggcgctgcagctggagagaatcaacgtctactacaatgagtcatcgtctcagaaatatgtgcccagggccgccctggtggacttagagccaggcaccatggacagcgtgcggtctgggccttttgggcagcttttccggcctgacaacttcatctttggccagacgggtgcagggaacaactgggcgaaagggcactacacggagggcgcggagctggtggacgcagtgctggacgtggtgcggaaggagtgcgagcactgcgactgcctgcagggcttccagctcacgcactcgctgggcggcggcacgggctcaggcatgggcacgctgctcatcagcaagatccgtgaggagttcccggaccgcatcatgaacaccttcagcgtcatgccctcgcccaaggtgtcggacacggtggtggagccctacaatgccacactgtcggtgcaccagctggtggagaatacagacgagacctactgcatcgacaacgaggcgctctatgacatctgcttccgcactctgaagctgacaacgcccacctacggggacctcaaccacctggtgtccgccaccatgagtggggtcaccacctcgctgcgcttcccgggccagctcaatgctgacctgcgcaagctggcggtgaacatggtgcccttcccgcgcctgcacttcttcatgcctggcttcgcgccgctcaccagccgcggcagccagcagtaccgggccctgaccgtgcccgagctcacccagcagatgttcgacgccaggaacatgatggccgcctgcgatccgcgccatggccgctacctgaccgtggccaccgtgttccgcgggcccatgtccatgaaggaggtggacgagcagatgctggccatccagagtaagaacagcagctacttcgtggagtggattcccaacaacgtgaaggtggccgtgtgcgacatcccgccccgcggcctgaagatggcctccaccttcatcggcaacagcacggccatccaggagctgttcaagcgcatctccgagcagttctcagccatgttccggcgcaaggccttcctgcactggttcacgggtgagggcatggatgaaatggagttcaccgaggcggagagcaacatgaacgacctggtatccgagtaccagcagtaccaggatgccaccgccaatgacggggaggaagcttttgaggatgaggaagaggagatcgatggatagtcggaatagagccgccccaactcagatcctacaacacgcaagttccttcttgaaccctggtgcctcctaccctatggccctgaatggtgcactggtttaattgtgttggtgtcggcccctcacaaatgcagccaagtcatgtaattagtcatctggaacaaagactaaaaacagcagagaattgcgggttctacccagtcagaagatcacaccatggagactttctactagaggacttgaaagagaactgaggggccacaaaataaacttcaccttccattaagtgttcaagcatgtctgcaaattaggagggagttagaaacagtctttttcatcctttgtgatgaagcctgaaattgtgccgtgttgccttatatgaatatgcagtatgggactttgaaataatgattcataataaaatactaaacgtgtgtcttcaaaaaaaaaa

SEQ ID NO: 529030 - DNA, 1157 bp, Homo sapiens
  misc_feature (983)..(983): n is a, c, g, or t
  misc_feature (990)..(991): n is a, c, g, or t
  misc_feature (994)..(994): n is a, c, g, or t
  misc_feature (998)..(998): n is a, c, g, or t
  misc_feature (1000)..(1000): n is a, c, g, or t
  misc_feature (1005)..(1005): n is a, c, g, or t
  misc_feature (1007)..(1007): n is a, c, g, or t
  misc_feature (1010)..(1010): n is a, c, g, or t
tcaggacgcgcgcccggcccgcagtagtcgctgtcgtccgcagagccagttcctagcgcagagccgcgcccgccatgagggagatcgtgcacatccaggcgggccagtgcgggaaccagatcggcaccaagttttgggaagtgatcagcgatgagcacggcatcgacccggccggaggctacgtgggagactcggcgctgcagctggagagaatcaacgtctactacaatgagtcatcgtctcagaaatatgtgcccagggccgccctggtggacttagagccaggcaccatggacagcgtgcggtctgggccttttgggcagcttttccggcctgacaacttcatctttggccagacgggtgcagggaacaactgggcgaaagggcactacacggagggcgcggagctggtggacgcagtgctggacgtggtgcggaaggagtgcgagcactgcgactgcctgcagggcttccagctcacgcactcgctgggcggcggcacgggctcaggcatgggcacgctgctcatcagcaagatccgtgaggagttcccggaccgcatcatgaacaccttcagcgtcatgccctcgcccaaggtgtcggacacggtggtggagccctacaatgccacactgtcggtgcaccagctggtggagaatacagacgagacctactgcatcgacaacgaggcgctctatgacatctgcttccgcactctgaagctgacaacgcccacctacggggacctcaaccacctggtgtccgccaccatgagtggggtcaccacctcgctgcgcttcccgggccagctcaatgctgacctgcgcaagctggcggtgaacatggtgcccttcccgcgcctgcacttcttcatgcctggcttcgcgccgctcaccagccgcggcagccagcagtaccgggccctgaccgtgcccgagctcacccagcagatgttcgacgccaggaacatgatggccgctggnatccggnncanggcngnacgancnggncacgggtccgggccagtcccacaggagggcaaccatcagcgcccaagagacacactagcgggaccacaaaggagggcacagcccccgaggacacctcgccgcaaaggagggcacacacgccacactgcgaaaagagagtgaccaaat

SEQ ID NO: 529031 - DNA, 210 bp, Homo sapiens
aacaaccccccgggggaagaagaagggggggggggggggggggaaaaaaaagcagaacggggggggggaagagcggtggggggggggggggggggaaaaaacacacgaggggggggagaaaaggaggggcgggggggggaggggaacaacttttcatgcgagggtattggaagttagtatagggggggggggagggaaatattaaagggg

SEQ ID NO: 529032 - DNA, 360 bp, Homo sapiens
cgttatttaatggtatctcatgttcttgcatgtaagcattggttgaggaggaattcaacgtgaacgtttggttctgtgcatgtactatgtgactgtgtcaagcaatgatatgtactataattacttataactaaatacttggttctaaaagcatctcactctcattgagtatgaaatggctcaactagagctatgcatgcattttcaaacacaagtaaactgaacttgagactgtcttccaataatgatctaaattgctcttatagatggattcacaaatgcacggttcaaaaagggtactgactctagctgagctgcccaaccttgaagtaaagaaggccgggcctttgcccagttcgc

SEQ ID NO: 529033 - DNA, 1823 bp, Homo sapiens
tcaggacgcgcgcccggcccgcagtagtcgctgtcgtccgcagagccagttcctagcgcagagccgcgcccgccatgagggagatcgtgcacatccaggcgggccagtgcgggaaccagatcggcaccaagttttgggaagtgatcagcgatgagcacggcatcgacccggccggaggctacgtgggagactcggcgctgcagctggagagaatcaacgtctactacaatgagtcatcgtctcagaaatatgtgcccagggccgccctggtggacttagagccaggcaccatggacagcgtgcggtctgggccttttgggcagcttttccggcctgacaacttcatctttggccagacgggtgcagggaacaactgggcgaaagggcactacacggagggcgcggagctggtggacgcagtgctggacgtggtgcggaaggagtgcgagcactgcgactgcctgcagggcttccagctcacgcactcgctgggcggcggcacgggctcaggcatgggcacgctgctcatcagcaagatccgtgaggagttcccggaccgcatcatgaacaccttcagcgtcatgccctcgcccaaggtgtcggacacggtggtggagccctacaatgccacactgtcggtgcaccagctggtggagaatacagacgagacctactgcatcgacaacgaggcgctctatgacatctgcttccgcactctgaagctgacaacgcccacctacggggacctcaaccacctggtgtccgccaccatgagtggggtcaccacctcgctgcgcttcccgggccagctcaatgctgacctgcgcaagctggcggtgaacatggtgcccttcccgcgcctgcacttcttcatgcctggcttcgcgccgctcaccagccgcggcagccagcagtaccgggccctgaccgtgcccgagctcacccagcagatgttcgacgccaggaacatgatggccgcctgcgatccgcgccatggccgctacctgaccgtggccaccgtgttccgcgggcccatgtccatgaaggaggtggacgagcagatgctggccatccagagtaagaacagcagctacttcgtggagtggattcccaacaacgtgaaggtggccgtgtgcgacatcccgccccgcggcctgaagatggcctccaccttcatcggcaacagcacggccatccaggagctgttcaagcgcatctccgagcagttctcagccatgttccggcgcaaggccttcctgcactggttcacgggtgagggcatggatgaaatggagttcaccgaggcggagagcaacatgaacgacctggtatccgagtaccagcagtaccaggatgccaccgccaatgacggggaggaagcttttgaggatgaggaagaggagatcgatggatagtcggaatagagccgccccaactcagatcaccctatggccctgaatggtgcactggtttaattgtgttggtgtcggcccctcacaaatgcagccaagtcatgtaattagtcatctggaacaaagactaaaaacagcagagaattgcgggttctacccagtcagaagatcacaccatggagactttctactagaggacttgaaagagaactgaggggccacaaaataaacttcaccttccattaagtgttcaagcatgtctgcaaattaggagggagttagaaacagtctttttcatcctttgtgatgaagcctgaaattgtgccgtgttgccttatatgaatatgcagtatgggactttgaaataatgattcataataaaatactaaacgtgtgtcttcaaaaaaaaaa

SEQ ID NO: 529034 - DNA, 125 bp, Homo sapiens
gtatgtgcttttctcatgcaatgggtcatgcatgcctactcatggtcccaatgctccctcactgccaccggagactgtgtggcccccatgtctccccatctacctctacccttaacctgtattct

SEQ ID NO: 529035 - DNA, 1765 bp, Homo sapiens
tcaggacgcgcgcccggcccgcagtagtcgctgtcgtccgcagagccagttcctagcgcagagccgcgcccgccatgagggagatcgtgcacatccaggcgggccagtgcgggaaccagatcggcatacaatgagtcatcgtctcagaaatatgtgcccagggccgccctggtggacttagagccaggcaccatggacagcgtgcggtctgggccttttgggcagcttttccggcctgacaacttcatctttggccagacgggtgcagggaacaactgggcgaaagggcactacacggagggcgcggagctggtggacgcagtgctggacgtggtgcggaaggagtgcgagcactgcgactgcctgcagggcttccagctcacgcactcgctgggcggcggcacgggctcaggcatgggcacgctgctcatcagcaagatccgtgaggagttcccggaccgcatcatgaacaccttcagcgtcatgccctcgcccaaggtgtcggacacggtggtggagccctacaatgccacactgtcggtgcaccagctggtggagaatacagacgagacctactgcatcgacaacgaggcgctctatgacatctgcttccgcactctgaagctgacaacgcccacctacggggacctcaaccacctggtgtccgccaccatgagtggggtcaccacctcgctgcgcttcccgggccagctcaatgctgacctgcgcaagctggcggtgaacatggtgcccttcccgcgcctgcacttcttcatgcctggcttcgcgccgctcaccagccgcggcagccagcagtaccgggccctgaccgtgcccgagctcacccagcagatgttcgacgccaggaacatgatggccgcctgcgatccgcgccatggccgctacctgaccgtggccaccgtgttccgcgggcccatgtccatgaaggaggtggacgagcagatgctggccatccagagtaagaacagcagctacttcgtggagtggattcccaacaacgtgaaggtggccgtgtgcgacatcccgccccgcggcctgaagatggcctccaccttcatcggcaacagcacggccatccaggagctgttcaagcgcatctccgagcagttctcagccatgttccggcgcaaggccttcctgcactggttcacgggtgagggcatggatgaaatggagttcaccgaggcggagagcaacatgaacgacctggtatccgagtaccagcagtaccaggatgccaccgccaatgacggggaggaagcttttgaggatgaggaagaggagatcgatggatagtcggaatagagccgccccaactcagatcctacaacacgcaagttccttcttgaaccctggtgcctcctaccctatggccctgaatggtgcactggtttaattgtgttggtgtcggcccctcacaaatgcagccaagtcatgtaattagtcatctggaacaaagactaaaaacagcagagaattgcgggttctacccagtcagaagatcacaccatggagactttctactagaggacttgaaagagaactgaggggccacaaaataaacttcaccttccattaagtgttcaagcatgtctgcaaattaggagggagttagaaacagtctttttcatcctttgtgatgaagcctgaaattgtgccgtgttgccttatatgaatatgcagtatgggactttgaaataatgattcataataaaatactaaacgtgtgtcttcaaaaaaaaaa

SEQ ID NO: 529036 - DNA, 2120 bp, Homo sapiens
  misc_feature (496)..(498): n is a, c, g, or t
tcaggacgcgcgcccggcccgcagtagtcgctgtcgtccgcagagccagttcctagcgcagagccgcgcccgccatgagggagatcgtgcacatccaggcgggccagtgcgggaaccagatcggcaccaagttttgggaagtgatcagcgatgagcacggcatcgacccggccggaggctacgtgggagactcggcgctgcagctggagagaatcaacgtctactacaatgagtcatcgtctcagaaatatgtgcccagggccgccctggtggacttagagccaggcaccatggacagcgtgcggtctgggccttttgggcagcttttccggcctgacaacttcatctttgaattacctctttaacatggaacaaccaggtcaaaatgtatatacatctttaaaattgaccagtagctactttgacttgcctaaaaacgtaccagtgcatctgctcagctgcaccgttggtgggtgcctgtttccccggcccctcnnnttggctaacagcacatcatggaatcacttcacaccctccttgtcggtgaccaagcatggtgatgcgcagccctttcctgtttaaacggcacgggactctctttgttgcaggccagacgggtgcagggaacaactgggcgaaagggcactacacggagggcgcggagctggtggacgcagtgctggacgtggtgcggaaggagtgcgagcactgcgactgcctgcagggcttccagctcacgcactcgctgggcggcggcacgggctcaggcatgggcacgctgctcatcagcaagatccgtgaggagttcccggaccgcatcatgaacaccttcagcgtcatgccctcgcccaaggtgtcggacacggtggtggagccctacaatgccacactgtcggtgcaccagctggtggagaatacagacgagacctactgcatcgacaacgaggcgctctatgacatctgcttccgcactctgaagctgacaacgcccacctacggggacctcaaccacctggtgtccgccaccatgagtggggtcaccacctcgctgcgcttcccgggccagctcaatgctgacctgcgcaagctggcggtgaacatggtgcccttcccgcgcctgcacttcttcatgcctggcttcgcgccgctcaccagccgcggcagccagcagtaccgggccctgaccgtgcccgagctcacccagcagatgttcgacgccaggaacatgatggccgcctgcgatccgcgccatggccgctacctgaccgtggccaccgtgttccgcgggcccatgtccatgaaggaggtggacgagcagatgctggccatccagagtaagaacagcagctacttcgtggagtggattcccaacaacgtgaaggtggccgtgtgcgacatcccgccccgcggcctgaagatggcctccaccttcatcggcaacagcacggccatccaggagctgttcaagcgcatctccgagcagttctcagccatgttccggcgcaaggccttcctgcactggttcacgggtgagggcatggatgaaatggagttcaccgaggcggagagcaacatgaacgacctggtatccgagtaccagcagtaccaggatgccaccgccaatgacggggaggaagcttttgaggatgaggaagaggagatcgatggatagtcggaatagagccgccccaactcagatcctacaacacgcaagttccttcttgaaccctggtgcctcctaccctatggccctgaatggtgcactggtttaattgtgttggtgtcggcccctcacaaatgcagccaagtcatgtaattagtcatctggaacaaagactaaaaacagcagagaattgcgggttctacccagtcagaagatcacaccatggagactttctactagaggacttgaaagagaactgaggggccacaaaataaacttcaccttccattaagtgttcaagcatgtctgcaaattaggagggagttagaaacagtctttttcatcctttgtgatgaagcctgaaattgtgccgtgttgccttatatgaatatgcagtatgggactttgaaataatgattcataataaaatactaaacgtgtgtcttcaaaaaaaaaa

SEQ ID NO: 529037 - DNA, 1752 bp, Homo sapiens
tcaggacgcgcgcccggcccgcagtagtcgctgtcgtccgcagagccagttcctagcgcagagccgcgcccgccatgagggagatcgtgcacatccaggcgggccagtgcgggaaccagatcggcaccaagttttgggaagtgatcagcgatgagcacggcatcgacccggccggaggctacgtgggagactcggcgctgcagctggagagaatcaacgtctactacaatgagtcatcgtgccagacgggtgcagggaacaactgggcgaaagggcactacacggagggcgcggagctggtggacgcagtgctggacgtggtgcggaaggagtgcgagcactgcgactgcctgcagggcttccagctcacgcactcgctgggcggcggcacgggctcaggcatgggcacgctgctcatcagcaagatccgtgaggagttcccggaccgcatcatgaacaccttcagcgtcatgccctcgcccaaggtgtcggacacggtggtggagccctacaatgccacactgtcggtgcaccagctggtggagaatacagacgagacctactgcatcgacaacgaggcgctctatgacatctgcttccgcactctgaagctgacaacgcccacctacggggacctcaaccacctggtgtccgccaccatgagtggggtcaccacctcgctgcgcttcccgggccagctcaatgctgacctgcgcaagctggcggtgaacatggtgcccttcccgcgcctgcacttcttcatgcctggcttcgcgccgctcaccagccgcggcagccagcagtaccgggccctgaccgtgcccgagctcacccagcagatgttcgacgccaggaacatgatggccgcctgcgatccgcgccatggccgctacctgaccgtggccaccgtgttccgcgggcccatgtccatgaaggaggtggacgagcagatgctggccatccagagtaagaacagcagctacttcgtggagtggattcccaacaacgtgaaggtggccgtgtgcgacatcccgccccgcggcctgaagatggcctccaccttcatcggcaacagcacggccatccaggagctgttcaagcgcatctccgagcagttctcagccatgttccggcgcaaggccttcctgcactggttcacgggtgagggcatggatgaaatggagttcaccgaggcggagagcaacatgaacgacctggtatccgagtaccagcagtaccaggatgccaccgccaatgacggggaggaagcttttgaggatgaggaagaggagatcgatggatagtcggaatagagccgccccaactcagatcctacaacacgcaagttccttcttgaaccctggtgcctcctaccctatggccctgaatggtgcactggtttaattgtgttggtgtcggcccctcacaaatgcagccaagtcatgtaattagtcatctggaacaaagactaaaaacagcagagaattgcgggttctacccagtcagaagatcacaccatggagactttctactagaggacttgaaagagaactgaggggccacaaaataaacttcaccttccattaagtgttcaagcatgtctgcaaattaggagggagttagaaacagtctttttcatcctttgtgatgaagcctgaaattgtgccgtgttgccttatatgaatatgcagtatgggactttgaaataatgattcataataaaatactaaacgtgtgtcttcaaaaaaaaaa

SEQ ID NO: 529038 - DNA, 1449 bp, Homo sapiens
tcaggacgcgcgcccggcccgcagtagtcgctgtcgtccgcagagccagttcctagcgcagagccgcgcccgccatgagggagatcgtgcacatccaggcgggccagtgcgggaaccagatcggcaccaagttttgggaagtgatcagcgatgagcacggcatcgacccggccggaggctacgtgggagactcggcgctgcagctggagagaatcaacgtctactacaatgagtcatcgtctcagaaatatgtgcccagggccgccctggtggacttagagccaggcaccatggacagcgtgcggtctgggccttttgggcagcttttccggcctgacaacttcatctttggccagacgggtgcagggaacaactgggcgaaagggcactacacggagggcgcggagctggtggacgcagtgctggacgtggtgcggaaggagtgcgagcacttcttcatgcctggcttcgcgccgctcaccagccgcggcagccagcagtaccgggccctgaccgtgcccgagctcacccagcagatgttcgacgccaggaacatgatggccgcctgcgatccgcgccatggccgctacctgaccgtggccaccgtgttccgcgggcccatgtccatgaaggaggtggacgagcagatgctggccatccagagtaagaacagcagctacttcgtggagtggattcccaacaacgtgaaggtggccgtgtgcgacatcccgccccgcggcctgaagatggcctccaccttcatcggcaacagcacggccatccaggagctgttcaagcgcatctccgagcagttctcagccatgttccggcgcaaggccttcctgcactggttcacgggtgagggcatggatgaaatggagttcaccgaggcggagagcaacatgaacgacctggtatccgagtaccagcagtaccaggatgccaccgccaatgacggggaggaagcttttgaggatgaggaagaggagatcgatggatagtcggaatagagccgccccaactcagatcctacaacacgcaagttccttcttgaaccctggtgcctcctaccctatggccctgaatggtgcactggtttaattgtgttggtgtcggcccctcacaaatgcagccaagtcatgtaattagtcatctggaacaaagactaaaaacagcagagaattgcgggttctacccagtcagaagatcacaccatggagactttctactagaggacttgaaagagaactgaggggccacaaaataaacttcaccttccattaagtgttcaagcatgtctgcaaattaggagggagttagaaacagtctttttcatcctttgtgatgaagcctgaaattgtgccgtgttgccttatatgaatatgcagtatgggactttgaaataatgattcataataaaatactaaacgtgtgtcttcaaaaaaaaaa

SEQ ID NO: 529039 - DNA, 1306 bp, Homo sapiens
ctgcttcttttgcttcttcctggcgctgtttttgcctcctcttcgtttctgtctttgtctctgtgtgtttcacccttggctttgtgtcggctctcttttttgtgcgggctcttttgctcctgtgtctcagtctgtccgatctcctatacttgttgttacccattcgtccgtgtctcctttttggtgtactttctgtgtctatttgcgttctttttggggatgcctttgttcgtcttggttactcgtcctgttctgagggcgtttcctgtttgggctgcatggtgttcttttcgtggtcgtctctacttgggtccacgcctttgtcaggtttttcttacgtctgacggttcctcattcgcccttcttgtgttgactcttgtcgctatgcccccacttaccccgtccgcccagtcgtctttctatcatttggttgatcctttccagtctgtatcccctggtatggtatcgactctgggcatggttccctgatagtcttatcatctgcgtacctcttgtgaaacgaaccgctcaattgccgcgcttccctttcatttggcccgaagtcttgtgccttggtaagtattccccaagccttttataagcaggtgtgccaggatccctatttctcgtctactggcggacgtccccctgtctgtgcctggtgaaggaagggccatgcccacaagattcgtgaacgtcgcttgctgccagtatagccagagtagtgaaggtcccccgcccttggggtgactctgtgtgtgcacccgcttaagctctgggccccccatccctagttgtgcctcgcttctggccagggtgctgcacataatacgcacaaaaaggatacgaaaagtgatcgtaatcacgtggctccgactgaagaacagttggcacctttcgcagatggcccagtgtcacgcgtgataggtctgggtttgcaccctccacgggtctagggacgaacgaactctcttgcgggatgacatgtttcaccgtgacatcttttagtccatgttgtccattagaaggaaggcccacattgcactgcctgctggttgtacctctcgatacaggctctggcacactcgatggagcacactgctcgcatctcggcctctgtgtcaagaggtggcagccgcacctttctgatgagaacggaatctcgggttatttcagccccggcctgcagagtggaagcgcccagcggcctttcctcgctcaccagggaccagtcatcagggccatcaccgtatttcatactactacattaatgaaaaagtgtgaacgagtatagaatcctctctgt

SEQ ID NO: 529040 - DNA, 151 bp, Homo sapiens
tgctgaggtcactctagaggattcctatatgctgtctcataataaaaacaaaaatcaaatcaacaaaaaagaactttccctaggccagtgtggtggctcatacctgtaatcccagcactttgtggaggctgaatcgggaggattgcttgag

SEQ ID NO: 529041 - DNA, 2010 bp, Homo sapiens
  misc_feature (1893)..(1893): n is a, c, g, or t
  misc_feature (1940)..(1940): n is a, c, g, or t
  misc_feature (1998)..(1998): n is a, c, g, or t
ttttttttttgtgttcagaaaagtacagtgttgacattttattttttatgtaaagaagccatatttacataatacattcatatttttaagtatgttacagctcctgtagaaaaccattccattaagacagcaacaagtgatctggattcaatctttaaaatattaagtcaaattaaaatgttcttatcaagactccaatttaatttcacagcccatctgcacaggggaactgaggagaaacaggaatgaagagtgggcgacaaagagaaagcatcccttcccacacgccaagagtccagtgcaacgatccctgccacacggtcagccgaccccacttggtgccacagggtccagcctcggccactctgggctcaacctttccagcacgtctgggagcccaatgaggctatgggacagtgtgcatttccctcaaggcctccggaaagtcacctgccacccactgtgacctctgaggctgaaaggactaaggactcctttccccatcatttcagctgggccagtggctggctaaaatcagcgcagcattcccattcttctgaaagccacagctgaaataatgcaccagctgaaaccacagtggacagactgagatggcctccctctgggcctctagttggcaactttctcacccgggggctcctctttctccttttcccgctccttgttccagtccttaaggccttctggaagtgaggtgtcctcatccaagctgccagtgccttccacaaattcttcataggtagatttttccgcaaatggtctggggcccaaaagttcaaccatatcattcttatctaatacttctttttctaacaacagaagagcaaccttctccacgtcagctttcttttctgtgagaagagctactgttcttttataagcatcattaataagtattcgtacttcatcatctatcaatcttgcagtggcttcactgtaaggtttctccaataccatgtccccctgacgtgggaggtcaaaggagatttgcccaaccttttcattcatgccaaactgaacaatttgggcatatgcactctgagttacttttctcaagtcatcttgagcaccagttgtaattcttccaaagaagatttcttcagagactcgaccacctaaagtcatacacatcctatccaagagctgctctttggtatagaggtattgttcttttggtaaatactgagcataacctagtcctttgccacgtgggatgatggatacctttaaaagcgggtctgcgtgctccagataccagccggcaaccgcatggcctgcttcgtggtatgccacagtcttcttctcctcaggctgcagaacctgcgttttcttctctaagccaccaatcactcgctcaattgcctgttcaaagtgtttctgatttatggaatctgacagatgccttgcagcaatcaacgcagcttcattacagacattagcaacatcagcacctgaaaaccctggagttaaagatgccagttttcttgccaatttatccttctccagggtactgtccagttttagcggtcggagatgaactttgaaaatagaagctcttccttttatgtctggtggtccaataaagatctgcctgtcgaaacgccccggcctaagtagcgcggggtccaggatatctggtcgattggtgccggccaaaatgacgacatttgttgttgtattaaaaccatccatctccaccagcagctggttgagtgtgttctcctgctcactctgccctccaaagttgcctcttcctctcttccttcccaccgcatcgatttcatcgatgaagaggatgcaaggggcattcttccgagcaagggcaaataagtctcggactctagcagggcccacaccaacgaacatctccanaaactcagatccactaacggtgatgaaggggacattggcttctccgnctgtggccttagctagcagcgtcttcccagtgcctggaggaccagtgagaatggcacnctttggattttg

SEQ ID NO: 529042 - DNA, 1849 bp, Homo sapiens
  misc_feature (892)..(892): n is a, c, g, or t
ttttttttttgtgttcagaaaagtacagtgttgacattttattttttatgtaaagaagccatatttacataatacattcatatttttaagtatgttacagctcctgtagaaaaccattccattaagacagcaacaagtgatctggattcaatctttaaaatattaagtcaaattaaaatgttcttatcaagactccaatttaatttcacagcccatctgcacaggggaactgaggagaaacaggaatgaagagtgggcgacaaagagaaagcatcccttcccacacgccaagagtccagtgcaacgatccctgccacacggtcagccgaccccacttggtgccacagggtccagcctcggccactctgggctcaacctttccagcacgtctgggagcccaatgaggctatgggacagtgtgcatttccctcaaggcctccggaaagtcacctgccacccactgtgacctctgaggctgaaaggactaaggactcctttccccatcatttcagctgggccagtggctggctaaaatcagcgcagcattcccattcttctgaaagccacagctgaaataatgcaccagctgaaaccacagtggacagactgagatggcctccctctgggcctctagttggcaactttctcacccgggggctcctctttctccttttcccgctccttgttccagtccttaaggccttctggaagtgaggtgtcctcatccaagctgccagtgccttccacaaattcttcataggtagatttttccgcaaatggtctggggcccaaaagttcaaccatatcattcttatctaatacttctttttctaacaacagaagagcaacctgaaatatgaacaattttcattaaatacagttactcagcaangtctattcagaaatattaattttttatttacaggtgaccccattccaaaaaaggatttaagaccaatgaaaaagatgtctcatacataaggttgcatagttttagagtaagatgtgcaaaatatcaaagcaaccaatgtccatctgtaagggatacatttccatactagacatatttccactcatctgcacaatgaatgctgaccatctataatgaggaggaagctggccgggcgcggtagctcgcgcctgtaatcctagcacttcgggaggccgaggcgggtggatcacaaggtcaagaccatcctggccaacagggtgaaaccgtgtctctactaaaaatgcaaaaaaatagctgggcatggtggtgtagcgcctgctcgacccagcctacttgcggaggctcgacgcaggaggatcacttgaacccagaggaggcgcgaggtagcagctgagacaacgattgtgccacgtgacactccagcctgggcgcacagagccgagactccatacctcaacacacaacaccaaacacaaacaacacaccacggacgcgccccgacacacaaagaatcacctcgacgagcgccccaacaacagacacgccgtttccacacactatacactggtcccacacgacgcgcactcaaccgacgtaaccactaactcattatcaaacatagacaaccgcgccgcccgcatacacacagcgccaagcatctgaccaaaactgacataagactgagactatattgcgcaacaggacatccacactaacaggccacgactggcacctacgtggaccacaagatcaccatcgcagaccatcctaaacggcacgaccggataactacacgccgaatcaacggctagaaaaagaagcctcactgacaagcccacaaggcagcagcaatgcacttctgccttcccacacccgacccgacacgaagtcatcacg

SEQ ID NO: 529043 - DNA, 2151 bp, Homo sapiens
  misc_feature (2034)..(2034): n is a, c, g, or t
  misc_feature (2081)..(2081): n is a, c, g, or t
  misc_feature (2139)..(2139): n is a, c, g, or t
tcaggacgcgcgcccggcccgcagtagtcgctgtcgtccgcagagccagttcctagcgcagagccgcgcccgccatgagggagatcgtgcacatccaggcgggccagtgcgggaaccagatcggcaccaagttttgggaagtgatcagcgatgagcacggcatcgacccggccggaggctacgtgggagactcggcgctgcagctggagagaatcaacgtctactacaatgagtcatcgtctcagaaatatgtgcccagggccgccctggtggacttagagccaggcaccatggacagcgtgcggtctgggccttttgggcagcttttccggcctgacaacttcatctttggcccatctgcacaggggaactgaggagaaacaggaatgaagagtgggcgacaaagagaaagcatcccttcccacacgccaagagtccagtgcaacgatccctgccacacggtcagccgaccccacttggtgccacagggtccagcctcggccactctgggctcaacctttccagcacgtctgggagcccaatgaggctatgggacagtgtgcatttccctcaaggcctccggaaagtcacctgccacccactgtgacctctgaggctgaaaggactaaggactcctttccccatcatttcagctgggccagtggctggctaaaatcagcgcagcattcccattcttctgaaagccacagctgaaataatgcaccagctgaaaccacagtggacagactgagatggcctccctctgggcctctagttggcaactttctcacccgggggctcctctttctccttttcccgctccttgttccagtccttaaggccttctggaagtgaggtgtcctcatccaagctgccagtgccttccacaaattcttcataggtagatttttccgcaaatggtctggggcccaaaagttcaaccatatcattcttatctaatacttctttttctaacaacagaagagcaaccttctccacgtcagctttcttttctgtgagaagagctactgttcttttataagcatcattaataagtattcgtacttcatcatctatcaatcttgcagtggcttcactgtaaggtttctccaataccatgtccccctgacgtgggaggtcaaaggagatttgcccaaccttttcattcatgccaaactgaacaatttgggcatatgcactctgagttacttttctcaagtcatcttgagcaccagttgtaattcttccaaagaagatttcttcagagactcgaccacctaaagtcatacacatcctatccaagagctgctctttggtatagaggtattgttcttttggtaaatactgagcataacctagtcctttgccacgtgggatgatggatacctttaaaagcgggtctgcgtgctccagataccagccggcaaccgcatggcctgcttcgtggtatgccacagtcttcttctcctcaggctgcagaacctgcgttttcttctctaagccaccaatcactcgctcaattgcctgttcaaagtgtttctgatttatggaatctgacagatgccttgcagcaatcaacgcagcttcattacagacattagcaacatcagcacctgaaaaccctggagttaaagatgccagttttcttgccaatttatccttctccagggtactgtccagttttagcggtcggagatgaactttgaaaatagaagctcttccttttatgtctggtggtccaataaagatctgcctgtcgaaacgccccggcctaagtagcgcggggtccaggatatctggtcgattggtgccggccaaaatgacgacatttgttgttgtattaaaaccatccatctccaccagcagctggttgagtgtgttctcctgctcactctgccctccaaagttgcctcttcctctcttccttcccaccgcatcgatttcatcgatgaagaggatgcaaggggcattcttccgagcaagggcaaataagtctcggactctagcagggcccacaccaacgaacatctccanaaactcagatccactaacggtgatgaaggggacattggcttctccgnctgtggccttagctagcagcgtcttcccagtgcctggaggaccagtgagaatggcacnctttggattttg

SEQ ID NO: 529044 - DNA, 153 bp, Homo sapiens
ggaaccgagccacagccagaaaatgcctgacacaggcctgcaggtcagagaccttgaaggacactgcccctggtacttgagggcttgaaggttaatgaggcaggtactggagcctggaggctgaggagggcatggcctggctgtatggacagt

SEQ ID NO: 529045 - DNA, 265 bp, Homo sapiens
  misc_feature (9)..(9): n is a, c, g, or t
  misc_feature (16)..(16): n is a, c, g, or t
  misc_feature (34)..(34): n is a, c, g, or t
  misc_feature (240)..(240): n is a, c, g, or t
tacctttantagtagntagttatgtttttgttantttaccttttttttttttcttaagagatgtggtcctcaagcttggccaacatggtgaaaccccgtgtctattaaaaatataaaaattagccaggtgtggtgccacatatctgtagtcccagctactcgggaggttgaggtgggagaatcgcttgaatccgggaggcagaggttgcagtgagctgaaatcgtgacactacactctancctgggtggacagggtgagaccctg

SEQ ID NO: 529046 - DNA, 172 bp, Homo sapiens
gcgtatgcttatatgtatggggtgctttgaagcacacaatttctggcattaggggtgtcagcaagccatctggactgggcaagatggtggatgaccacgatggtggacccaccttctctaggcagattaacgaagggtagaggcacccttcttcttggagagtgattgagga

SEQ ID NO: 529047 - DNA, 636 bp, Homo sapiens
gggcttcggccggccctcatttgtggggccaccttccttccaacagaggactgggtgggggggggccccggtccttctcccgcgggaaagggggcgggaccctttcccccgggccattccttgttccaatgttgtttacccccggggcttccccgggccccgcccccctctccaaggggtggccgtgttggtttccaccccgagcgggccaagtttccccccggggtaaagcggcaggactggatggaactgttcatttacccctttaagttggtgcccagggacattgtgggggaccccgagaccccgttggccctttgataaagcccgggcccccgcccagcgggggtgggccctccctgcccccctagtttcccaggggtgcccccgacggggtggttttcagtgggggccaaagttttggatttggggtcagggggggtccagtccttccaggggttttggggcggctcccccccttttcccatgttgggggcccccgggtcccttgttggggggggtttttccagtttttcccccgttttccgggggccgctttttttttaagaccccgggtctttggtttttgggccccccccaggtccagaatgccctcgccggccccttttttcccca

SEQ ID NO: 529048 - DNA, 810 bp, Homo sapiens
gatgctgagtgccagcctgtgtgccctgcgcggacactttcagccccgagcctgctggcctgctcggtgtctggacccacgccgcagcttggcctggagatgcagctggggctgcctgcgctgtgcctgcgactgtggctctgcctgggactcctggacggcctggtgacgtggctactccatgacccttcccgaccttgaacatcacggaggagtcacgacgtcatcgacaccggtgacatgcctgtccaatgtcctgcattggtgacatgcaaacccctcgacgtggtgcttgtgccaggagctacagtgacggctgccatgccacgcggacgacaaaggagcatgcgatgggaccactgggtggtgtgtgtgcctgtgaaccttggcgcagcgtgccacgatgaccggccaagtgcccgtacttgccaacgcgttggttgcctcgacttggcgccgaagggttacacttgccaacctgaacacccagtgcaaggctaccgttcttggctcactaacaaggttacaatcccaggggccaccggccatttcggaagggcgccaacacgacgaggaacaggcaccaggcttcgcgtaaactggattgcttgccgggttggaaggatcgaacttttggaggaagacgcatggccacgaagtgctccacagttcgaaacccaaagagcgcattgggaaaagcatggccgacatgatggggtacaaaggcacgtgggacaatgggcactgcccgagttgttggcatgagtagcccccttggtacgtagtggttgttccccaatcagccacagg

SEQ ID NO: 529049 - DNA, 379 bp, Homo sapiens
ggtcagtacggcaccagtaaatgattgatcgccgtgcgatcagttgaaacagcaccagccaggtcaggccacgtaacagcatcccgctctccccctcaaaactcgcgcgcattataagcatgcccgccctatgctccggcattcgccaaaagcatgttgggttgaccaggctgattgcccatgatgatctacattggttctctgtaacccataaaaacgccccttatcaacgggcacataagtgatgaaccaaggagagacgcaatgccctatgtacccgtagcgcagctcaaagattacgtcggcaaggaactgggacgttccgaatggctcaccatcgaccaggcgcgtatcaacctgttcgcggaagccaccggcg

SEQ ID NO: 529050 - DNA, 957 bp, Homo sapiens
tggttccgcccgaaagccccggggtaggtgtggaaccccaaggggaaaacccgggggatatttgcggccgccgcccatgccgtctcccccgtctggcggttggggggggttgttgcctcagacccaccccaaacccgaacacatgtgagagggcgcaacaaccactcctctccaagcaacagagggagattactcagcgctccagatctcctgttgtggaaccaaggggcacctcaccgttgaacgctctccagagcaccagctctcccagaacaacggcccaaggtgttttattgatgttacaaacccacattatttgacccaagatgtgttccaacagtgatctcttctcttttaggagacataagaccaaagaaaacctctctatatccaccaagaatgtgcggtattattcacacatatttgtcgtgagcacacaaaacatcttagagaataatcttcaacccccgcggccaaagaaaaagatcatctccaaaacttctgtgccaaaaaacccccgtgtgtgtgagactctgtggaactccaccctcgaactgtgtgtccgaacagaaagaaggcagttgtgttttgtgacacccgaggtgtgtgtgtggacacagacactctttgaagatttctccagaagaaacagcgaggacacaacctgtgccacaacgccttgtagttacccgtggtgagtctcaaactgtgtgtggcaacctctcctcgaggggaacaccccccagaaagaggagtgagggccctccccccacggtggagggggggcgagtattactaccatcaacttcttagggagagaagccctctcgatgcccccaagttgtgttttattttccccggcccccacgcgggacacacacaaccagtgtggtcgaaacactggtaataacttcagaaccggagcctctgccttagccaagagagaaatctatccga

SEQ ID NO: 529051 - DNA, 689 bp, Homo sapiens
ggggagcggcgcaagcggcgacgggactggctgggtcggctgtgctgctggtgcgatgagccgcggggctgtgtctcggcggcaatggggacagcgcgtgggtggccgaggatgctgcggggcggtagctcctggcggcccctagctgggtgactcgcttgcgccgtgcctcacacagccgaggttgggttccggggcacaagatctgtctgctccggttgcgcgcgcgccgggttgagcgactccaagtgtgcttgacagacgactgatgatgatgctgcgtgccctctaggatgcaaggacgaattgtatttgaccaagattgtctcacaatgggttgtactatcacggaggacgaacgtttggaggaaggtttatcgacaggtagtgagaaattcattatctcaagtgacaagagcaaggtaaattcagtgtgcgctggaaattctgtttggacatgattgaagcacaattcctggtttaaacgaaaaggttctggctggtggatgaacagttgatacgctgttgtcgaatgagaacgatgagtcgataccggtagatttggggttggaatgggctgggcctaagacttctccattccggtccaccgtgtggcagaggctagcgtgggtgggacaaggatcggggagccgctacatgtgtgccttgtaggtgaccgtgcggttgtg

SEQ ID NO: 529052 - DNA, 137 bp, Homo sapiens
actgtttgagagatacgacggatgacagaaacagtagcctttgacctctggggccaggtaatccctggtcaccgtctccacagcatccccgaccagccccaaggtacttcccgcatgagcactctgcaagcacccag

SEQ ID NO: 529053 - DNA, 433 bp, Homo sapiens
  misc_feature (28)..(28): n is a, c, g, or t
ttaacagagtcccgggtctgaaaggtancgtggtagcacagatttttgagacagagtcttgcctctgtcaccaggctggagtgcagtggtgcaatctcggccactgcaacctctgccttccgggttcaagcaactctcctatctcagcctccctagtagctgggactacagtcacataccaacacacccagctaatttctatatttttagtcgagatggggtttcaccatagttggtcaggctggtctcgacactcctgacctcaggtgatccacccgactcggcctcccaaagtgctgggatcatcgccgtgagccacctacgcctggccgtaagtaattcttccacgtgctatcaagaaacttttcacctaacaatcacgttcccttggcttctaagccacccaatttattcatgttatacacactctttc

SEQ ID NO: 529054 - DNA, 289 bp, Homo sapiens
ggtctccgggatggtgctacaacatggtccgtgcctacaccactgggtccccgtggaagcctgagaggcccgggacagcctggagaggcactcggtggcatcgcgagtacacggagagcatgtgtctgctggagagcgagctggaggcacagctgggggagtttcatctccgaatgaaagggctggctgtcttcgcgaggctgtgtgtaggcgatcagtatgagatctgcatgaaattatgggcgtcaggggttgaaaactagggggccagaattgaggttagtggaaa

SEQ ID NO: 529055 - DNA, 435 bp, Homo sapiens
  misc_feature (24)..(24): n is a, c, g, or t
  misc_feature (43)..(43): n is a, c, g, or t
  misc_feature (95)..(95): n is a, c, g, or t
  misc_feature (252)..(252): n is a, c, g, or t
  misc_feature (346)..(346): n is a, c, g, or t
gggagggggggggggggagggganggggaggggggggggaganagggagggggggaggagggggggggggggggggggggggggggggggggggnggggggggggggggggagggggggggggggggggggggggggggggggggggagggggggggggagggggggagggagagggggggggggggggggggggggggggggggggaggggggaggggggggggggggggggggggggcgaggggagaggngggggggggggggggggcgggggggggggcgggggagaggggcagggggggggagatgggggagggggagagaggaagggggggggggaagagnggagagggaccgcattcgtccccacactcatgggccttaccagggtactcgtacgtatgggcccttttatacgaataaggttataaaaa

SEQ ID NO: 529056 - DNA, 855 bp, Homo sapiens
  misc_feature (38)..(38): n is a, c, g, or t
  misc_feature (51)..(51): n is a, c, g, or t
  misc_feature (57)..(58): n is a, c, g, or t
  misc_feature (88)..(88): n is a, c, g, or t
  misc_feature (92)..(92): n is a, c, g, or t
  misc_feature (97)..(98): n is a, c, g, or t
  misc_feature (100)..(101): n is a, c, g, or t
  misc_feature (109)..(109): n is a, c, g, or t
  misc_feature (113)..(113): n is a, c, g, or t
  misc_feature (144)..(144): n is a, c, g, or t
  misc_feature (172)..(172): n is a, c, g, or t
  misc_feature (174)..(175): n is a, c, g, or t
  misc_feature (180)..(180): n is a, c, g, or t
  misc_feature (187)..(187): n is a, c, g, or t
  misc_feature (189)..(189): n is a, c, g, or t
  misc_feature (224)..(224): n is a, c, g, or t
  misc_feature (226)..(226): n is a, c, g, or t
  misc_feature (249)..(249): n is a, c, g, or t
  misc_feature (251)..(251): n is a, c, g, or t
  misc_feature (308)..(308): n is a, c, g, or t
  misc_feature (326)..(326): n is a, c, g, or t
  misc_feature (329)..(329): n is a, c, g, or t
  misc_feature (334)..(334): n is a, c, g, or t
  misc_feature (341)..(341): n is a, c, g, or t
  misc_feature (351)..(351): n is a, c, g, or t
  misc_feature (356)..(356): n is a, c, g, or t
  misc_feature (392)..(392): n is a, c, g, or t
  misc_feature (400)..(400): n is a, c, g, or t
  misc_feature (402)..(402): n is a, c, g, or t
  misc_feature (455)..(455): n is a, c, g, or t
  misc_feature (546)..(546): n is a, c, g, or t
  misc_feature (575)..(575): n is a, c, g, or t
  misc_feature (642)..(642): n is a, c, g, or t
  misc_feature (733)..(733): n is a, c, g, or t
  misc_feature (740)..(740): n is a, c, g, or t
  misc_feature (778)..(778): n is a, c, g, or t
ccgggcctcttgcgtctggtaacgccgctgtctctaangccagcccttggngcccgnnccccgccaccgcagcgcccggaagtccgcngccnaaaanncnncccgcacncccnctccccgcaccgtacccggccgcctcgcgcnatggcggcccccggcagcgcccggcgantnntgctnctgctantncttttgctgctgctcggcctcatgcattgtgcgtnanagcaatgtttatggtgaaaaatnanaacgggaccgcgtgcataatggccaacttctctgctgccttctcagtgaactacganaccaagagtggccctaanaanatganctttganctgccatcanatgcnacagtggtgctcaaccgcagctcctgtggaaaaaanaacacttntnaacccagtctcgtgattgcttttggaagaggacataaactcactctcaatttnacgagaaatgcaacacgttacagcgtccagctcatgagttttgtttataacttgtcagacacacaccttttccccaatgcgagctccaaanaaatcaagactgtggaatctataactganatctagggcagatatagataaaaaatacagatgtgttagtggcacccaggtccacatgaacaacgtncccgtaacgctccatgatgccaccatccaggcgtacctttccaacagcagcttcagcaggggagagacacgctgtgaacaagacaggcctnccccaancacagcgccccctgtgccacccagcccctcggcctcanccgtgcccaagagcccctctgtggacaagtacaacgtgagcggcaccaacgggacctgcctgctggccagcatgggg

SEQ ID NO: 529057 - DNA, 282 bp, Homo sapiens
agagacttgctctgtcacacaggctggagtgcagcggctcgatctcaggtcactgcaacctctgcctcctgagttcaagcaattctccagcctcctgcttctactcacagaagcagagagtagaatggaggttaccgggggtgggaggcaggggtttggggagacggtgaaatcattctaaaaagcaattgctccggaggaattggattaagagattctttgcgcagcatgggaactgcaggaaccgtctcgtattctggagattcaagaaggggtttcacc

SEQ ID NO: 529058 - DNA, 309 bp, Homo sapiens
  misc_feature (16)..(16): n is a, c, g, or t
  misc_feature (18)..(18): n is a, c, g, or t
  misc_feature (31)..(31): n is a, c, g, or t
  misc_feature (56)..(56): n is a, c, g, or t
  misc_feature (59)..(59): n is a, c, g, or t
  misc_feature (61)..(61): n is a, c, g, or t
  misc_feature (68)..(68): n is a, c, g, or t
  misc_feature (76)..(76): n is a, c, g, or t
  misc_feature (118)..(118): n is a, c, g, or t
  misc_feature (120)..(120): n is a, c, g, or t
  misc_feature (129)..(129): n is a, c, g, or t
  misc_feature (146)..(146): n is a, c, g, or t
  misc_feature (153)..(153): n is a, c, g, or t
  misc_feature (174)..(174): n is a, c, g, or t
  misc_feature (179)..(179): n is a, c, g, or t
  misc_feature (219)..(219): n is a, c, g, or t
  misc_feature (227)..(227): n is a, c, g, or t
  misc_feature (240)..(240): n is a, c, g, or t
  misc_feature (245)..(245): n is a, c, g, or t
  misc_feature (260)..(260): n is a, c, g, or t
  misc_feature (262)..(262): n is a, c, g, or t
  misc_feature (283)..(283): n is a, c, g, or t
  misc_feature (292)..(292): n is a, c, g, or t
  misc_feature (300)..(300): n is a, c, g, or t
ggaagctgcatccccncngtggtccttaggnaccagttttcgttaaacaaaacccnccngnactatcncggttttntattctccgtctgaactctattcaaacgtatcttcgctctcncngggcttttnttttaccgtttcgtttngtttttntctaatcccgctttcatactngcccncgcggggaaaaggtacaatatgtcaaagagatgagagagngttatttntccggcaattttntattngcgtttcttatttcngncagttcttttatttacgtccncgcgacccnggtactcnggggggcag

SEQ ID NO: 529059 - DNA, 336 bp, Homo sapiens
agatcaaacagtgcctccaagagcggaaggcaggctcccagcccctcacctgcctcaggtacctgcttcagtgacacctagtgtgcaaactctagccctacctccacaagccctggaacctattagacctgcaccacaaaagagatttaaaatttaaaagctttcctaagggcattgtagctcacgcctgtaatcccagcactttgggggggccaagataggcatattgcttgagatcaggagttcgagaccggcctggacaacatggcaaaaccctgtctctattaaaaacaaaaaaaattagccctgcatggtggcgtgtgcctgtagtcccat

SEQ ID NO: 529060 - DNA, 118 bp, Homo sapiens
gatgcagagaaagtaagccagatgacagattttgatcggtttaaagttatgaaggcaagaaaatgaggaacagaataattcagaatgaaggtaagaaggttcaaaagggaggtcttct

SEQ ID NO: 529061 - DNA, 143 bp, Homo sapiens
acattagactccctgacccctctccccgacttccccagacagcataggatgaaggcaacatatacctcacaggatcatttgatcttgagagtccttcaaggctgacatccaagctcttcacatcccagaatactcatgccgct

SEQ ID NO: 529062 - DNA, 132 bp, Homo sapiens
gggctacagcagatgcacgctgcggcacgggtagttgcactgctttctcttgtagaatcctttgcggtcacaactgggcaggtacccagcacggggcaccatgcgtgggctggctttgagcaccagcacaat

SEQ ID NO: 529063 - DNA, 140 bp, Homo sapiens
cccgggttatgggaggctgaggcagaagcttacctgaaacaagtgatagtatgagacttgactgtagataattgaatccttaaagaaaaaggggaggctgggtgcactaggctcacgcctatcagtctcagtcacgtttg

SEQ ID NO: 529064 - DNA, 125 bp, Homo sapiens
ccggaagcccaggaagacaggcgactggaagtcaactacttccttaagatacatccaactatagggatagataatccggaaaggtttcataggtgggagcagacaatgtagggctccaagcagca

SEQ ID NO: 529065 - DNA, 399 bp, Homo sapiens
  misc_feature (162)..(162): n is a, c, g, or t
cagctcacacaagctcttctctgggaaaagggagagcttgtcctttgtttgtttgtttgttttaactgatggtttcgttttgtttttttttaagatggagtctcactctgtcgccaggctggagtgcagtggcgcaatctcggctcactgcaacctccgacntccctgttcaagcgattctcctgcctcagctacttgggagctaaggcaggagaatcacttgaacccaggaagtggaggatcgcttgagctcaggagttaaaagaccagcccgggcaacacagagaaaccccccacctctacaaaaaactttaagattacctgggcacagtggctcacacctgtaatcccaacactttgggaggctgaggcgggaggatcatttgagcccaggaggcc

SEQ ID NO: 529066 - DNA, 213 bp, Homo sapiens
ccctttccaaaaaaaagggaatgtgggtccaggacctgattatcccggggggtttttttattccggtcctccaactggttttatagaagaggtgggttttaaaaggttgccaaagttttttttttttttaaactggaagaaaaaaaattttgttgggtttcctacaggggttaggatgttttttccagaggttttttaaaaaatggaacctga

SEQ ID NO: 529067 - DNA, 856 bp, Homo sapiens
  misc_feature (329)..(329): n is a, c, g, or t
  misc_feature (367)..(367): n is a, c, g, or t
  misc_feature (388)..(388): n is a, c, g, or t
  misc_feature (400)..(400): n is a, c, g, or t
  misc_feature (403)..(403): n is a, c, g, or t
  misc_feature (407)..(407): n is a, c, g, or t
  misc_feature (410)..(410): n is a, c, g, or t
  misc_feature (416)..(416): n is a, c, g, or t
  misc_feature (418)..(418): n is a, c, g, or t
  misc_feature (424)..(424): n is a, c, g, or t
  misc_feature (447)..(447): n is a, c, g, or t
  misc_feature (451)..(451): n is a, c, g, or t
  misc_feature (458)..(458): n is a, c, g, or t
  misc_feature (472)..(472): n is a, c, g, or t
  misc_feature (477)..(477): n is a, c, g, or t
  misc_feature (485)..(485): n is a, c, g, or t
tggcaccactccatccagaatgggcagagcagctatgaccgccacccagccctcccgctcaggccacagccggagcctccgcattgcccccacccccattttccaggggggttgtaatttataagctgacgaaggtagccagacttccggaggactgaccatctctcactgtcctccccaccttcttcctcactcacacattttttgtacatctgggcccttagtttttattctgtttattatatgtctctgtctctctctattgtgtgtgtgtgtgtgtgtgtgtgtgtgtgtgtgtgtgtgtgggtgcgggagtgccacccccaggnccgtgtcactctctcttttctcctccatgggtgtgtgngtgtgtatctgtctctgagantcctcggggcgnccngggnatntcaggnangggaanggaggccgccctctctatcttgntgcncctcgtnggcactcaggggcnccttnccagtggnagcacgcagagccggggtggagggcgcttgctgggatgtgtggtgtgctggctggctgacggcagaggcgaggaaccccgcatgtctagaagagttgggtcatatttaagcagggagaaaagggagggggtctcccttttcttctcttcttcttctttttcccttttaaagggcccaaaagattccgggtcgttggcaaaaaagcttcctcgggggggcacccggggaagaacatgtgggagggggagtgggcgagggggcatatagggactctccaccatctcggggctcgtggagcgctgacccgtggcacaaaccccagagaggaggcgggggggtccccccgtggagacaagccgtgcgtgcgcggg

SEQ ID NO: 529068 - DNA, 349 bp, Homo sapiens
  misc_feature (1)..(1): n is a, c, g, or t
  misc_feature (3)..(3): n is a, c, g, or t
  misc_feature (319)..(319): n is a, c, g, or t
nanattcggcccgaggggtttttctggctattcttgcctgctggtttccacatgaacttccatgtcaactactgcataagacaatttgtaattttcaaaaattttgataacattacttttataaattcacccacttagaatttacctctttacatttttgagccatcctattcaaagatgattttccttttgttcctactacttttatttctttcagggagattttaaaggtttttaaaaattatatagagtttgcacagttcttactatgtttattcttaagtaggtatggtcatcttctttgggtgtaattgtacangggacttcatggctaaataacccctataat

SEQ ID NO: 529069 - DNA, 195 bp, Homo sapiens
agccgctgcgctgacctcgcctttaccccccactattaaccgtacggggagaacgctctgtgctagataaccacgttctcctgatcaaatttcactcgcctagttacaggatctcaacatactagttcattagcttctttcctgtggtcaaaatatttaccacaacacaatggggctcactcacccaccaccccc

SEQ ID NO: 529070 - DNA, 1191 bp, Homo sapiens
gaaatgatctgctgcatcctacttaaacacctatcagctatttttatctttaaccttatatctgtatgttatgaagtgtgtggggggtagtgtgtgtgtgtgaaagagcgagagaatgatgtcatctaaagttttttgcaagaattatttaggtattatcattagcattaagaattctatcactcccagctttgtatttcatttaaaaaaatatacaaagagctgagtaaatacaaccacatattaatattactccacccattctatttaactgtacagctattattagccacttatatatacttaaaatattcccatgaattatgtccagttcttcttggaaaaaactttggattgagaaatgaacctgcaaagcactcctgcagcgatgagcagctccatacaactggagctccgaaagcatcatactcaggcccaaagcggcctacacccgtgaatctcgtcttactccgccacagcatggtatagaggcgcagtactgtaaatcatagctagaggccatgtcagtgactgtagtagtaagtaggggtcaggtaggggggcatggatatatggcaaaacaaacaacttatggctaatatattatatttgttgccagggggtaaactgtaacctcattgtaagagtctgtgattacctcataggattgatctctctactctgataatactcattggccaagtatacaaccaaggaacaggcgcaatcaaggattacgagcggaagcactgagacacagcacggctcactaacgcaggaaactccaggaagacataaaaatcccggaacgcagagaacaccccacatactacccataccgagagaacagagcgaccctaaccacaacggacgccacacggggaccgaatcatgtcccaaaacaaaccggagggacaccaacgccccacaaaaaacaaaaaggggcgacgcagcaacaaatacccacccaagggacacagaaaacagaaccacaattctcagacaaaaggagccaagaagagagcataaacaaagaacgggaccaaagaaacagagagaacagacaacaaaagatgagaaaaaccgactggacgcgaacccagatacagaggacaaacaatcgtcaacatgagctgaataacaacaaaaaagcaacaacacaccaacacctaccaggaaagaccgaacaga

SEQ ID NO: 529071 - DNA, 252 bp, Homo sapiens
gtccctatgcagctcacagagtcatgagcaatcatggcttctggtggtttcacgcttctacttacggtgcaataggtaactgaaacagaccacaagggtgtgagcctgtggagggtgcatttcccacctgctgaagcttctcaagacattccttcacagctgccatctcctgaggacaggagctgtgcatgccacccgggtatgtctcgacctggaccctggcaggtgtgacaacagaccggagcttctcag

SEQ ID NO: 529072 - DNA, 132 bp, Homo sapiens
agcagtgctgggtcctttccaccatgggcacctgaggaaaggcgaaagtaggtagaggcccgggggcgcccaaacttctccaaacggtggtttcttcccgatggtttcgggagacaaggacccccgagagat

SEQ ID NO: 529073 - DNA, 80 bp, Homo sapiens
ggatttgctggtgcagtacaactaggcttaatagggacatggagcataataaaattaatttgacccaaatagagtaaaaa

SEQ ID NO: 529074 - DNA, 952 bp, Homo sapiens
agcgggcggcccggcggctgcgtactgtctgtgcggatgggaatgtgaatgccccagcgatgcggctgcagcggggccgtgaggagcacgccagcgggaggcggcggctgagtcgtgtgagcatgctgggaagagcaggaaccggggcggagcacctgcatggtctgctggtgcgtgtgcccatcatggcgattcgcaatgaaaagcaccaagtagccccccagttgctgagccacgaattcgtcctgcagaatcacgcggacatcgtctcctgtgtggcgatggtcttcctgctggggctccatgtttgagcataacggtaagagcttctatcattgtgtgttactcttcagtacaatgtcaccctcccagcaagcagaagaacaagctactgacatccagtgtccctttattactatggcatcaaacgatttggctaactgttttcttctacatgctagtggcgataatctattcgatgccgtaactttccaagagtactctgttggctaaaattaacaggcggattgcacttctccaaagactaaaatcacaggcaagttttaatgaattctggtcagccttagctgcggttctacctttttgcctgtgtttgggggcacatttctttctcatctctgaaaactacattttcagacccaattatcttattggacggggctttattccccattaccttgatgacattttcaacatttgacacgtttttcttacttattcaccaggcttggcttaacttggctttcctgctttttccttgaactctactttccagaaaacctaaaaacgaacgatattcctccgtcacctttgtctacattggccttaccttcttccacattgcttagaccttaccttttgaccctgcaatctctagcactgtcctcctgctgctcaccttaatttgttcgaactccttttcacttttccg

SEQ ID NO: 529075 - DNA, 383 bp, Homo sapiens
tatcgaaagtgtctgtacatgtgtgtacacgctaacagggacgttactacccgtgtgtaccaatgccacggagagcaactttatacgtctgagccaatgtcgctcacaagtcgaatctattcccatcacagcctgcttccggcacaggaagaagggatgtggacgatattccaaagaggcgatgctttctagtttctctattatttccaaaacaaaaaagccaaatctttctcccagttttgtttttcaaaataaaaagtaattataaccctgacttgctactaaatgcaggctggagctgtccttaagtaaaagcttttgataaccaattgcctgcactaaatgctattttactgctgcatcttgtctggttgctacccaca

SEQ ID NO: 529076 - DNA, 177 bp, Homo sapiens
ctgcttggactatatgaattgtggagtcggaggaatcttccccgatctctttggactgtgcatcgttatcatccctccatctgggaaaccaggtgactggcagcactctgcatacctccactctcacctaggatagcctgttctggagaggtgggaggggtgataacgatgcatagt

SEQ ID NO: 529077 - DNA, 842 bp, Homo sapiens
cgaagtcttctcccatcagaatttagtgtatcttttaatgttgtatgtctgggatgcaagtattgctaaatatgttagccctccaggttaaagttgattcagctttaagatgttacccttccagaggtacagaagaaacctatttccaaaaaaggtcctttcagtggtagactcggggagaacttggtggcccctttgagatgccaggtttcttttttatctagaaatggctgcaagtggaagcggataatatgtaggcactttgtaaattcatattgagtaaatgaatgaaattgtgatttcctgagaatcgaaccttggttccctaaccctaattgatgagaggctcgctgcttgatggtgtgtacaaactcacctgaatgggacttttttagacagatcttcatgacctgttcccaccccagttcatcatcatctcttttacaccaaaaggtctgcagggtgtggtaactgtttcttttgtgccattttggggtggagaaggtggatgtgatgaagccaataattcaggacttattccttcttgtgttgtgttttttttttgcccttgcaccagagtatgaaatagcttccaggagctccagctataagcttggaagtgtctgtgtgattgtaatcacatggtgacaacactcagaatctaaattggacttctgttgtattctcaccactcaatttgttttttagcagtttaatgggtacattttagagtcttccattttgttggaattagatcctccccttcaaatgctgtaattaacaacacttaaaaaacttgaataaaatattgaaacctcaaaaaaaaaaaaaaaaaaaaaaaa

SEQ ID NO: 529078 - DNA, 2295 bp, Homo sapiens
ggtattctttctaaagtgcaacagtgtaataaagattatttctagatctcaaggaggatctgaatgatggctataatgaagggcctatttaggtaacttttaagtttgaggaataagagaatggggttagtccacttagggtttccgtatttcctcatgttggccactgaccaagtatgaatatagccatctttaggggtgggcgcggtggctcatgcctgtaatccctgcactttgggaggccaaggtgggcggatcatctgaggtcgggagttcgagaccagcctggctaacatggtgaaaccccatctctactaaaaataaaaataaaaaattagctgggcatagtggtgcatgcctgtaatccagctactcaggaaactgagacaggagaatcacttgaatccgggaggcggaggttgtggtgagctgaaatcgcgccactgcactcccgcctgggcaacagagtaagactccatctcaaaaaattaaaattaatattaaaaaataaagccatctttagtatatgttcatttctttgggatgtgcatttctgtaactcatcaatgcaactgcagtgttctatggagcttcaatggtttccacgtattccagtacaagactcaaactcaccaagccctgcaggggacacccaaatcactctgtggatgtacagagggtatctcagccccctaacctatatacatttgacactggcaaacttttgtgtctcatattttcatttgtcaattgttgcttactctactgacaattctctagccaagatcttttccccgagcatcaggatttcctgtgctgaacccactttctagatggcacagggccccaacccttccatctgccctttctcctctttttagcagcaccaaaatacctatcatttggttttttaaaacctgtcacccttgccttctttcttccacataaatcccctatattaagttaaccacccagtcgtgaccatatcataatcactccacgtcttgatttctgcccttcttctccatcccactatcccacatatcaagtgctctcacttcctgcagttaaggccattcaaatgcgtcccactgccaatcactaggtatatagtgactgcaatctgactactgtcattctcttgccaaaaatctcctaacgatttttggagattttttcaatgggtctttatcacagaataagattttagatttgttttccagtcttgttttgggttcctaccagctttctacacattatcaactgtcagcctttgctcacggtgggcccactctgatcgtatctactccccgaaacagatatagctcatttgaagttgatacctaggtatttctacctccccaaatctctggacacactcactaagatagatactacttccccttttgttctgaatggtcgtctaatgctcccacctccaaacaagagcattctatgaaaatccttcccaactattgtatcttatatgcatttctctttgccgaactccctgtaacacacttatgttgggcaacaggtttcatgtgtaatccgtcaaggtaccaaagtatacctagcactactactgaactgtacacatagcaggtgattcttacagataatactagataacctcctgtcacacgatgctcccaaaactgataacaagatgtatgctttattgagaacaagattccaacacttattttgtattgtgtattcttgaatttttccttccgtctgcctctcaattcatgcatatgtaagtaaagtccaagttgactgctgaaaggtgctcctaccattattgatgtttgtcatcctttctttctcccttaagatcttttctgcattgtttcataattaatgtgctgtcttctaacatgtatcagttgtctggagttgctggaagacaggagcacctcatatctaccccacgctggctgtgtttatcttcgatggagcaaatccttgctggacggagcttatattccatgccacccagacctactgtagaatcaattattcctaatctatgactcgagcgtctactaactcagctcaagcaatctaggcccttcacaaatataacaatgacataatctcttgcaattaatttatggacttctgttgtattctcaccactcaatttgttttttagcagtttaatgggtacattttagagtcttccattttgttggaattagatcctccccttcaaatgctgtaattaacaacacttaaaaaacttgaataaaatattgaaacctcaaaaaaaaaaaaaaaaaaaaaaaa

SEQ ID NO: 529079 - DNA, 1520 bp, Homo sapiens
cgaagtcttctcccatcagaatttagtgtatcttttaatgttgtatgtctgggatgcaagtattgctaaatatgttagccctccaggttaaagttgattcagctttaagatgttacccttccagaggtacagaagaaacctatttccaaaaaaggtcctttcagtggtagactcggggagaacttggtggcccctttgagatgccaggtttcttttttatctagaaatggctgcaagtggaagcggataatatgtaggcactttgtaaattcatattgagtaaatgaatgaaattgtgatttcctgagaatcgaaccttggttccctaaccctaattgatgagaggctcgctgcttgatggtgtgtacaaactcacctgaatgggacttttttagacagatcttcatgacctgttcccaccccagttcatcatcatctcttttacaccaaaaggtctgcagggtgtggtaactgtttcttttgtgccattttggggtggagaaggtggatgtgatgaagccaataattcaggacttattccttcttgtgttgtgttttttttttgcccttgcaccagagtatgaaatagcttccaggagctccagctataagcttggaagtgtctgtgtgattgtaatcacatggtgacaacactcagaatctaaattggacttctgttgtattctcaccactcaatttgttttttagcagtttaatgggtacattttagagtcttccattttgttggaattagatcctccccttcaaatgctgtaattaacaacacttaaaaaacttgaataaaatattgaaacctcaaaaaaaaaaaaaaaaaaaaaaaaaaaaaaaaaaaaaaaaaaaaaaaaaaaaaaaaaaaaaaaaaaaaaaaaaaaaaaaaaaaaaaaaaaagggggggggggggggcatatgggggggcgaccgaacaataagctcgcggcgatcccccccctttctttttagtaaaacaagggcgccacctaccaagtcgagtcgcgtttatcatacataatacaggaggcgaaggcggggccgttctaaaaccaatcgatggttggagaaaacacaccgctccgccgctgcattcttttgggaaagcacccacccctgtgggggtgagaacaacacagggcggcacccaacccaccaagaaatccttgagcgcggacaaatacaaccatgcggtgggttagctgacgacccccctcttaatcttgctcggaacgacaagcttgtcgtcgcgttttttctgcttctatcttttcggcggggctggctggtatacatacaggcgactagaaagatgactgagcagacatcgagatgaatgtcgatgtcgctcagagcatgctgacaggagagtgcagaggtacgtacacgaacgacgatacgagagtagcacgacagacatacacaagatagcaatcacactctacaacgaagcacgaacgaccgcacgcacagcaatgacagcatcaaagtaccaagccagtcatgtactt

SEQ ID NO: 529080 - DNA, 517 bp, Homo sapiens
ttgagcctcctctgtgatgaatcagcctgcaccgcttgttcacttggcatcatcttgaagtagctgaatagcccgcccccaacgcagcgccggcccagcacaacgcccccgactccactcagcatcttgctctgtgcagattcagactgtgctctccattccactgtgagagggctcgtcacgcttgggtgctccacttggcaggtgtaaacctctccacttcgaggaactgtttccagcatcaccagggtctggaaggtccagtctccattctgaatcaggcctgtggacaccaacccagccttctcttcctggctgttccggaaccacctgacttcaatgctgcctggatagaaaccattcacagagcagaccaggaggttgtggtgctgcagggtctgggtccttgcaggatacacagtcaccttaggctcaactcgccgctgcactgtgaagctctcaccaagcccgtagttgtgtctgcagtaggtgttcaccgcggcgcgcctgtcttcca

SEQ ID NO: 529081 - DNA, 944 bp, Homo sapiens
  misc_feature (909)..(909): n is a, c, g, or t
cgaagtcttctcccatcagaatttagtgtatcttttaatgttgtatgtctgggatgcaagtattgctaaatatgttagccctccaggttaaagttgattcagctttaagatgttacccttccagaggtacagaagaaacctatttccaaaaaaggtcctttcagtggtagactcggggagaacttggtggcccctttgagatgccaggtttcttttttatctagaaatggctgcaagtggaagcggataatatgtaggcactttgtaaattcatattgagtaaatgaatgaaattgtgatttcctgagaatcgaaccttggttccctaaccctaattgatgagaggctcgctgcttgatggtgtgtacaaactcacctgaatgggacttttttagacagatcttcatgacctgttcccaccccagttcatcatcatctcttttacaccaaaaggtctgcagggtgtggtaactgtttcttttgtgccattttggggtggagaaggtggatgtgatgaagccaataattcaggacttattccttcttgtgttgtgttttttttttgcccttgcaccagagtatgaaatagcttccaggagctccagctataagcttggaagtgtctgtgtgattgtaatcacatggtgacaacactcagaatctaaattggacttctgttgtattctcaccactcaatttgttttttagcagtttaatgggtacattttagagtcttccattttgttggaattagatcctccccttcaaatgctgtaattaacaacacttaaaaaacttgaataaaatattgaaacctcaaaaaaaaaaaaaaaaaaaaaaaatgcgggccgaattcgagctaactggccatttcgccctataggggtcgtataacattcactggccgcngtttacacggcggactggaaaccctgggttcccaa

SEQ ID NO: 529082 - DNA, 391 bp, Homo sapiens
tatctcaacagtcattacgtaaaataagcatctaccaagatcttgtactccagaccacttggcgtgttagctgtatttctaaaatacacatatcagaacaagatgtcaaaaaaatacccaaaaaacataaagtaaggaactaggggtgtttactatacctatatgtacgtgaaagctaccttttgggttgggcgcagtgggtcacgcctgcaatcccagcggctttggggaggcagaggcaaggtggatcactggaagtcacgagtttgagaccagcctggccaacaatagtgaaaccctgtctctattaaaaaaaaattaccaacaaattagctgggaatggtggcacacacctgtagtcccagctacttgggaggctgaggcaggagga

SEQ ID NO: 529083 - DNA, 236 bp, Homo sapiens
  misc_feature (23)..(23): n is a, c, g, or t
  misc_feature (29)..(29): n is a, c, g, or t
  misc_feature (178)..(178): n is a, c, g, or t
  misc_feature (218)..(218): n is a, c, g, or t
  misc_feature (235)..(235): n is a, c, g, or t
tagtcccagctacttgaggaggntgaggnaggagaacggcgtgaacccgggaggtggagcttgcagtgagccaagattgcgccactgcactccagcctgggctacagagcaagacgcgtctcaaaaaaatagatagatagatagataggtgatagatagatagataggaataaagaantgttaaagtgctttagcacaggacgtagcttcagtccatngctacctcccttctttnc

SEQ ID NO: 529084 - DNA, 380 bp, Homo sapiens
  misc_feature (21)..(21): n is a, c, g, or t
  misc_feature (165)..(165): n is a, c, g, or t
  misc_feature (177)..(177): n is a, c, g, or t
  misc_feature (181)..(181): n is a, c, g, or t
  misc_feature (273)..(273): n is a, c, g, or t
  misc_feature (294)..(294): n is a, c, g, or t
  misc_feature (299)..(299): n is a, c, g, or t
  misc_feature (307)..(307): n is a, c, g, or t
  misc_feature (310)..(310): n is a, c, g, or t
  misc_feature (375)..(375): n is a, c, g, or t
tccgccatctctgtggcccgnaccctgctggtctttgaagtgaagaagcccttcctcttcgtgctctgggaccagcagcacaagtccctgtcttcatggggcgagtatatgaccccagggcctgagacctgcaggatcaggttaggcgagcgctacctctccagnctcagctctcangtangccctgctgctgcctgcctggacttgcccctgccacctcctgcctcaggtgtccgctatccaccaaaagggctcctgagggtctgggaaggncctgcttctattagcccttcntcatncctccatnttntccaaaccactttttgcagctttctctagttcaagttcaccagactctataaataaaacctgacngacgg

SEQ ID NO: 529085 - DNA, 484 bp, Homo sapiens
tagccggtaccggtcacggcatgactgcactttgagtctgcttcagctgtccatatacaaatgcctaaaggtctagtgtctttggcttccatggaggaagcattctcactgccactgtcccacttaccccctttaaccacctaaggattgccacatgccccggcctgggcccaggccagcaggcattacagctggactgtgggctgtgataggaaggaagggccatggccgtgcatccacagttgaattctcactcctgggaccctgtcactgctgggacaggcccgaggatgccaactgcaggtgcaggaccccatagccatggctgggctcccctctccatgcacagggtggggcctctgccatctggccccagagtgtcagtgtacccagggggcctggacatccgtcagggtgggggcttggtgggcacctgggagctgccaggagacaggggagctctccttgacggtcgggggtccat

SEQ ID NO: 529086 - DNA, 231 bp, Homo sapiens
cctcagcctctggagtagcttggatacaggcgtgcaccaccatacccagctaatttttcatttttagtagtgatggagtttcaccatgtggccaggctggtctcgaattcctgacctcagatgatctgtctgccttggcctgccaaagtgctgggagtacagacgtgaggcactgcacccagccaaaatacatcttttattgaagtataaagcgttgaggggtaccgagct

SEQ ID NO: 529087 - DNA, 405 bp, Homo sapiens
  misc_feature (145)..(146): n is a, c, g, or t
  misc_feature (149)..(149): n is a, c, g, or t
  misc_feature (170)..(171): n is a, c, g, or t
  misc_feature (179)..(179): n is a, c, g, or t
  misc_feature (242)..(242): n is a, c, g, or t
  misc_feature (266)..(266): n is a, c, g, or t
  misc_feature (279)..(279): n is a, c, g, or t
catggcgatgctggtcctagtacccggacgagttatgcggcctctgggtggcaactttggcgcattcttgcctcgcggactcgagttttggggcccagcgaggggactgcgagagtcttgctgaggcagttctgcgcgcggcaannganggcgtgggcagtgcatcgggnncccatggntattgcatgggaaccggcccctcagcactgcgaggccgccacccccgtggtcagcagaagggncccggagactccacgcagccctcngaagcccgggccntgtttcctggaagtctttagcaatcacatttgctattggaaggagctttactggctggaatgaagcacgtcaaagaaagaaaaggcagagaagttagagaaggaacggcagcgacacatcggcaag

SEQ ID NO: 529088 - DNA, 996 bp, Homo sapiens
gcctgacaccaccgttgcttcgcgggctgggagtgcccggggtccccgggcgaacagaggctgcgtggtgggagctttcgctgggcgctgcagagctgtgtgcctgtgtgtggatgtgccggtgatggagcccctgcggatgtggacttgacgcctgcagtggtccgagctagcctggctcctgcgcctctcctgcgtggatccagactgcctcctgtgggctgctggcggcgggtctgaggctgtgcgcgtgccaatggctcacctcctgtgggatttgccaaccagcactctcgaagtggacccttgaggagctcttcaccaagctcgaaccgcattgggcaaggggctcgtattggggacggtcatacagaggggcacatcgataaggcacacaaaggaggctggtgcgccattcaagaatcatcggacctgggacgggaggccgaggcatgacgatcggaggcacatccaggcaggagattcacggtgtaccctacaaggtcagatgacgacaagaccccagtacattcagccctgctaacgtcttgggtccgtacgcgtacgactggagcaacgcaaagcttattgggattcaattcattgggaggttaccgtaggggcatggcagtgctacaacgcacactatggactttgctttacaacgcagagggtccccccttggcagcgaagaaccatacccatttggtccgacctgagtcccttggcgaggaaggatatcttgacatgggccatggcattccacttcttggggacgatcccggagacggccacaaggcactacgcgaccccggaagcgacccacttccgagacaggacttggccacaaccaggtgggctaaccagtccttcgggcaagcaccacgggggattgacggttggaaacgccctggacccggggaccgctgtctggaggggtacagaccagggggcgcacgcatcccagcaggaacagacgccgagcgattacccggg

SEQ ID NO: 529089 - DNA, 185 bp, Homo sapiens
ggtacggacccagtgatgaacggagtgctgcaagatgaatcccgtggccatggggatccggccttcgggaatcttagccgcggccactgctgtttcgattcgatgtggtctgcgggcagctgggcgggcgtggctagggggtgtggtcaaacgctcgcccgggcccagcggctctctcctcctcg

SEQ ID NO: 529090 - DNA, 519 bp, Homo sapiens
  misc_feature (107)..(107): n is a, c, g, or t
agtataataataataaaattaaaaaaaagaaaagaaaaaaaagaaaagattttaaggttggacacagtggctcatgcttgtaatccgaacactttgggaaggcaagntgggaggattacttcaagctcaggagttgcagatcatcctgggcaacatagtgagacatcatctctactaaaaatttcttaaaaattagctgggcgtggtggtgcacatctgtagacccagctacttgggtggggtgagggagtggactgaggtgggaggatctcttgagcctaggaggttgaggctgcagtgagccctgattgtgccactgcactctagcctgggcaacagagtgagacctcgtctcaaaaaaaagatttttaaaaggtgatgtatccatgcaatggaatagtattttgcaataaagaggaatgaagtacagtgtgtgatccctggtacaacatggatgaaacttgaaaatattatactaaagtgaaaggagacagtcacaaaagaccacatattgtgtgc

SEQ ID NO: 529091 - DNA, 458 bp, Homo sapiens
ttttcttatgagcatgccagtgtagggtcgacagagagggttataatgacggggaggttgattgttgtttaatctgctggaagatgttgctccagtgttggacctaacacaacctgaagcggggtgacaggtttggaaaaacctttttcaaacaggggccttttttttttttaacagagttggtaataaacaaaggtgaggagggcttttttttccacgggattgtcccctccagggaaagccgggctagaaaactttcctatttgggcttctggtgtaaaactactaaaaaaggtccttggaccactctttgagcaccgtagggcactgtgttcttcctcacaagctcccacgcgaactggaaaattacccggggattcaaaccaagatgtgtgcatatggaagatgccataagattgtgtcaggacgaccggttataccaggctagttaaggaacg

SEQ ID NO: 529092 - DNA, 230 bp, Homo sapiens
cgcggctgccgccgggaaggcacatactgggacagcgccctggccgggagatattcagaacgccaagtgggcttgctggttgaccacaccaccccgctccaccaaggccttgttagatgcttttgaagtttgcgcgtagagctcttgctagccagggcgtcagaactgcagaggcgtgccatgccgctctcggtatccgcagctgcagtcctctactaccaccaggctgt

SEQ ID NO: 529093 - DNA, 120 bp, Homo sapiens
ggttctcaatcaccatctcctaaggatgagtcagccagagccggcaagaaaatcccgtttctcagatccccacaaagagcgacttttgcaagagagaggaggcaattctcagatctcgga

SEQ ID NO: 529094 - DNA, 202 bp, Homo sapiens
tgatatgtgtctcacagacccacaggatgggggctaagtgtcaggacatcgcagctatcattctgaaacagctatgcagaccaggaacagtctcagcctgtgcttggaagctcattccttggtctagcttttttctttcctatagaacaaaagcagtttctggacaactcatctaggtttttgtttctgagacaggatatca

SEQ ID NO: 529095 - DNA, 585 bp, Homo sapiens
gggctagagtgaatagcatgatctcagctcactagaacctcggcttcccaggctcaagagattctcccacctcagcttccaggtagtgggactacaggcgtaaacaacaaatctggctaatttctggttttttgggtagagatgaggcctcacaaaatagcccaggctggtcttgagctcctgagatcaagcaatccacccgccttgagctcccaaagtgctggaattacaagtgtgagccatcgcacccggcccctttctttctttttcttaacattgcttaagtatcgtcctcctttctttatcttttatgtaataaccataaatattgcttctatatatgttataaactgaaaaatgcggtgttatacaatcttatgtcatttaaagaagatgagataaaagttctatggagtcatttatatctgccctcatatttattatatctggtcttctcacttcctcctgtgaactcaagtgatcatctagtgtcatttcctttcagcctgaagaacttccttcagtttttcttgtaaggcatgcctgatagccatttctctctgtctttgtgcccgtcagaacacc

SEQ ID NO: 529096 - DNA, 247 bp, Homo sapiens
  misc_feature (8)..(8): n is a, c, g, or t
taacgctnttatacttctcaacgctttatacttctcacagctttatacttcctcagggctttatactttctcaacgcttgagacttcctcaacgcttgctacttcctcaacgctgctacttcgtaccgggaaatgaaatgggaacgtactagcgcgttgaggagagtactaagagcgttgaggacagtactccacgcgttgacggggtaccgacgcacgaacttcgtaactcactggtcactacgct

SEQ ID NO: 529097 - DNA, 318 bp, Homo sapiens
ttctcaaactcctggctcgagtagatctagccacctcagcctcccaagagtgctgggataacaggcgtgagccagcgtacccgggccattctgtgtacagctttgccctaagttttactcgctgtctgcagtgcggatggagaggagccacagatgagagctcaggatcctttctcaggtctattctgagaatgtgctctgcactcagcagagatgccccttacacctggctgtgtaagtcccaagctgagcttggtgtagcaaatgagcacagagaaatgcagggtcaactgtggagagtcatgcctggaatcccag

SEQ ID NO: 529098 - DNA, 341 bp, Homo sapiens
tcccaaatccctgcaagaccttatgtcctaacttatactgctaatttatttatttagtttgtaaagagtgccctccaagttgtatcagcttcatgccaacaaaacctgaccctgaccctgtttactgccattttcagtcatcagttatctgctaactgattgtccagtttcagctttacccagggcaactcttgctctcagagtatagttaactattttcctagttgtctcccagttcgttttttgtttttgtttttttagctttgattttagaatcgggataaatgtgcagggtttgttacaaggcggtattgggtggatgctgggggttttgggtacaa

SEQ ID NO: 529099 - DNA, 213 bp, Homo sapiens
  misc_feature (1)..(1): n is a, c, g, or t
  misc_feature (14)..(14): n is a, c, g, or t
  misc_feature (54)..(54): n is a, c, g, or t
  misc_feature (60)..(60): n is a, c, g, or t
  misc_feature (64)..(64): n is a, c, g, or t
  misc_feature (71)..(71): n is a, c, g, or t
  misc_feature (76)..(76): n is a, c, g, or t
  misc_feature (85)..(85): n is a, c, g, or t
  misc_feature (101)..(101): n is a, c, g, or t
  misc_feature (108)..(108): n is a, c, g, or t
  misc_feature (117)..(117): n is a, c, g, or t
  misc_feature (122)..(122): n is a, c, g, or t
  misc_feature (149)..(149): n is a, c, g, or t
  misc_feature (157)..(157): n is a, c, g, or t
  misc_feature (196)..(196): n is a, c, g, or t
  misc_feature (199)..(199): n is a, c, g, or t
ncagtttttcaaantttttattagttacattggcaatttcaggttttaacattngttggnaaanttccaantggangaagcaaantcaggggttaagagangaaagancattttttngcctntgcctttattcccacaatttcgcaaangggcattnttattctcacgttccacgatgatgcactcgaaataattnggntatttatccccccc

SEQ ID NO: 529100 - DNA, 275 bp, Homo sapiens
tttgagccttaccctagtgacatgtaagcctcatgtcaagggagctcatgcagatagtagtgaaatcaggtctggaaatttaaaaataaaaggcatgagactaaggctatcttgcttccctttatgcccttgactggccgagggtgagggagtgagaggcaaggccgcacatgagggcatccgcagcataggacgttgggattgtgctgcagttgaggagaaatcccggtgaactgtatctgacacagaagattcttatttgcacttgtattgta

SEQ ID NO: 529101 - DNA, 333 bp, Homo sapiens
ccagttcctgcttcttgaaaagcccgatgagatccaagagagcccttctgagctaccacgcatcgaagatccatcgtcagagtcctaatatgaagaacccactgaacaacttgagaatcatgttgaagcttaacccatatgcaaagaccatgcgccggaacaccattcttcgccaggtcagtattcacaagctccgggtggactaggcagctgctgcatcatcggcactacaagccacttcagattagaaggcggcggttgcaggcgagaagcctgtggtaggttagaaaggatgtaacgctgctgttggtttcaagcaagcaggaactggcc

SEQ ID NO: 529102 - DNA, 463 bp, Homo sapiens
aggatgggaaaaaaaaaagtgcccacatggcgacaggcagggccccagtacatctctaccacccttaccctggacagtcctacattcccagaatcaccacacgccaccagacagctataagtactggcgtgggatctatacatcagcatcctccccctagtaacctctaccctccacagatccaccctgtgctcctctcctcacctctccccctccactacacattcttactcaagtctccaagaccttaaggctggatggtgccacaagagaggagggtcagtttccctcagggaaccaaaaaactggcttgcttggcacccaggaccagaagctgtttggctctccacccaataacaaaaaacaaatccctgccctttcccccaccccactagctaagcaagagcagagctgtgatgccgagccagtgccgggtggctggtgcccagggctgtacaccgtg

SEQ ID NO: 529103 - DNA, 313 bp, Homo sapiens
gctcccagaagaaatacatctaaaaagaaccatcctcagaagacatgccccacaagaactccacccacggactcatacagagaataaatgcatccgagaagcatcccagaaagttgccacggaagatggtggcattagactgtgagcatggtgggcacaggaccaaaggggcatgttagcttcccttggctcgaatgtagcatatgacaacatacaacggggaggaacggtctctctacttttaaccagtgaaattgacctgcccgtgaaaaggcgggcatgacagagcaagaagagaagaacctatggagct

SEQ ID NO: 529104 - DNA, 107 bp, Homo sapiens
gcggccgcctactactactactgctcgaattcaagcttctaacgatgtacggggacatgccactgcattccagtctgggcaacagagcaagacttggtctctaaaaa

SEQ ID NO: 529105 - DNA, 827 bp, Homo sapiens
acgttgctcaggctcatgtctgcgagccacggataccctgatccagagagaatgtcccctgatggcatggagcccgagggcgtgatcgaggagtagcgtggcatgagcatttgttgacacgcttggatggacatgaacctcttcggagtaccttctccgtggcgattctagcagcttatgattgggatgaatccctctgccgttccagcaacgacggcattctacctttgtctcaggggtgatgatgtgattgctcaagcccaatctgagactgggaaaacggccacatttgccatatcaattctgcagcagaattgaattagatctaaaagccacccaggctttgtgtcctagcaacccactcgagaattgggctcagcagataccagaaggtggtcatggcacttaggagactacatgggcgcctcttgtacgcctgtatcgggggcaccaaacgtgcatttgctggagggtgcggaaactgaagatggaaggctccccaaaatcatcgtgggtacccttgcccgtgtgtagatatgcttacctgaagatacttgtccgccaaaatacattcaagatgtttggtacccgacatgaagctgacgaaatgttaagcccgggatttccaggacagatctatgacatattcagaggtcacagaaacagcagggagtttggcggtcggccacatgctctgagtgtggaggtgacaaaagtcagaagacccaatcgttcttgcaggacgaaggtgcctgggggtacgcaatcacatcaggacacacactgactgacacttgttgtgtgacgcacacaggctttaaacgggg

SEQ ID NO: 529106 - DNA, 206 bp, Homo sapiens
gtgacccacgttcgacacatggcctgcggaggacctctgcggggcatctacgcttacggttttgaaaaccatcagcaatccagcaacgagcaatcaaggcaggatcatcaaaggggagagatgtcatcgcacagtctcagtcccggcacaggaaaaacagccaccttcagtatctcagtccccccagtttttgggatattcagggt

SEQ ID NO: 529107 - DNA, 620 bp, Homo sapiens
gcacgaggtggtgagcaggatggctttctacacccacctagcatgaaaagacatggaaggcaggaataataaattcaaagagagctccagagcagggccaaattcttcctcagctaagtccgtgctccattcccatctatcctactgagtgctttgttatttttctgcagcccagagcagaattcagtccttcactgttcagaattcacgaaacagaaaggttattgtatccaaattgtcaacagacagagctaatttcaacctcgccagcaactgggaaaacaaattatgacagagaaaagaaatggatatttgcagtttgcttttctaggctgttcctaatgtgggtctgatctgccatgagactgtcacacagctttccttgtggcacagaactgatcctatggatgaatgaagacatggctcagataacatttcatgggtctctaggcaatcccgttgcctacttgtcaccatgactagaaatatactggctgctagggtatgcctaacacctgaatgctccaggaacaaatgtccctctgatttggggctgacacttcattcattcaccactcatttattaggtgtctattaagtgtactgggtgctggggacac

SEQ ID NO: 529108 - DNA, 843 bp, Homo sapiens
attggttataggtttgtaacagacggtaagttacaatgaagtcattagggtgacccagtgtgactggtatccttatgaaatctagaaaaattcgcgacgatcgacatatacacaggggaagatgaatgtatgacgatatcacagtggagattgctcagtgctgaccctggaagacagaaagacttgaagctagtgagagtctgtaaggccaaggagactgcccaaagagtggatagttcccaccagaagaagctaggcagagtagccaaggtaagtgattgtactcagaatctcagaggttgcggtggccctactgagtaccttgtattttgggacgtgtagcctccaagaagcttagagacgaactagtgtctcttgtgtagggtaagccaccgagttgagtggtactttgtgatggcggatctgcctgagtagaaatgtatgaggaacatgattgcacgtggttctttaggactacttgatcacagaagttgtttaccgggaacaacatgagatatctcttagcatgggagtataggctcctcagcctattgtttcctgactgattattcctatatagcttctagcgaaaacaattctaaaggtccaacgattgaagtatcccccacataaatgcatgttctcaatctttgttttgatgatattgccttgccacatgacttttaggcagctttaaaacttttatggaggcgcaaggaaaggctcttattggaaagggcaataatctcactgggattaacggttaaagggccttgggttgacttagaatcgtccctgtggaacctttgtggcaaagatggagaaaaaggttctgcaaataat

SEQ ID NO: 529109 - DNA, 672 bp, Homo sapiens
ggctccttccgtataattagttttacatatacaaagttcacaacagttttcatccctctaccacgtttacctttacttactgtggctgtcttcagcctttcctctagggcagcggtgtcacgcggtagtgtgcgctgcaatcaccttgctaaacacagatgctgctggggcccacccaccagggcgcctgagccagcaggcctgggtgcagcctagacacctgcatttccgacaagctcccaggtggaggctggggccgctggtccaggagccacacttggagaacgatggatttctgtcaatagcaatttcagccctgctatgtcgttggttgctgtttgaaatgaattggtttggttctgacactgtttcggttctgtttgcttcctgaggtctgacatcttattttcatttcttagtcttatacgttgttgacatttattttattgaattcatgttcttatcaaactgttctcttaggcaaagcacaggaatattttctttttctgtccacgagctgtgcgtcctctgccttccgcatgtttatcttgcgcatgctggggtcccttctccagcactgagtcacgggtatctctgtgggacgtttgcttgtacttggcctccccttcctgctttccttctcttcagccgagggtctaatggtcccttttt

SEQ ID NO: 529110 - DNA, 807 bp, Homo sapiens
tgggctttgacccaggattaaaaactggaacggtgaaggtgacagcgtcggttggagcgacttcccccaaatttcacaatggtggccgaggacttggatggcacattggtggttttttttaatagtcattcccaaatatgagatgcgttgtacaggaagctcccttgccatcctaaaagccaccccatttctctctaaggagaagggcccagtcctctcccaagtccacacgggggaggtgatagcatggcttcgtgtaaattatgtattgcaaaattttttaatctcgcctataatacttttaatgggtctaatttggaatgatgagccttggggccccctttccccctttttggtcccccaatttgagatgtatgaagggctttgggtctcccgttgggagtgggtggaggcagccagggttaacctgtacactgacttgagacctgttgattaaagtgcccccctcaaaaaaaaaaaaaacaacaaaaaaaaaattttgttggggcgcccgccccaaaaaagttttaaaaccatctcgcgggcgcccggagccaagtagtgtaggacactgcgccgaagttgcgccagaggacccgggtcacgaactggccttgttcccccaaaaaacccagggacccggctgttggaccaccagggcttcgggtcacggtcacaccggccccgtcctatcccgcccggcgctggggaacaaccatgcaacaatacacacaagccgcaccagaccaccagcgacaaggcaccagacgagtagatccacggaccgagaggagcactccaggcgcg

SEQ ID NO: 529111 - DNA, 264 bp, Homo sapiens
  misc_feature (146)..(146): n is a, c, g, or t
  misc_feature (155)..(155): n is a, c, g, or t
  misc_feature (220)..(220): n is a, c, g, or t
aaaattgcaatgtctgagctgaaaaatatcactggatgagattaatggcagcatagaaattgcagaagaaaagactagtgagcttgaagacacagcagtggctcatgcctataatcccagcactttgggaggccaaagtgggaggntcacttgancccaggagttcaaaatcggcctgggcagcgtagtgagaccccgtctctacaggtaattttttaanttggccaggtgtgttggcgtgcacctgtggttcccagctaatct

SEQ ID NO: 529112 - DNA, 159 bp, Homo sapiens
  misc_feature (72)..(72): n is a, c, g, or t
  misc_feature (94)..(94): n is a, c, g, or t
  misc_feature (121)..(121): n is a, c, g, or t
cggcacgagagagagcgccggaagcggtccgagaatgaagaccttcaggagcacagcgggccgaggccttcntgagggccttcctgaagcgcanacgccccgcatgagcccgcagcccgcnaggaccagctgcagcgcaaggcggtggtcctggagtac

SEQ ID NO: 529113 - DNA, 379 bp, Homo sapiens
ggagctggtttactcagttggtgttttgagtgcagaggaagcagtgaaagatgagaggaagaatgtcagggatgtgaggggagtagagcgagagagagaagacacttggcaggaagaagtagttgaagtacccggggatgtttagcttgaagaatagagaatttggagtgaggcagacgaaaaggcaggaaactttaaaagcaggacgagaaagacctccaggttcccaaagggagcatggcaccttctcaagggggtgaggttgacagcattaaggagagagagggagagaaagggagagagagagagagaaagagagagagcgagagagttgtcaaggaagggaaggacccatggaggggagaaacacaggctccag

SEQ ID NO: 529114 - DNA, 292 bp, Homo sapiens
tggcgactctgaggatcccaccaagtgcaactggccatctgaggagatgacctacatcactcacgaatctgggagatgaccccgctagagcacgctgtgtaattccatagtttagtctcatctcctgtcagtttccacatcatgattgtcttatctcgagaggcggagaggatcatgtccgggatctgaggggtcctagcgatctgggttaccctgccgttgtggcccttgagggtgccacgaagggtcatctgctcagtcatcctcgtcgcgactgggacccaccctgggc

SEQ ID NO: 529115 - DNA, 1357 bp, Homo sapiens
ggtccagagcagagtcaagtgagcatgagctgaccgccagaagtccccttctcgctcctgctggggccccagctgtgaccccttccgcgagctggtagccgaatagcctgcctcttcggaccaggccgttcgaggtatgcctctggcgtctgtctcgtgatggagtggtcgcggatggattaggcggcctgtgcgtggactctggctactgtgcgggtcccctcgtgtcgcccgcgcccgtgcgactcggagaggcgccctgggagtgtgacgatgcccgctcttacgagtgctgcgcgctcaggtcgcgccaactcaggacaggacgtggggatcgtacgtgtagaatacgcaggcaagcaacgtagcgcgtaccctgccttgcgtcctctttgatcaaccattggaacttgttccactcactaacttcgactcgcccggtgtaacgtatgtcattgatcagagtacaaggacccaagggaattggccgcttggctggggagaattcacccgtgcaagggcacggaaggaagacgggccgagtgaactgagacagtggggctacagttctccccgggtggcttcacggcgcgcaatatacatcgtcctggtccccccccgtggtggttggatccccgccaggcgcaaagtttttcactacccttcccttgttcccccccttgagtgggcacaacctgcaacgcgtggaagcgtcccctcatgcccaaaagggttaagaccaacggcaagtccaaaccgaagatacaaccaatcccccaggtcaacactctcgaaggtcggcgggcccccaagctttggtggggcccagtaaaagcttgcaaaaaatcccgaattgagaactttgccggccaaggtaaaagacccttttaggcccggggaatgcccaacccccctggttgccggcccaccttggcttggtgcccttccccccgcgcacaacccttgttggtggtttcctttgtggattaacccattattattctctcttggtttttttccttccaaaatttaaacgggtgtccaaaaggcacagcccaaacccctttggttaagcaaatgacacgccatacaagaaagaagagcctctcggagcgaccactcaatatgttccgggggtgccggggacgaacaaagcagggcttcgtgcgagaaacggtgcggccacgtgtggctcacacataaggccggtgtttccctgtagaaccccgaggtttttcttttgtgtcccacacagggctgtgggtaaacaactgtggacgcgggatctcccccaataatggaggaagcgcacgtaataaaattttccagaataaagcgcagggtaaaactcgcatga

SEQ ID NO: 529116 - DNA, 319 bp, Homo sapiens
ctgagtagttagtcctacatgtcaggagcacatgtactatcagcgcaactgcaatcactagatatcacaacattctttgagtacacccttcatctgctgatgtaagagctgctactgggactagactagctgcggtctcagaaaacatggactgagtttcaatatcaaataagcaattttccttatatatatattaatggtcacttactccagcattgctgtcttttactctccagcctttggcccttcttatcaggatgaaaacgcttctgtttggtgtctgggccctgctggccttgatccttatgcccaggtgagg

SEQ ID NO: 529117 - DNA, 122 bp, Homo sapiens
ctctatatggaatgtataggaggagaagctatagctcattccatttatagatgtgaaatcactacctatcgacaggaccaattacgagttcatgtataagtgtgatggtgctttgtaaatga

SEQ ID NO: 529118 - DNA, 220 bp, Homo sapiens
accagatgaggttcaccgcgcctggctaagtctttgtgtttttgttggagatggggtttcgccatgttgagcaatcctccccacttagcctccccaagtgttgggattgcaggcatgagccactgtgccccgcctctaattctacttatttgaaatgccctagtggataaatctacagaatgccatgaaagtatgattcacggggttgcctagggtttgg

SEQ ID NO: 529119 - DNA, 306 bp, Homo sapiens
tgacatctccgcttaccattcagttgctacattcttttaaggcacctattctgtctccaattaagatagtacttaattagtaaggggattttaaattcagaagataaccggaaccattttttttaagggtaaatgctttagcacgggccataatagcaggcaatctagcacattgcctacattaaaggagccttgcccaaaggtgacacagtctctcccgagatccatttttcggggagccaggaggatcacacagctttaggaagtcagaggggaatcacacaaggcagagaagctaaggttgca

SEQ ID NO: 529120 - DNA, 81 bp, Homo sapiens
  misc_feature (42)..(42): n is a, c, g, or t
ggctctccgaggttaagggccacggcaagaaggtggccgacncgctgaccaacgccgtggcacgtggacgacatgcccaac

SEQ ID NO: 529121 - DNA, 180 bp, Homo sapiens
gcagtaccgtgatgctgatcaggataatactggaatccctgggagacggaggtgcagtgagccaagatcacaccaccccaccatactccagtcctaggcgacagagctagtactccatctcaacaaaaataaatacaaataaagataaaaaaccaaaaaaattccaacctcctggttggg

SEQ ID NO: 529122 - DNA, 197 bp, Homo sapiens
  misc_feature (84)..(84): n is a, c, g, or t
  misc_feature (88)..(88): n is a, c, g, or t
  misc_feature (99)..(99): n is a, c, g, or t
  misc_feature (102)..(102): n is a, c, g, or t
agatgtcgaagggaacgttcagctggaaactggagataaaataaactttgtaattgataaccattaaccatactggtgctgtangtgntcgcaacattntgntgttgaaaaggaaacaagccccttgtcaggggagtagttttgtgccatgaaggaggcatttggctttattgaaagaggtgatgttgtaaaagaga

SEQ ID NO: 529123 - DNA, 473 bp, Homo sapiens
  misc_feature (38)..(38): n is a, c, g, or t
  misc_feature (466)..(466): n is a, c, g, or t
tccaggactcacaattgctgctgtgcccccttacgggntgctgaaaaaagttaagtaagatcaaatgagtttgtatctggaaaacatcatgatgggaggttgaacttggtggtataagggtagaaaattgtgatatctttccttcccatagaaggcggacagctaacactcttaaagcacaagacaggttaacaaaagaaaagcataacaaatctatttaatcaaagttgtgtgtgacacaagagccttcagaagtgaaggtctaaagatccaggggaaactgtttttatgtttaggttggataaagaacggatagccatgtagaactgtgattggacaggttatgatctaatggtaatagactgaaggggaaaccccgcaagacctgtctgttcaggttcttcttggtctctctgcatagcattcctttcctgtccagtagaggttaggacacctgttacatatnacggtgc

SEQ ID NO: 529124 - DNA, 450 bp, Homo sapiens
ctcgtgcatgtcacatggaagcctttctccacttgctgaccttcttcgttctcgttggcctattcgctactatcaccatcgatctgcttctgcgggatgatccgccgcggtgccgccgttcggccgagtctgaggagatcgctcgtaaactcagagctgccagcatgcgaaggcttggcactgtgcgatcgatttgtcaagatagcacccatggtggtagtggacattgtgggctacgtggaaacccctcgaaggctccggaccatcaagactgtcttttgctgaacacatcagtgatgaatgcaagaggcgtttctatcagacttggcatacatctaagaagaaggcctttaccaagtactgcaagaaatggcaggatgaggatggcaagaagcagctggagaaggacttcagcagcatgaagaagtactgccaagtcatccgtgtcat

SEQ ID NO: 529125 - DNA, 387 bp, Homo sapiens
  misc_feature (317)..(317): n is a, c, g, or t
taaatctcgatagttgtgcattagagcatctctatttactaccatcagcacatttggtacttgtcacctttagtactaggcaaaagtcctaaaaatctatatatcatttcttctagggaaagtaaattgaaatgcacctggtttataagagactcattcttctaaggctcaggaaacaacactgcttcccatttattgcttcacacttcttttatatatagtgtcagaattattcccagtcctaaatcaaggaatattggaacattgttagtttctccaatgaatagtaagtaagcacactgattaagatgcatctnactctagtgaaaaatgtcctcaattgatgtctcttcttattgctattttttatttggcatttctgcctac

SEQ ID NO: 529126 - DNA, 428 bp, Homo sapiens
aagtgccaaggctatgcagatcatccttctctttgtggagcacatagtggggaaaacaattgaaagatatttgcacctatcaatcaataacactcattacaggggaagaatgtggtagtatagaaaatacctagcctaatttgagaaaggttgctttggagtcaggcatataaaccctccctgacgaagtatctattacactgagacagaacagacagattttagccagatattacaggcaaaaaaatgttgcaggttgaagaacaaacatcttgtatgatggcctagtgggaagtttggaaagtgaaagtccataggctaaatgtgaccttatgatgtttcatgtggcccatacactgtttcaaaaaataaaatcacttgaagaaaatcaagaaaattaacatcaatcagattcatggcttgtcttt

SEQ ID NO: 529127 - DNA, 466 bp, Homo sapiens
actggttgggtgagtgagataaccaccgcactccagcctggggtgacagagtgagattcatctcaaaaaaataaaaaataaaaaagtttagagcaggaatgaaaggaagcaaagtacactgggaagagggtcaagtgggcaacataagagatccaagtgccctgttcagccttgggctgggggttaaatacatgggcatggttccggggttggtgtttttcttcccttaattttccccttggggcaggctgtctgcatgcacagtgacctgccagcactggggaggggccgcatgtgcagtgcgtaaactgaagttgtgtgtatgctcgtcggaggcatttttctcttaccagtcaagcatccccagaggaaggtcatataccagttaaattcccatttggcctctcagcgcacatgtcggaaccgcctcgcctagctcctgagatctgatcaggaagctgctgat

SEQ ID NO: 529128 - DNA, 1324 bp, Homo sapiens
aacaatatgacctacatatgctagcgtatgggcgtcaaaaacacaccttgaagcaatcggaaagggcgagctggactcgatgtacgagccctctggattctagcttccagccttgatgcagccgagactcgtctctcgaggaggagcttgtcaaacccgacatgaatcatccagtagtatgttccgaaacgacctagttgcgatggagaattcgctcttgaggcataagatacttctgcgtcgtaggaggacatctggcccagattatctggccttcaagcacgtaggaaacctccgccgctttgggatgctgtgattagaatgccagtagacacactctttacgacgagcttcggaggccattgaggtatggtccacattggatgcacgttagactcccttagagggatcgaactcctagggctaaatactccgcccatttgagccctctggttttgtggcgcaaaatactgattgcataacttgggggtggtactttgtctgcgtaacgttgagggatgggactagccttttctggttatcccagtgttgccttgccttggttaacgcattggctattttctcaaggaaagccctttttcaattccacttctacatttgcgaccacggcgggcttggcggccctaatagttcgccctaccggacacagtcgctcggccagtggggagataggccaggaaatttttatcccatgaaattcccgacgggataacgtcgcccccgtttatgtaagttcaaggttaagttacccacagatgcccccttgtggcggaattggacactggcccttatgggaacacttggggggttgggggcacgtgacaccacggacacacgggccaaggagaagagacattttcacggcgttcgtgtctgcgggattagagacggccaggcataacggaaacagcagtagtcttgcttacaagataaattttgggccgccttacgtcggcgctatacaaaggaaaacttttggaacccctagggctgggaccatcagtctgcccacagaggctattaccaaggcggttcctagataccggagcccacgttcctcatggcaattcagcaacacttcctcagggggagtttattccgccaggagcaacagcgcaaatttgggtgcgacgcgactatgtaacacaacgcgagagagttgcttttgataccttaaaagcgaaccgttggtgcagcccccaggacgctcgagagtagacatttttgcggacatggatttggtgtagaatcatgcccccatgaccgtggggccctatataagcgacggtgtgatagcccccaa

SEQ ID NO: 529129 - DNA, 703 bp, Homo sapiens
  misc_feature (233)..(233): n is a, c, g, or t
ggccggtcttctgggctccatggacgggcgcctgctgtccctgcacagccctgccgcagaggtaatggctggcctctctgcagtcagagtgtctgagctctgccatgggtgataggtgtgtgtctttattacttgcagttttctctaacacctgtgtgggctacctggagtgtggtgcctgaatgcatgtgctgctgcatgcctgctgtgaatgtatccccatgtgaacatcncccaatgatggagctggaagaaatgcctcatccccagtctctgcatgtctccagtgatgtgacagcaacctggatgcttgggaactgttctgttttggcatgtgtggtgcgcccccttgtggccattggggtcctttgtgcccaatggcccctggactcgctttccttgtgtggcctctctccatgtgatgttcacgcccatggacccttgtggtgacatgtgatgtaccctggctggggcttgatgtgcaacgaatgggcactgtcatgtgggccgcagtcctggtgcccaatgccccagtgcagggcccatctgctgtgcccactgtcgaaggcacttcccttggctgggtggctctgtggcttcacacccgccggtgccatggcccggctgcccttgccctgccctgatgtgtggcgtcgctttcgccatgcccccttcttagcactgcacctgcaggtccatgctg

SEQ ID NO: 529130 - DNA, 524 bp, Homo sapiens
gagagagagagagagagagagagagagagagagagagagtgagagagagcgcggtgataaagaggctgctttgcagacccatgggtgggattgtcaacagcaagcttgctattcttctacttgcataagaccaggctaatgctcatagccatcactctttatttgatcttatgacctgcgttgggaggagaattgctaaacgtactctcacagatctagagaaagtttccttgtgtgaacaccgtgctgacgtctttttcgatcttaaggttaccgaaagcatagacgtcgggcacagttcccgattcagtttttatctggttggctggcacactcaatctacatgggggtcgtttgtagctattgtacttctagatgcgtaccaaatctaaactggtcgcctttttccccgttcggaatggggagtaattggataactccccggtactggactgttgccaattcatgcttctgcagattggttattgtggatgtggggaccgtccttatctatcttcccgcgg

SEQ ID NO: 529131 - DNA, 219 bp, Homo sapiens
acgagaacgaacattgctggatgggggcatggagatctgtgtgtgctgatgtgggccagactgtcgactgaccctacgccacttttgtcaagatgctgccagataaggactgcctgctatgccctctatgatgcaatctatgagaccaagttccccccaggcagcccagttgtgggggagcctgtattttttttaacaacatccccattcctcaccgtg

SEQ ID NO: 529132 - DNA, 375 bp, Homo sapiens
aaccctcggggattttcaacaggtaaaagctgtattgagctatgatcgtgaacactgtctccatcctgtcgcaacagagcaagaccctatctcttgggagaaaactagccgcactgctattcctcaagataagcggatagtcagtctttataaagactcaattagttattggatatctgaggaagcatgcatatcaggctcccaaaagatcattggttgaggcacacatgttaatagcttggaaatccagaatactcttctggtgaccagctcagacatagtcctgataatataggacctcatctaacatgactccctattttccagataagcatggattcctggttcattcttgttccgctcggcagtggtctg

SEQ ID NO: 529133 - DNA, 344 bp, Homo sapiens
tagagatcctcttattactggtgggaatgtgaaatggcatggacgtgggaaaatagtttggcagttcctcaaaaatatacagttaccatatgacccagtaattctactcctaggtatataatgagagaattgaaaacatatgttcacacaaaaacttgtacgcaactgttcatagcaccattgttcataatagccaaaaaccagagataatccaaatgcccaaatgatgtgtgaataaacaaaatggggtctatccatacagtggaatattattcagccagaaaaaggaacgcagtactgttatatgctgcaacatgaatgaaccctgaaaacccgctaagtga

SEQ ID NO: 529134 - DNA, 592 bp, Homo sapiens
  misc_feature (154)..(154): n is a, c, g, or t
  misc_feature (171)..(171): n is a, c, g, or t
  misc_feature (185)..(185): n is a, c, g, or t
  misc_feature (189)..(189): n is a, c, g, or t
  misc_feature (213)..(213): n is a, c, g, or t
  misc_feature (223)..(223): n is a, c, g, or t
  misc_feature (225)..(225): n is a, c, g, or t
  misc_feature (239)..(239): n is a, c, g, or t
  misc_feature (241)..(241): n is a, c, g, or t
  misc_feature (243)..(243): n is a, c, g, or t
  misc_feature (272)..(272): n is a, c, g, or t
  misc_feature (287)..(287): n is a, c, g, or t
  misc_feature (291)..(291): n is a, c, g, or t
  misc_feature (293)..(293): n is a, c, g, or t
  misc_feature (319)..(319): n is a, c, g, or t
  misc_feature (323)..(323): n is a, c, g, or t
  misc_feature (335)..(335): n is a, c, g, or t
  misc_feature (346)..(346): n is a, c, g, or t
  misc_feature (354)..(354): n is a, c, g, or t
  misc_feature (360)..(360): n is a, c, g, or t
  misc_feature (366)..(366): n is a, c, g, or t
  misc_feature (371)..(371): n is a, c, g, or t
  misc_feature (375)..(375): n is a, c, g, or t
  misc_feature (381)..(381): n is a, c, g, or t
  misc_feature (406)..(406): n is a, c, g, or t
  misc_feature (423)..(423): n is a, c, g, or t
  misc_feature (429)..(429): n is a, c, g, or t
  misc_feature (439)..(439): n is a, c, g, or t
  misc_feature (451)..(451): n is a, c, g, or t
  misc_feature (480)..(480): n is a, c, g, or t
  misc_feature (485)..(485): n is a, c, g, or t
  misc_feature (490)..(490): n is a, c, g, or t
  misc_feature (507)..(507): n is a, c, g, or t
  misc_feature (510)..(510): n is a, c, g, or t
  misc_feature (513)..(513): n is a, c, g, or t
  misc_feature (519)..(519): n is a, c, g, or t
  misc_feature (571)..(571): n is a, c, g, or t
ggaactcctcagcagcgcctccttcagctccacagccagacgccctcagacagcaaagcctacccccgcgccgcgccctgcccgccgctgcgatgctcgcccgcgccctgctgctgtgcgcggtcctggcgctcagccatacagcaaatccttnctgttcccacccatgtnaaaaccgaggtgtntgtntgagtgtgggatttgaccagtatnagtgcgattntncccggacaggattntntngagaaaactgctcaacaccggaatttttnacaagaataaaattntttntnaaacccactccaaacacagtgcactncatnctttcccacttnaagggattttngaacgttntgaatnacattnccttncttngaaatncaattatgagttatgtgttgacatncagattacatttgattnacagtncaccaacttncaatgctgactntggcttcaaaagctgggaagccttctctnacctntcctntttttcttgagcccttnctnctntgcctnatgattgcccgactcccttgggtgtcaaaggtaaaaagcagcttcctgattnaaatgagattgtggaaaaatt

SEQ ID NO: 529135 - DNA, 110 bp, Homo sapiens
aagcttgattgcccaaagtaatataatagtgttaagatgtgatatatactggggaaaaaaaaagtgtatatgacattcggaataaaccactttattccaaaaaaaaaaaa

SEQ ID NO: 529136 - DNA, 494 bp, Homo sapiens
ctgcacgaatggctccggctagccatgtgatctcctccactccataacgctcctcataccaggcctactaaccaagcacactaaccatataccaatgatggctgcgatgtcacacgagacaagcacataccaagggcaccacatcaccacctgtccaaaaatgccttcgatacgggataatcctatttattatctccagaagtttgcttcttcgcaggatttgttcttgagccttttaccactcctagcctaagccccttagcccgccgaattcatcgaggagctctggcccccaacatggcatcatcccgctagatcccctagaagtcccactcctaaacgcatccgtattactcgcatcaggagtatcaatcacctgagctcaccatagtctaatagaaaacaaccgaaaccaaataattcaagcactgcttattacaattttactgggtctctattttaccctcctacaagcctcagagtacttcgagtct

SEQ ID NO: 529137 - DNA, 392 bp, Homo sapiens
agcatcttactctctctaaggcagatatgtaccctataatagatactgtatggctatcaaaatgatgcaggagggagggaaagagaaaggacgaaggataagattgattagaggtggactatctctatcagattgcttcttagttactctgttggactacctacgaccctttggaagacagcacgacgttccgcgacgctggtgaccttgagtacgactactgcagtatactttctacaaaatatgcacgattctttactgtttaccttatcaacttcgcaatcagtaagtagctctcagaagtaaacagtagctagtgtctgaatcctgtggggcaatgcaaacatgcctagtggtgcaaggacttaaatgtagtatgtgaacaaaggagt

SEQ ID NO: 529138 - DNA, 148 bp, Homo sapiens
attcgcggccgcgtcgactgtctctgaagacttctcgctcagtttcagtgaggacacacacaaagacgtgggtgaccatgttgtttgtggggtgcagagatgggaggggtgggtttcaccctgtaagaagtgactgtgtcacaacgag

SEQ ID NO: 529139 - DNA, 964 bp, Homo sapiens
cgggcgctggtgtgtgtacctcgcgttgcgtagttcgcgtgcgctgctgggcgccttgttactctgcgtctgtgggtcgcagtcctttgcctctgccggtccgcgttacccggtgctaacggcctagcagaccgggtgactttgttcccgcgccggtgacgcctcttcggcgccccgcggaggttgtttgtctacggtttaagcggccccgggtcccaagtcggcttagggtttccttgttgttgcacacgggggctaatgcgcccacgattatgggacccccccgctgtttgtccaaggtgcgggttcccggcggcactacagggggctcgtcaaggtcggtcccctgtattacacggagggtgtctcgcgggggccgccgtcgtccccctgcggggcaatggtggttccccccggcgggtgccgccgcaagggtgtggggttcgcaccgggagagtgttcctgctcggggggcgtgcgtcctcagaatggttccctgttgtcttgggcccccccatatctggggtacccccggcggggttcgctggacacacttatctttgtggcgcccacgtgtgcgcttgttcactcatatactgcctgggcccgttgttttatggggggggcccccctccctggcgctcgccagctgtgtttgcccggggcgcggaagtcttttttctcaccagctccacgcgtgtgagtatacccgatgtgttgttgcagaaccctggtgagtcaaagttttggtggtccgccctggtttccttccccttgggaagcccgggtttgtccttcccaacatccgctcttctcaggcgttggtgcccagactccgtcggtctaccgtcatctcctctttgggaccccccactgccataatatctttttttgtatagtgcgtttgtctggtagctaaaaaaaatattgccggtattgctttatccctggcccccccataaca

SEQ ID NO: 529140 - DNA, 223 bp, Homo sapiens
cgcgtgatagaggatccccggtaagcgcggtcgttcccactgtttcttgtatgtttatgtcatttttctaggcggaggatcaaacaggatgttgctgtgatttatgtcaaagagcattctgcctatgttttcctctaggagttttatagtgtctaaccttatatttaggtctttaatccattttatggtgttagatagtgttctgccttcattcttttacatg

SEQ ID NO: 529141 - DNA, 789 bp, Homo sapiens
gcagtggccatgggagcccatttgtccatatatgcgaccatatttgggttctctggcccctctttcccacgggtttggcacccgctttttattggacctggggcaccaatgacaggtcaagaatcttgccgcggggcaccgcgtgcaccacgattgggcgcggccccagaaaccaatgcttggcaaccctttccctgggctttgtgggcccaggctaccccccgagtaccaccccgcgcccatcagcgatgggcacaccgccacgtggcccaccggttcgttctatgaatcgactttgagcctgggaagcagccggttctcctggtctaaatgtgccgcatggagtgacactagaagccttcatcgggccccaatgcacctcccccgctttgctggggttatatttagagaaattggggttgggaagccagaacccgctgtttagcgcgggactactgttccccaaaggattcccaccggcccgcttgtttgtgaaacccaaaaagaggttcccctttcagatgtgagagacccaaattgggttttaaaaataaagtatacacttttgcacttgccctcgggttgtatttagtgtcttgaatgtaagacactgagcctccccctgtagtgtctgtaataccctagttttttccaccccgaagcttgtgaatttttggaccataacgtgaaaagaatgccagcaaccccgaaattttctgtttgaaatgcgggaccccaaatggttatttttcccctttgttaataaaaaaattttcccccaaaaccccc

SEQ ID NO: 529142 - DNA, 723 bp, Homo sapiens
ctctctccgaagtgttaatgctacttttgctttctttccgcaggtagtccccctctggctacatattagtcggccctcccccagagggcaatcggtcttctgtagctcttgccgctgcaactaagcaccttcttccctagtgtctcccccggcagaggtcgtagttgcgtcctccctcctcggtagcccccccccttttgttctcccccagcagtggtggcgacaaaacattttgggcagcaattgggggccccctattggcccgatcgacgcgagcagactactccatgtcctcctctctgcccgagagaagccctcttttgcagtgatagtggggtcttgtgggtatacccacgtggcggcttcaggacagaccacgggcaatatcagttcactctctttactaggtctcctttcggggtataattgggcatcccatatgtcgcgcgtccctggccacatttgggggggaccaccccgggtccacgaggctttaaggtgacaccctctgttgtcgccccctgtgttccctgctcccgaacgcattgggaataacaaacttgggaggcaccccaaaaaaaaagggcggccccccctttttttttttttttgcgcggtggcagtttttaagttattagtcttttaaatcagtactttttaatggaaaccacttgacccaaaatttgtcaccgaattttgagacccctttaaaaagttaaatga

SEQ ID NO: 529143 - DNA, 127 bp, Homo sapiens
aatcagtacatgcctggactggcagtacacagcatcatcccttggtcagaatctactaccttccacagcgggccagctccactgaaacaacactttacctgacaacaccacagccattgcactccgg

SEQ ID NO: 529144 - DNA, 199 bp, Homo sapiens
tctctgctcccagattcctgccagcttgaaaggggaggtcctgtagatattagcggaaattgatgagaagcccagttctgacctgaacaagacacgcctgcgttagtggttagttgccctcctgcagctcccagtctagtactgaggacccgaaggatgagcctgcgtgtagctaaaaccagattctgaggacttatcc

SEQ ID NO: 529145 - DNA, 198 bp, Homo sapiens
ttataactaggtatttacgaataggctaattcactagctctagttctatatcataaggttgtcgccccattcggtaaagcttagatgttgcaaaataataagctttgtccacaatgaacagcaggcacttgactaaaaacgctcttgtaaacctgtggttatcatctaagaaccatcgtctagggacacgaatgttca

SEQ ID NO: 529146 - DNA, 114 bp, Homo sapiens
gcagaacaagcagatgcgaagtatcagagaagtacaggcaggtcacctgtctcttcctcctgctggggggactctccccttcgctctcactacagctcctgctccttggccttg

SEQ ID NO: 529147 - DNA, 140 bp, Homo sapiens
ggctgactccagagtattccgatcggcattgcagcatgggaaactggcttgtgatgagctgaaagagatgcggaaaaacttgaccaacagaagccatcagtagagcatcagatggccaagactggtgggacccagactga

SEQ ID NO: 529148 - DNA, 723 bp, Homo sapiens
  misc_feature (526)..(526): n is a, c, g, or t
ccaattttacacttttagtagagacggggtttctccatgttcgtcaggccgatctcgaacccccaaccctcaggcgattcacccacctcggcctcccaaagtgctgggattacaagcatgagccaccatgcccggacatttttttttttttttggagactggatgtctcactctggtccacccaggctgggatgtggcattgggccgccatctcagttcatctggcaacctctggcctcccgggtgtctcaaggcgattctcctgcctcagcctcccgagtagcttgggtattacaggcgcgcacccaccacacccagctaaatttggtatttttaacgtaagaagacggggtttccaccattgttggccaggccggtctcgaactcctgacctccgtgattccaccttgcctcggcttccacaaagcgccggagaccacagggcattgagccaccccacctgggccaattttgattatagtttactagtgatcagcttggctgaacaacttacaacgattgcgcncttcctatagtaaattttcccccggggaaccaaaggtcaacggtgctttgacccctccaggaccaaccagtaccgcgccaaagcccccgtatatttagccacttggggggcaggaatcatttaacaacctcaaacagatgtccacacatttcaagtacacaatttgataaatcaatccactggtttcctaggacctt

SEQ ID NO: 529149 - DNA, 923 bp, Homo sapiens
gaagactaccccagttgtcgtggcgcatcaagttatttctacaccgcgctaacctgtggtctactgcgaagaaactagtcgcgagtcatagataagccccaggtcacctggtcaagatgggttctaaaactacacggcgccacaagtgtgacccccgcttcggtgtgggagacaccgcctacattttcgggtcaccaccacagatcgccccctagaggtgttggttcaccccgggccgcacgatatggtctcgcaaataagttgtatcccccggccgagcgtaaataactctcgtcgggtgatgatatggccgtcgtcatacgctgcagagaccttgcctggagttgcttattgggtgcttcggattcccaaaatagtgctgagtagctactatataatacctcccgctctcttgctcgaaagcggtccattgctcgaaataatggttaagcttactcgcccctagaagatagatgggacctgttctgtaagtatgagctattctatctctcgcgaagctccctgctctttgtaaagccagtaccgcgcgagctagcacacgctccccgcctgcttttagatcgctcctctcggggggaggtacacttcttctgttagggtagatagaccaccattgctctcccggcggcaagaaaggtcgcattgcgctagtctcagccgagtgtgccaccaactatttggtctcacacgccctcaataaagcccgcttgaacacagatttgtgccgccgctccgcctcactggggggtcatccgcatttcctcccaccacctgggccctaagacaataactccgcggattgtatcacccagggggtaacacccctatcagttcgtaccccgtccccccattttccccgttacccccacccccacatccatccggggtttccccctaaaaac

SEQ ID NO: 529150 - DNA, 304 bp, Homo sapiens
  misc_feature (248)..(248): n is a, c, g, or t
ctaaaaatacacccattcactaggcgtggagccacacctgtaatctcagctactccggagctgaggcagagaatcacttgaacccaggaggcagaggttgcagtgagctgagatcgtgccactgaccccagcctgggtgacagagcgagactctgcctcaaaataaaacaaagggtcaagcttcagactgggcttggttgatcattcctgtggtcctagcactttgggaggccgaggcaggcgggttngctgagctcaggagtttgagaccaacctgggcaacgtggcaaaaccccatctcttt

SEQ ID NO: 529151 - DNA, 174 bp, Homo sapiens
tttggggggggggaaaaaggggccccccccttttttgggggtttgggcccggggcccccccccccccccccccccttgggggggggtttttttggggggtttttttttttggggggggcccccctttgggggggggggggggggggggtttttttttgggggcccctgttggga

SEQ ID NO: 529152 - DNA, 120 bp, Homo sapiens
  misc_feature (2)..(2): n is a, c, g, or t
  misc_feature (56)..(56): n is a, c, g, or t
tnagtgatctcctgtcagcttccaaagtgttagaattataggcatagaccactgtngccatttaaaaaattacacacaatacacagaaacacacacacgtctataaggggctctttttgg

SEQ ID NO: 529153 - DNA, 801 bp, Homo sapiens
tgaggcccatttgagtatttggtttctcaattagggagatagtgggtattaggattaggattgtggtgaagtatagtacggatgctacttgtccaatgatggtaacaagggtagcttacgggttgtcctccgattcaggttacgaatgaggaggtctgcggctaggagtcaataaagtgatgggctaagggggcgaaatattatgcttggtgttcggatcatatggaggatgggcgatcattcgctaggatgaggcatgcgatagctaataggcgcaaggacgcctcctagtttggtccaggcgacggattcggcccaactcgtcgtaagcgccgaatacggacaattttcattccgggcgccttagacgtcggcggacgcggcgatgtcccaccagcgcgctccgcgcccaagcgcgactaaaccctcgccacggggcacgcccaaaacgaagggcctcgcctcaccacatcgtcggtccaatcggtcacctatcaccgcgagcacgaattgccacacaagaaaagtaccagccgcggacggcgggcgccaccacaccgagactcggtgctaacacaacgggggcttggcacagcggcagaacacctcacccgcaggaaccatgccggcagcggctgaacaccccactacaaagggggccgctagggtcagaagacccccccgggctcaccgccggccacacaacatacatcgcgcacgttgggccatcgcttgcggcctacgacggccctcggcaacccgacaacgacaacgcgcgcccaccacatacccaccgttgaa

SEQ ID NO: 529154 - DNA, 359 bp, Homo sapiens
tgctacctctgatctggccacgccaccgagcacagcgagggatggacgcccagttggccaaggtcaaggacccgtccctgacgccgtcggctcaggtgttggcagccatggctgagcgcaaggaaagctttgcgcagttctccctgcatcaaagcgaagtccatgccgaatacttccgcaaagaaccttcggcgcctgaggaacaagcgcactttgaagaactggcccgtgcgtcgctggcgcaacaggcagagctggagcagaacgaagtaggcgatttcgatgtgtttgtcggttcgtaccaggcaagccagcacccacattattctgccagcctgaaaacaggcttcgccatttcc

SEQ ID NO: 529155 - DNA, 708 bp, Homo sapiens
  misc_feature (67)..(67): n is a, c, g, or t
  misc_feature (92)..(92): n is a, c, g, or t
  misc_feature (127)..(127): n is a, c, g, or t
tctggcagggtgtgtgtgtgctataccttaagggggaaggggggtcgatatgcattatatgtgccgngtgtggaaaaaaaaaaagtcgggtnctcggtttggtaaaagtactttaaatggcctcagngatacagtataaagataaacagaaatgctgagataagcttagcactggagttggtacaagcagaacattggtacaaaatagatttaagggcaaacttctttacacggtggtggctccttggcaaactggtctgtcacaatagatagtggtcatgtggcaggttccaaggtaaattcacttgtacatatagacaaagggaaactttggccaaaagcgggagatctttactggaaagcagagagcagctggttatcgcacccatatggaaaattggtatagatgcttgggacagacccgggtaaatgggtgtgggccatgggtaaatggtgggaacacacaaggtcaccttgaattcccaagaatgctcacaaacctgcaggccatatcatgggcgtagggcactcattaaaagggttaagagcaccattaagaagagggaccatacctatgtaaaacaatcttgtggcagtggaggggtaagaatatgtagtgaaagtaggtagagtaaatcggggtctggcatctttgtagtagctacaattttagcacatggtacatacaattggcaaatccatctcacg

SEQ ID NO: 529156 - DNA, 156 bp, Homo sapiens
  misc_feature (80)..(80): n is a, c, g, or t
  misc_feature (107)..(107): n is a, c, g, or t
  misc_feature (112)..(112): n is a, c, g, or t
  misc_feature (115)..(115): n is a, c, g, or t
  misc_feature (147)..(147): n is a, c, g, or t
gatccggatgacgcatcagatactcgacccaccacacagccaactcgagtggcggcacaggattatctcggaagcgtttngagcgcagtctcatcgcttttgagtancgttngtnctcggcacctcgcgtatggcggataccaaacngtcggtggt

SEQ ID NO: 529157 - DNA, 1018 bp, Homo sapiens
ctcctccgcgctccgcccgtccccccatcccgtttccctccaggtgttgttgagggccatttggcgttcctctgcttgcatccccttccagctccctcccctgctcagaatctgataccaagagacagggcccgggcccaggcgagagcgaccacgccaggctcctcagccctctcttgccaaaagcacaagatgttgaggcgagcagtggctttttccccggggagggtgccagagttatctatgaatctattttcttcatactgaggccttttggtagtcggagcccccgcagtcgtcagctctccctgacgtctgccacccagtcgcccccaacgtcctcctcctttctttgctgtttgtcaatctaccagcgtgggtgatcctcacgacatcctctgccccttgggcctcccactcccatggctctgggcggtccataaggagcaggccctgggcctccactcgtctgtgcagggcacatgaaggctgggggtgcggggagatgagtggattccctccccaccctgtccccaacgcgagctccactgtccgctgtctccctcctgattctaaagtgtctcagtgcaatgccccccgtcccctctcgtttaccgagggacagccttgctcctgtcacaagcaaggctgtcggcggtcaagctggaaaggccaacagtcttccagtggcttctccaagcactcttggggaccaggtatattacacgctctaaaggggacttgtcccgagtctgacagtcagagcgttacaggggccagcggcctcccggcgatctgtgtctactctaggactggcctgggtggtttcctgcgccctgagtcagctagttagctctgccactgcaagggtttcgagccataggtggttctccctctggatatgtagtccggtctctccgctgttaaaaagggcccccgcacgggcgctcggttccacgtgtagcgggacggggttttagcaccacggtaggcacacacccgggaccctttggcccgc

SEQ ID NO: 529158 - DNA, 496 bp, Homo sapiens
tctgcatttggggaggcccccgagttcccacttgagcagtgtggtggcggtgagtgccagtgtgagcgtttgctagtctgccatctggacccggtctgcggaacgcagactctgtccacttatgtgtagtcaccgccagcagactgctcaagtgggaactcgggggcctccccatatgcagatgacgcccgacccccacccctgacatccattttgtgtccatcctgtgtcattcccacagtgagtcagcagcccgtgtgtccactggatccttcccaacacctcctgagcctcaatctgcatcaggcccgcgggaggccggtcaagctgtgaccggcaatggggtctcagccagaggcaccagcccagggcagggagaaggccgagaaggccgggagcgcggctgctgccccactgactctactgtctcctcaggatgtggcttctcctcacataacaacagagctttctccaaaatgggaaatttcagttttaa

SEQ ID NO: 529159 - DNA, 742 bp, Homo sapiens
gttgcaatagggtctcgctttgtcacccagccaggagtgcagtggtgtgatcgtggctcactgcagcctcagcctcctgggctcaaacggtcctcccgcctcggcctcctgattagctgggactacaggtgtgcaccaccgggccaagctaattctttaattatttttagtggagacggagtcttgctctgttgcccagtctgatctcagactcctggcctcaggtggtcctcctgtcttggcctcctgagtagctgggactacaggcatgctccaccatgcccagcttaatttaaaaaacattttttaaaatagatatgggtctcactatgttgcccaggtcagttttggactcctggcttcaggtgatcctcctgcctcggcctcccggagtgctgggattacaggcctgagtcaccagcctgggcgacagagcaagtctccgtctcaaaaaaaaaaaaaaagtgttcaccgggtcactgtaaccccaggagacgtttctgtccccttctcgatgggttaccatcagggtgtagacatagggactatgccgagagatgagttaggacgtgacctgtcaatggtaagctccagggtccagtttaacccaggcaaataggtgagcaggggacccatggtagatcacagggtgttaacacaccggttccaaccttaggggagactcgggttggcccttgtaggaaggaaccggacactcacagggattacccggcaaggccat

SEQ ID NO: 529160 - DNA, 185 bp, Homo sapiens
gctagaccctcccacagtagcctattatactttcagattgtctgtcaaatcaagcctctcattactatctgtctacctccattctgaagagggcggttttggtgtccctggtcctctggaaatagaagatccatttgtctttgtgtagagcaagcactgttttccacctcactgtggagtaaggg

SEQ ID NO: 529161 - DNA, 598 bp, Homo sapiens
tcgggtccagggtgtgtgctccccctcctcaattttttagggttgcctcttttccccccgggggggcccccgggctctccccttttttctatttccccgggtggtgttttttttaaaccagttccccctttattgctggccgcccctattatatttgccctgtgccttgggggggggagaaaagggtctcttttttctttcccccccaccggggtgtttccccccgggccgaaaattgggtgcccgcccccctttccttccccagggggcccttcccccattggtggttttttcccttttccccgcccccgggaaagggggctccggttttgggggggctttaaaccatattccccccccccccccccctgggggggtttgggcccgtttttttttaacccccccccccccgggggaagggggccccttttaaacttagggggaaaagttttttccaatgggtttccccccccccccgggggtggggggtttttttggggccccccccgggggaaaaaaaatggggttttggggtttttttttccctttttggcccccccccgggggggttttttttttttaccccccgggcccctta

SEQ ID NO: 529162 - DNA, 926 bp, Homo sapiens
aagatgccttgtgtgttcgccatcttagggcaaagatgtacatcagatcccgaatggcgcacctggacagcgggacgaaccccgttcaacacgccacatctgcagctggtgcacgatggtctcggggacctccgacagcagactccccagaggaccccacgggaccagccccgcgcgcacctcgcaagccatggacagaacgccgccgatggaagagtacaagtatcgtcgaatttaggctccagacgcaagatattatagcaacatagtagatgagctattagggtcggggtcatattacagcttcgtaggtcatcgacaacaacaacatagcatgtgggtatccaccatggaatttaggtagaaatagccgatatgcaaggtgagacccccaaaaacagatacgacaggtgcaatcatgtataacagcgaatatcatcgagattgtaccacatttaagaggacagagcattgagatcgtctcgatcgggattttcggcatacacaggcactgagagcatccgaacatttatcacatctgagacatacatcacaaatgacaacgcggcacctcatgacaaagatatataggcactctaatagttgacagctcattattaacaacgatcgtttgactaaatacgaccacaatacgttggacatctgagcacgacaggaacggaacaatcacaattagattacattcattggacaggcaaccaattaaccatcaatactcatgggacatgcacattcatgcaccaaaagtgaacgtgaaacaatatcatatgaggacatagaacccatttatggccccattggacactccactaactgagacaacgacatggcataaagaagtatacagcagaattacaacaagcaacaaagagcacacgagcgtacacctgcccacagcaaacatt

SEQ ID NO: 529163 - DNA, 280 bp, Homo sapiens
ccccccccccccttttttttgggggggggggggggggccccccccctttttttttcctggcccccctttttttttgggggaaaggggggggttttttccccccccccggtgtcccccccccgggggggggggggtttttttggggcccccctggtttttttttttgggggggggggggttttgggtttttttttttttacccccccctttttttgggggccccccccccccccattttttcccccgttttttggcccccccttaagggttttttggggga

SEQ ID NO: 529164 - DNA, 524 bp, Homo sapiens
  misc_feature (237)..(237): n is a, c, g, or t
ggtggctccccccggggggcgtttttcccctccccgggccccccggggggtcccttggggttggggccccctctctcggacccccccgtgcgggcgttgtggccttttttgttggggccccggttttcccccggcccccaaccccggggtttccccccaagcgtggtcttccgggggtgggttttcccggcccttaaaaccccccccaaagcccgcggggtgggggccccccttttnccggtgggttttttttgcacccccccccggggccaaggggttccccggggtgggatcccccctgggccgggggtggggggtttttttttttggggccgggccccggggccaggggccccccccccccaggggcctttttttcccggggggggggccccttgggcccggggccccccccccccccccccctggcccccctggggattttgtttttctgtttggggcccccgtttgggggcccccctttgtggggggccctttttttttttagggggggttttttttta

SEQ ID NO: 529165 - DNA, 118 bp, Homo sapiens
gccctccgttatggcagaaatttctctcctttcttccccctatgcaccaatctcatatagtggtgtgatatgatttggctctgtgtccccaaccaaagctcatcttgtagttcccata

SEQ ID NO: 529166 - DNA, 304 bp, Homo sapiens
actattccacggatggtactagtccacggttggctactagtccacggtttggctactagtcacggttggctgagtaaatgtcctctacttgacaatacatgatgtgtaataacaaatgatcaaatactatgaaaagtggagagacagattgcagaataaaggacagtgccttatattttggtatctttaatagcacctattttctgcttttttttttatttttaggaaacagagtctcgcccggttaaccggaggaggctggacaagtgcaggtgccccgatcctcagctcaggtgcaacctcc

SEQ ID NO: 529167 - DNA, 141 bp, Homo sapiens
ctctagagagtcccattctagtgctgatatacgtcgaaggattcatattaaaatatattgtccatcatgacgttccacgatatccagaactaggtatataactcataaatactggttaatgtcttagccggttatctcaac

SEQ ID NO: 529168 - DNA, 465 bp, Homo sapiens
  misc_feature (157)..(157): n is a, c, g, or t
  misc_feature (450)..(450): n is a, c, g, or t
tatccaaaatgtgtttattgagatggtttcccactcatcttgactcaaagtgctttaagtgctgcttcctcctgaaggaacatcctttctgtaagccttgctttttcctcctgtgttaggctggcagaggacaggtggagcagccaacacacaaaanctaccgcttgtgtgcagtggcttaaaagaccggtggttgatatttattagcactccgtagggcttttcacattccagtgaagataggaatgtgggggctctggcaccagggcgtattcttacttggtgtattcctcattctccttcttctggaagaagggaatgaaaggaagaatcccttgtggcgaagaaaggccaatgttttctacgagtgtgtgccgtataaggggttcgtttcacaaatattttattatatctcagaacaacaacttaacatgtgtgtgtctacacatntatctacgtgtgggg

SEQ ID NO: 529169 - DNA, 343 bp, Homo sapiens
  misc_feature (129)..(129): n is a, c, g, or t
attcattccttctttcattttccaactcagttattccagtttaaggtggtgggcgaccagagcctatcccaacagctcagtgtgcaaggcagggaccactctggacaggatgccctcccatcacagggnacactcaccccccacacacattcagactgcgaccagacaccaacaaacctcacctgcacatctttggggcgtgggaggaaaccagagtgcccagaaagctctccgaccgggaggacgtttagacggtgcacagacagtggccccagccgggaatcaatttttttctcaatgttataacaaaatgacattgaataaaacgatgctattcaaggaa

SEQ ID NO: 529170 - DNA, 225 bp, Homo sapiens
cctcctattcacagtgtcccccgccaatgtgtatcactgctcacacaggtctcagccaggctcggggataaacaggccagctctgcccctccagtgagctcagcgaaggcggggacagaacacgccaatgggccagccatcaggcacacatgccaaggtggtgacagcacaggtggccaggagtgggttcacaccatgacagggccctgacgagggaggcagcag

SEQ ID NO: 529171 - DNA, 340 bp, Homo sapiens
ccccggtcacttgctacacctagttttcagtgtacaggtcttttacttccctggttaaatttattcctaagaattttttttttggtagctattgtaaaagagattgttttcttgatttctttttcaggtagttttctgttagtatatagaaaactactaatttttgtgtgttgattttgtatcctgcaacttttactgtatttattaatcctcataatttttgatggagtctctagggttttctatgtataagatcatcagcaaacagcaactatctcacttcttctggccctatttggatgccttttatttatttctatggcctgactgctcttgcgat

SEQ ID NO: 529172 - DNA, 167 bp, Homo sapiens
catcaaaaatctataggaaaaaaatctaattacccatttttaatcagattatcttttaattgggtaattagatttttttcctatagatttgtttgagccccttagatattttggttatgaatcccttgtcagatggataatttgcaaatattttttcccgttctgtg

SEQ ID NO: 529173 - DNA, 427 bp, Homo sapiens
  misc_feature (21)..(21): n is a, c, g, or t
cgcggccgcgtcgacttttcntgcatcaggagacagtatggagccagtcattcctgatggtgcaactgtagctgttgatactggtaataagcgagttattgacggcgaactctacgccatcaaccagggagatctgaagcgcatcaagcaactttatcgcaaaccaggcggaaaaattctaatcagaagcattaatcgtgattatgacgacgaagaggccgatgaggcagatgtcgagataatcggttttgtgttctggtactcggtattgcgatatcgccgataattttagtggcctgaagagacgtttgggtgatgagagaatatctgatagtaggcgtggttactttgctctcggttgttgcgatcgtgcttatggtggcctgatgagacgttttggtgaaagcatgtcgacgcggccgcgaat

SEQ ID NO: 529174 - DNA, 91 bp, Homo sapiens
gcggccgcctactactactactgctcgaattcaagcttctaacgatgtacggggacatgctatctctagtaaatctaaaatcttgaaaccc

SEQ ID NO: 529175 - DNA, 675 bp, Homo sapiens
tgtctggacaatcagtcttatgatctctccacatgcacctgttaaccccttcttctgctgacgatagataaccgactcttgctgtaatttgccattacctacccagctcctggtaaaggccacagccttccccatctcccttcgctgactctcttttcggactcagcccacttgcacccaagtgaatacacagctttattgctcacacaaagcctgttcggtggtcccttcacggacgcgcgtgacacttatccagcggtacttcctgcagaaccctgaccttttacaaaaatccaccaattcaaaatgtattgtgtggatggcttcaggatggaagcagtctccactcctaagcttcgggggaggaagggctgaaagtgatcgcttaagccccctctaccccatccagctttcccttataaatgagatcctatgcagagttggataagctgttacagatccacgggtacacacgcctttacctggagctatagcatgtaaattgtaaggttttatttaattttacaggaaggcccttctttttcctttgctttcttttctttttgtccagtaccgtgtttctctctagcttatcattcatactgacagatcctgatatctacagtgacttggggaatttcaaaggccgcgctaaaactctgttggaggcggcgg

SEQ ID NO: 529176 - DNA, 115 bp, Homo sapiens
tcagttcaaggtcatctggtcatctgccatgtccaacatcttccacgtaggtggcatggtgcaacttttgcaagcaaccaacacaggcttttggcccaccagcaaacccacattg

SEQ ID NO: 529177 - DNA, 873 bp, Homo sapiens
cgctccagcctccaacgctcgtcacagccctctcatctcctggaaccatggccagcacagtcaccaccatcagtgatgccacagcagcagccgccggggtttcaggtgccaactcagccaggctccctggggtcatgccgctctgtgcttcagcagctatgtccgtgtcccgctccaggggcagtggtggcctggtgtggtgcatgtggaggagctggcatttggcagccgcagtctgtatggcctggggggctccaagaggatctccattggagggggcagctgtgccattcagtggcggctatggcaggcagagccggaggcagctatggctttggtggcgccgtccagtggacttcggtttcggtggtggatgccggcgttggcttgggtctgggtggtggacgccggccttgctggtaggctatagggggccctggagtttcgctgtgtgccccccttggagtgcatccaagagggtcaccgtggaatcagacgtctcctgagtccccatcaacctgcaagatttgaccccgtcgatccagcggtgatgcgggccgatggagcggtgcagcagattcagagaccctcaagaactgagtttgcctctcttcatcgacaaggtgtcagttccgtagaccgggagaacgaaggttctgggacaccaagtggacccttgactgcaaggagcagggcaccgagactgtgaggcagaacctggagccgtagtacgagcagtacatcaagaagctcaggaggcagctggacagcatcgtcagggaacggggccggctgggactcggagctgaaaaaactttgcacgaacctgggtggaaggaactccaagagcagattttgacggatgaaattgac

SEQ ID NO: 529178 - DNA, 200 bp, Homo sapiens
cttcttacggtataaagctgttgcttcctgaagaggctacaagcatccttccctaggacttctgtaagcttttgagcctctagcaaggagacatgccctcggggacgaaaagagtcggcgccgccgtaaatgcgaagaccgcaaaaggagaacccgcaaccaattcgcaaatcccaggcctcaaagggctcccgaagacc

SEQ ID NO: 529179 - DNA, 112 bp, Homo sapiens
gggcaaagtgggttttggtcgttattggggcctagatttgagaaacgatcctgatccgatcgggagacgatattactaactgacctgtgttcagctccgaactattttttgg

SEQ ID NO: 529180 - DNA, 173 bp, Homo sapiens
cttcaaaaagcaaagcaacatgtccatcatgctgccaagcatggcatgcaatccatcaagtgcaccattcatcactgcacacagcaatcaggcccaatcaaccacagcacagcaccattcacgttgtcatgcattcccacattcaccatgggagtcatctcacacagtcagtc

SEQ ID NO: 529181 - DNA, 215 bp, Homo sapiens
  misc_feature (162)..(162): n is a, c, g, or t
tcactgaggatcccgaaaccctgattacgatcaactgacacaggtagcgagtgatagatttgcaattggaaagccaaatttggtaattccaagcaccttaccttaggcttgatgtgagggttcttctaacttgtatgaaatatttgaagtaattgccattgnagtactaagtattactggttaaaatataattttggtctgcgtaattggggttt

SEQ ID NO: 529182 - DNA, 485 bp, Homo sapiens
  misc_feature (11)..(11): n is a, c, g, or t
  misc_feature (14)..(14): n is a, c, g, or t
  misc_feature (21)..(21): n is a, c, g, or t
  misc_feature (30)..(30): n is a, c, g, or t
  misc_feature (33)..(33): n is a, c, g, or t
  misc_feature (54)..(54): n is a, c, g, or t
  misc_feature (63)..(63): n is a, c, g, or t
aaggtcagtcnggnaagcacngtgaaacanaanccataaaaatgtaagtataangtccagtantcactgacagtatttttcattgttaatgaaaatgaaaaaatttatttcatatggtattctcatttcctgattaaaaatattaaaagcttttatgcaaggtattgaagacagtgttattttgcattataataaaataaattgcccaaatatccattgatagactaataagataaagttacatggaataatattatgcagctcttataaaaaatgtaaaaacctagccattgggaaagtctaatggtataaagttaagtgaaaatgaaaatgctgagttggatttatattgtgctttgcattcctgcagctaagaccaggaatatcagggggaaatagtccatagattggtttatggtttacaccactttttctggatttgctttagaactttatttttttatgattatatagttgttatttat

SEQ ID NO: 529183 - DNA, 1192 bp, Homo sapiens
  misc_feature (1092)..(1092): n is a, c, g, or t
tccggggcgcagttcctcatgtttcgcgggagttctcgcattgtgggccggcgtctctgtcctacggcgcggtgtagccccgggggatattcttgagttgttgttgcgcgccctctgggtagaggcgcttgtgtacgtcgtttgtccccagaagttcgttggtggggatgtttgctgggcgcccagctctggttttgttgccccgtgttccaggagagggcggtggactgacctgcccggtgtgttggcgacgcggggttctgttcctgtgctctggacaccactttggaaggtgggtccccgggtcgattttacccttggtgttagctctgtccctgaagggttggtgatcgtggctgcccaagcgttgtgtggggttttcatctcactgtgctccacagaggggtcggttctgggcacggcgctccgcgggcgagccatgtgcgagccagttgtctgtggtccctccggcagtttggggttcgttgtgtgggggttgggccctcattgcgcgagggcactcccttggcgcactctcatgctccggtctccatacgtttggggggctctgggtgcgctggcggtttctgtggctcactcactgttatcccacggggcgttcacgtggtgttttgtccccggttgcgcatagtggtcacagagggtgtatgctcggtgtagcaccctgtcggtgcggttctggcacggtctgtctgtcctgctgcggcttgtgggcgggcctctctgcgtgtctcatatggccagcccaccgcttgctagagggctacagcctctcgccactgagatgcctgcgcacgtcgtgagacactgtggcgtgtcgccgccagctgtgctcccgctcgcgtgtgcacgctgctgctgatggccctcgagacacctggctgttgatgtgtccccgtatgttctggagtggtgtttctgctcgtaggtgggggtgtgcacgagtggtgagtggccgccaccctgtgctgcgttctccacgagagctcacggcggctctggcacactgtctggcgctcacgtatccgccacgtaccacgacgaaaagggccttagcgccccacggagacncgggcccttgggaaagaagtactgaagtggagttccctgttactttagaatattccaaaattatatgtatgtaaccagtgataaagaagaaaaaagaaaa

SEQ ID NO: 529184 - DNA, 110 bp, Homo sapiens
aaacaaggatttgttggtgcagtacaactaggcttaatctcgaattcgaggctcgaattcgaggctcgaattcgagcctcgaattcgaggttagaagcttgaattcgagc

SEQ ID NO: 529185 - DNA, 301 bp, Homo sapiens
ggtttctgtctcctgctgccctgtgaagagattccctctgccaagattgtatgtttcctgaggcctttccagccatgcagaattgtgaatcaatctaacttattttctatataaattacccagtctcggtatttgtagcaatgtgagaacagactaataaagggggtcaataaagaaatgaagaaggaattgaaaattctgaacaataatggatggatatgaaacacactataccaaacctgtggatacagccaagcagtattaaagggagttacagctatatcatctcatcataagtaaa

SEQ ID NO: 529186 - DNA, 496 bp, Homo sapiens
  misc_feature (108)..(108): n is a, c, g, or t
  misc_feature (119)..(119): n is a, c, g, or t
ccaagtccttctctttatttcccaccagccccagatggcttgataatagatgaacatgcacgtgccataagtgatggaaaccccagtaatatgtgaagaacagggatnctgtgctgcgnagatcattacggaagcaacagtagcaggtggcctggccatacagggattccttactcgcagcagagaatgttgctgccactcaaagtcaccaggggctgaagagctcctgtggagacccacatcatctaacaacacacatactcaaaacagggaaatgtgcattttcgggagaggaagagacaaaccttttgtttagctaactggcatgacagagtgtgacatacatgtgctcctggaagaacggtgttgggtgtctgcactcaaaatcttgagcataggcaactggatgaagggctctgtggcattgattttcattgtgtgtgtgttaatatttacatttataattaaataaataatcgaaattatgctgaactga

SEQ ID NO: 529187 - DNA, 542 bp, Homo sapiens
agacagcctggctacgatggtgaaacccgtctctactaaaactacaaaaatcagtagggcgtggtggtgtgcacctataatcccagctactcgggaggctgagagaaaagaatcacttgaatccgggaggcagaggtcgcagaagagccaggatcgagccattgcactccatcctgggcgaaaagagtgaaactacctctcaaacaaaaaagagcaccctgggcaacatggtgcagccctgtatctgaaaaaaatacaaaacttcgccaggtatggtaggtagtatgcttgtagtcccaactcacttgggaagctgtggaaggaggatcacttgagcctgggaggcggcaggttagtaaagtgggctaagatcgcaactatatagcactctagcctcggtgacagagtaagcacactgtctcaacaaaaagaaaaagaaaagaacaagcgtacataccgcctgtaatcccagcacttagggaggacaacgcgggaagatcacttgagcccaggagtcaaaataagcctcggcgccccgaccg

SEQ ID NO: 529188 - DNA, 278 bp, Homo sapiens
  misc_feature (1)..(1): n is a, c, g, or t
nttcttgtaaaaccgctagaaactgcagagacctgaaattctgccatcctgaactcaatgagtggagaatacttgggctgatccatgtatgcgatgctatttggtgcagtgactatgtgattgttctgggacgctcggtgggagagactgcgaaggcctgccagcttggcatcaaggagatcttcaggaagtacaggattgccgtagctaaacgtgaaaaccaacatccatgtactctccaaaccaaacgtgttacttctcagcactagaatctgtcc

SEQ ID NO: 529189 - DNA, 239 bp, Homo sapiens
tctttgagacaaaggtcttgctttgtcattcaggctggaatgcagtggtgtgatcaaggctcactgcagccttgaccgcctgagctcaagaaatcctcctgcctcagcctcttgaatgtcagctgggacaacaggcacataccactgcacccagcaaatttttagtgtttttttgttttttaacgagagacggagtcttactcatgtttgccccgactgggtctcaaacttcctgggct

SEQ ID NO: 529190 - DNA, 165 bp, Homo sapiens
gaaggaaggaaggaaaagaaataaacaagtaaagaaaaaagaacctctcttctaccagtttttacagaatgtctctctgctgggtcacttctgaatgcttaggcaacttacctctgccttagcgttcactttctgctttcactgagcccagaggttagcaaaagg

SEQ ID NO: 529191 - DNA, 500 bp, Homo sapiens
  misc_feature (117)..(118): n is a, c, g, or t
  misc_feature (123)..(123): n is a, c, g, or t
  misc_feature (126)..(126): n is a, c, g, or t
  misc_feature (129)..(129): n is a, c, g, or t
  misc_feature (142)..(142): n is a, c, g, or t
  misc_feature (145)..(145): n is a, c, g, or t
  misc_feature (155)..(155): n is a, c, g, or t
gatcgggtactttctattttgtttctaaacgagcaattttgaggatgaaatgggaagatatcattgcttcctttttgcacctattgggtatgtacactctgccgaagggggggttgnnccccnccntcntaaaatttggggntgnttaaagtttncaaaatatattactttcctggattctcttcttcactttttctgactttgggtccattttcttttcattgcctccttttccaggcagctctattcttgcagagccatagcaggacatgttaaaattccaatagaaaacactaaaaggaaagtctgtggaatcactagtgactaaatactgggaacctattttctcaatcttcctccatgttgtgttctttgtattcttgagatgataatatattatgtatttgaattcctgaaaaatggaaaatgtttaagatatatgtatataaagtgtatgctgtattggtgcaataatggtaattaaaaatatgaaaaaagtg

SEQ ID NO: 529192 - DNA, 574 bp, Homo sapiens
  misc_feature (70)..(70): n is a, c, g, or t
  misc_feature (109)..(110): n is a, c, g, or t
tgtatccatccacctatccatccatctacccatccttccacccatccatcaattcatccgtccatccgtncatgcatgattcatctgtattagtctgttcttgcattgnnataaagaagtacctgagactggatgatttataaagaaaagaggtttaattggctcatggttctgcaagctgtacaggaagcagagcagcttctgcttctggggaggcctcaggaaacttacaatcatgatggaaggtgaagtggaagccagcacgtcttaatggctagagcaggagcaagagtggaggggaggtgctgtgcacttttaaacaaccagatcttgcgggaactcattcatggtcacaagaacatcaccaaggggatggcgctaacccattcgtgagaaatccacctccatgatcccatcacctctccccaggccactcctccaacactgcggattacaattcaacatgagatttgggtggggacacagatctaaattatatcaccacctcgcaagccagtgatctcaatagaatgctgatgttcatgttgctagtggctataagccttttttctca

SEQ ID NO: 529193 - DNA, 966 bp, Homo sapiens
gtgacgctaagcctgagttatgcctgaagtggactgtacatatggatgtgagaccaataggggattcgactgaatctctgccactgttgcctcatgctgtccggataagcttagggagatactcattatagtgggagttggattgttacgatatggtctaggatcatatggtatcaacataggaggctttaggcatcacttgtttagccatagaaggtacaccattgtgtatctcaccaacagtccgcattgcttgtcggatccacagcggagcggcgtacactcttgttacccatcacgttgtggtgagctggttggaggataagtggtcccatgacccaagtagtgcttaaatggcgcgtaaactgttcgagtagaaaagatcagggaagttacgattgacacacttagtgctagttatacaagaacggtagatgccctgctgatcacgtttgctagctccccgagccgagtactgctctttcccataggttacccattgttaaaggagcgacgtcgcccatacataggtttagcctaaactaggggaccgcacgacagccaatcggtctggagctgagggatagtcgaacatctcttactatgggcacttaaaaagtaagcattcttggtgtactaagtatattccggtacgggagccatgggtggcgtattggccttggtcgggcacgggacacggcatgcgcggcacactatcctcgagcagtcttagtgacttatcacctgaaacttggggggcataccatttcagtcaaacaaattcccaagaagctttatcataattcaaaattaattcatattgcgtgttatgcacatcacccaccggtcccggcacaacatcactcttcatcgacctacccttaactaacatggacttctgagaccaacgatgcactcacctgagtaatatgtcactcattggtcgacagtttcggccccttggaa

SEQ ID NO: 529194 - DNA, 157 bp, Homo sapiens
cgctgtgttgactctagcggatcccgtcccctcctgcaggtcttgtcaggggcccagcctctgggcccggtaactcagctactctttgtggctttcttcatggctttttgtgtgggctgccacgcctatctttatcacctagatgtgaggctcctcc

SEQ ID NO: 529195 - DNA, 228 bp, Homo sapiens
tggctagctgcagttgtctgtgagtgtctgtgcgaggctgagtgagagggtagaaaatacttgttgctagtggaagaaccaggagactggggcagtgcatggtgagggggcactgctgtcctgcacaactagggtgtatacacacacacaccacacacacacttaacacacacacctaacatataccagacacatactatacacacacacattctcacgacaactgca

SEQ ID NO: 529196 - DNA, 296 bp, Homo sapiens
aggaccagtgtcatctctgtcatcatgataaaggcaaagtctgggcatacaccagctgtcctgcggcattgtgccctatggtgcaacagcagaggggtctccagcaggcaaagctcagagacgtggcctaccaaggtttataacccacgtggtggagtgggttgttcacagcaaagggagtaactaactccagacacgattcccactcttgcttggtaacaataatgctgagctgatctttcccatacacaaaactccgaatgacgggtgatttcttttgaagagggaggcagaaa

SEQ ID NO: 529197 - DNA, 317 bp, Homo sapiens
gggggggaaaaattaaacgctttggggaaggggggttttaaaaaaaaaggggcccaaaagggatttttttaaaggggggtttttcaccccccccccctggaaaattttttttggggttttttttttaggggcccctggccccgggtttggcccccccccccccccgggttttaaatttttgggttttttttagggaaggggggttggttttttaaattttcccccttttcccaaaaaaaaaccccccctcctttggggggcccctttttttgggggggggtttttttttttttttttttagggtttttggcccttga

SEQ ID NO: 529198 - DNA, 236 bp, Homo sapiens
aagtatggcgatcactttaagcttgtctccagctggcacactaatggaggcaccacaatcagccactggggcgaggatgggcacgatggccaggttcccaagagctcaggtgagtacacagtggacggcccaggggccctcaccccgctcagcttgtggctctaacattccagaagctgaggcctctggtatccctgctcttatccccaaggatattccatttcagacaatccgtt

SEQ ID NO: 529199 - DNA, 345 bp, Homo sapiens
gagcaaggaaagccagactgaattccccaaactgaagaatttggagtccagtgtcgaagggcaggaagcatccagcacaggagaaagatgtaggctggaaggctagccagtctctccatttcatgtttttctgcctgctttgtattcattgacagctgattagattgtgcccaccagattaaaggtggatctgccttctccagcccattttctgcctgctttgtattcattgatagctgattagattgtgcacaccagattaaaggtggatctgccttccccagcccactgactcaaatgttaatctcttttggcaacaccctaacagacacacccagtcgacgc

SEQ ID NO: 529200 - DNA, 774 bp, Homo sapiens
  misc_feature (376)..(376): n is a, c, g, or t
cccaaaaccactccatcttactaccagacaagcttatctcaaaccatttacccagataaagtatatggcgatgagaagatttgaaacctgagtgcaatgagatataagtaccgcgaacgggaacagatgaacaacttataatgcaacgcagtaatatacgctaaggcactgaaccccctatataccttcctgcataagtgcaattgagactaggaagataaactttagcaagggaggagccacacgctaaagagtccccagaacacccagacgacgctaaccgtaacgaacagtgtagaaacgagcactacccagtcatatggtatgcaagagataagtgggaaggatattataaggttagaagggcgagcaaatncctacccgtagccctgtgtgataagcatggtatgtcccaagataagaaatcttaagttcaagctcttaatattttggcccatcagaatccctcctataatcacccgttggtaacattctagactgtgttgtcccacaagagtgaaccagctctgttgggacagctagtgataaaaaacccttggtagcagagcagtaataaccatttgaactaccctattagatagggccgtaataagcgaggcgaccaatttaatgaaagcggtgcaagcctcaaaaaagcaactatcttgtgaaattcgcaaaacataataactgaaatacttcagagccccattggagcaatctagtagcctatagaactcatggtagtgtaagtacatgggttttctccggtgc

SEQ ID NO: 529201 - DNA, 306 bp, Homo sapiens
gaaacaatcagctcggtaccgctagcggcattatgtgaacgggggagagcctggcccagcgagagctagaggctctggacgtggagctcctccacaagcgtgttcccgagggggcgccctgtaggtatgaacccaggacgtggtcccaggtggtgacacctggggtccaggcgtgggcatgtaccacatagggggcttatggggtcacagagccctaagctggccccagacaataggcagacatcaagggaggggccctgcagcccggtgccagggtgagggtccgttcacttaatgccgctagcg

SEQ ID NO: 529202 - DNA, 509 bp, Homo sapiens
agtaaatggtctgatctatattgctacacctgaactacaagggatatccgaagtaatctgacatatacgttctcctagaaataacgtcacttcccagtaatttcagacatagaaaagggctcatattggtacatatcctcaatagtaattgcaaacgtgcactgttagccccaacaagattattctctctctccagcgtgtccacaaaaattctccgagatgacttactcacttagacgagagctgcactctattgaaactaaatggagaagccgcttgggcaggtgacacaggagagtcggtggtagtgctgactttcgctggtgagttacaagaagatccggcactgctgctgtttccatcaagggtatccgaagatacacacacaccaggatctgacagctgtgcaacgtcagaagaaagcatgttggtgatgccctggaaaaatctctttggctgatattcagtttccatttcacattttcttttcaatggtccaagaacacttg

SEQ ID NO: 529203 - DNA, 195 bp, Homo sapiens
  misc_feature (91)..(91): n is a, c, g, or t
  misc_feature (129)..(130): n is a, c, g, or t
gctcacgcccgtgccccgccgtcctccttcccgcggccgtgtaggagagcgatacggacgctagcgactggcagtttacagaatgtctganggggacagtgtgggagaatccgtccatgggaaaccttnngtggtgtacagatttttcacaagacttggacagatttatcagtcctggctagacaagtccacacc

SEQ ID NO: 529204 - DNA, 124 bp, Homo sapiens
gtaactacagtttctgcagcatagtttaaatcctgacaaagaaaccctatgtgttttcatatactaacactagtaaagcaagctgagtttgtcttcaagtgtgggtgggggggtgggggggggg

SEQ ID NO: 529205 - DNA, 290 bp, Homo sapiens
gaaaaggaattagcttgggaaaaagagaaacatgaactcggcctaatgaagctaaagaatcgatttcgagatccactggaaagtgatactattgtggttcatgccatactgagtgaccacaagatatcctcttacaggctggtgcagccctctaagtactccaaattcaaacgagctagtcaatcagagagaaaaccaagcaaattggacaggtttgaaaaagagggacctggaagaaaggacagccagagagatgcaggtgggagtgttaccatacaagaagaatcaaa

SEQ ID NO: 529206 - DNA, 1069 bp, Homo sapiens
tgagcagagacaggatttcaccatgctggtcaggcgggtctcaaactcctcaggtgatgcgcctgcctcggcctcccaaagtgctgggattacgggcatgagccaccgcaccgggccaaatattggattttaaattcccatggttactggattaaaaaaaaaaaatctgggaccagttaaccgggagatttagaggctatagacacaatttaacatccatacgggccggggaacttcaggcagagaacaaacaaacaaacaaaaactctaattcagagtctctcatttcagcttagccaacactttgggcagacttaggggccagttctagaagctgggtttaacctctagactcggaggggcaggccctgtcaccgagggggggaaaactcttctgggctgtcagcccggattggaagccacttcgtttccccgggccccagctttccgtggactcattttcacccggtgtttgacacgggggcaaaccacacaaccactcaaagtgagcaaacaattccagaaaaaagaatccgagataaagaataaccaagtaggaagtcttcccatgggtagtatcacggctaaaaacaaaacaaagaaacacacgaacaaaagacagaaaaacaaaaaaggggggggggcgcaaaaaaaaatcacaccaggaggggggccacagttataagaggagccccagagtttattgtgaccaaagaggggggcaccccaaaagagagaggcagcaaatataaacaaacaacaacaggggaggccccggggaaaaaacaccacggaggagatagtagggaaaagaacatctgttaatagcggggagaacacaagagaggaaggagacacccaataaatgtagcggggcggcgacaaacattgttggggacaaactcacatccagagagaaagttagtaacgagccacgccgagagggcaaatataaacaccaataagagagtgtttgattagtcggtggtaaccacgaagcgggataatatatggcggcagacagaaaaaaaattgggaccagagcgaaactaattatcggagaaattta

SEQ ID NO: 529207 - DNA, 373 bp, Homo sapiens
ttataacctgcagaatgcaaactgtagtgcgatggagacaataaactaaactgaaggttcatgagcaagatctgacacgccgtgacgatcgactatgaaagggtttgccaggagaggactgtgactgaccaggatatcacgcggttccggaactctctgaaagagctgcagctgcagaagcagaaggtggaaggggagctgaatcggctgaagaggaccgcgtcagaagactcctgcaagaggaagaagctggaggaagagctggaaggcatgaggaggtcgctgaaggagcaagccatcaaaatcaccaacctgacccagcagctggagcaggcatccattgttaagaagaggagtgaggatgacctccggc

SEQ ID NO: 529208 - DNA, 124 bp, Homo sapiens
aagcagttatacagactcaatgaagcagagtgatgcatgacatggaggaagacgatgatcagaaagctgtgaagggatgaacggtaatacgcaaagccagacccgggcgctgccgagacccctc

SEQ ID NO: 529209 - DNA, 293 bp, Homo sapiens
  misc_feature (32)..(32): n is a, c, g, or t
  misc_feature (59)..(59): n is a, c, g, or t
cgaacagacagactacaccttatccatccacntcccttggaggctgccccgttacggcngccaaatggccattatcgagattcacaaaaacatagcctcatcatccccaccatcatgccacatcacctccttaactctattctactagcctatctatccactcaatcacatatccccatatctaacacgtaaaataaatgacagtttgaacatacaaacccaccccattcctccccacatcatcgccttaccacgctactcctactatctcccttttatactaataatcttgt

SEQ ID NO: 529210 - DNA, 269 bp, Homo sapiens
  misc_feature (4)..(4): n is a, c, g, or t
  misc_feature (8)..(8): n is a, c, g, or t
  misc_feature (42)..(42): n is a, c, g, or t
  misc_feature (86)..(86): n is a, c, g, or t
  misc_feature (204)..(204): n is a, c, g, or t
  misc_feature (219)..(219): n is a, c, g, or t
cggnggcnacctacgtcctgatcgacatggttctcaacaagntggccaaaggtgctaaagagattgatatcgcagcgaccctggancacttgagggaccagagacccggcatggtccagacgaaggagcagtttgagttcgcgctgacagccgtggtgagcgaggtgaacgccatcctcaaggcccttccccagtgagcggcanacctcagtgaggccnccggacacaaggcacgtttggcatttctctttgagagagtttatcattgg

SEQ ID NO: 529211 - DNA, 518 bp, Homo sapiens
agcgggttggtcgtcgtcctggatgctggcgagatagatgttatcttccagaggaagaggaggaggcggcgaagcgtttcccagcctcagtctctctttcgttttccttttcccttcccccaacctccgccttctctaaatcagcggcttccttgactcagtgacccgtctggcccgccaccctcgtgagtagatatcccgccgtgaggtaaagcgacggtggaaacctagagccccgcggaagagcagaacggtattgggagtgtgcagctccctgggcccggatcaggccccgatcgcacggagagcacaggcgccaggggagcgctcagcgagtgggagtactccggaaccctgccaccacgtcgactcgcgacgtacacttccacggacatatggaccataccagtacatccacccgacgcgggattcggggactactgggcacacagcaggagtggcacagccaaccgggaaccactccataggtcgaccggcgggcgacgcctcccgccacg

SEQ ID NO: 529212 - DNA, 175 bp, Homo sapiens
ccttcgtgctgatctgactttatccctaagggcagtggggagaacctattgaagggttttaaggtggggaataacttgggaaatgcagtttaagaagctctgcaagtgaattcacctacttctgtggcttccaaagtgacttttatatagctacaattctgtgtgtgtgtgtttt

SEQ ID NO: 529213 - DNA, 339 bp, Homo sapiens
agctgttatcttagtgcagcaaagcccttagaaggtataaccaggcacccataggctgtgaaagtaccttagaggagtgtgcttagagtagagtgatggcagaggagaaaggcaatcagaagtgtttggaaagctcaggaggctgaggcaggagagaattgcttgcacctgggaggtggaggttgcagtgagctgacatcaagcccctgcactccaacctgggtaagagagtgagactccatctaaaaaaaaaagcttggaaagttacagcggtaagatctgctaaaggatttgatgagatgggtatgagataaagaagatttaaaattgtcttctaga

SEQ ID NO: 529214 - DNA, 795 bp, Homo sapiens
ggggaatacatgtggaggtcagagtggtagtaggtgtgagatgggtcagcagaagtgaaacatggctgtcatagtgtttgatgtcattgtcaatgtttgggctgttcttagttgttgcaggaggcgtggtgaactctgccttactataatgtggatgctgcgaacatagtatgtccatctttgacctgatccgtgcgcatgtgcaggacgacttgtaggtagtgggcagggactcattttctcatcccgtgggtttctgaaatcaattattttatgactgccgttctcgatccacgtaatgtgccagtcatctacgtggtagcaaacgatttacgagaatgtcaacatcagcactgcgcatcctcttccggtcctgtcgccagccagcttcctcgcgtcttcaccagacatcggagaggactatgatgagcgtgtgcttgcgtccatcacaactgagatcctcaagtccgtggtggctcgctttgatgctggagaactaatcacccagagagagctggtctccaggcaggtgagcgacggagcttacatgagcgagccggccagctttgggctcatcctggatgacgtgtccttgtacacatctgaccttcgggaacggagttcacagaagcggtggaagccaaacaggtggctcagcaggaacgcgagagggccagattgtgtggtggcaaaggctgagcaacagacaaccaggcggccatcattctctgctgagggcgactccaatgcagcctgagctgattggccaactcactggccactgcaaggggatgg

SEQ ID NO: 529215 - DNA, 948 bp, Homo sapiens
gctgagattgctggaactataggtgtgtgtcaccatgccggcctaatgcaatccagttgatgtgtaaagatgaggtctcactatgttgcccaggctggtctcacagatcctgggggcgtcatagtgatcttcaacagtctcataactcccgaaagtattagagctctgcgaggtgtggagccgatcgctgcacacctacctggatttaagataagtgctcgttcttagaataactaggtgtgatcaagtttgtcatccaaggtgatatgacttcaaatagctcacaactcttataggagcattgtttgcagaatgccaagtgattttagtggtagtgcaaaaaaggcaacgtctgtaacatatgtgtattatatgtatacataggtgtcgcagtttcaatgattcttattctctaaaaaagcagcagtgaggtctccactgtgtttgtgccaggctccgtcttggacactcctagggctcaagcactccttcgacctcaaactctcccaaagtgctggggatgaccaggtcgtgagccacatgccgtggcttatggcgatatgcaagagagattggttctgagccacatgtgaatggcatgacccatgaacaactcaggaggtcctgagatcatgtgaccaggtggtttgggtgatagcttgaattttactaccttctgagggtggccgcagtgcgggcaacgcgcactaccatttgggtgtgcctgtgttgggccggaagaggggactcccaggtgaacagtacacgtccatgggcagaaacaatctcggaggactgggggagacggggaaaaaccgtacaccggacacacggggcgggaaaaacccggcacaaagctcaagaagaatataaggccaagcgaacagacctcaagaagagaaacaccacaagagcaagaggacggcagcgcaaaagcgaggccaccaa

SEQ ID NO: 529216 - DNA, 913 bp, Homo sapiens
aaggaggagcagccgccagtgccctcgtcgcccacagaggaggaggaggaggaggaggaggaggaagaagaggctgaagaagaggaggaggaggaggattcctgaggtgcagtggggatgctgcccaaggatggccccacctgccactgtcaccccctgcagcctggccagccgctgctgagtgaagacaataatgcctgacctacgactgagcagactgcagtgccttcatctgaatgctgcccgaggaggccctgcaacagagttcggaggagtgccgagctggtctgcttgaagtgacgatggagcgagtcccatcatgtgaaccttggatgcaaggacgattctctcttttgcacttttggccgccaaactgggagagtactgacttacgctgtagcagaccagatgcatacgatgcatcactcacacaactgaactactgatctacacgcgctcgtgccaccatatcaatgctatgtcgtcagcatgacaacccgaaactcgagggagcatcatccgcacacagcaccttgcgcagccatggggactcactggacttggcgccctgaccacagacagagtaacagatgccattgcaacgtatgcaggccatagacaccgggactgcttggctagaggcccctaaaacgcatacgaccaagcgctagcgcgtccatgtgacggcgaaagacgaccatcggtgatcatgcaaccaacagaggccgagacgactgagaaggtaccatcatgcacgcttgatgacgacccagccggactggcccgggaagccaaccgccatgaagcacaccagcggaagacgaatcaatgacgagactctaacatcgataggacgcagcagacctccagcaaggcatgaaagccagccacagagaggccgaacaccgcacct

SEQ ID NO: 529217 - DNA, 310 bp, Homo sapiens
actctagaggttaacgctgatccgcttaagggcgggcggtatgagagtcaggcccagtgctgtggctcccacctctaatcccagcactttgggaggcagggcagaaagatcacttgagctggtctcaaactcctgggctcaagtgatcctcctgcctcggcctcccaaagtcttgggattacaggtttgagccaccatgctcaactggaatcttttaatgtaagaccttttatatatatatatatttatatttatatttaaagagatggggtctcactatgttgcctaggttgtagtgcagttgctattc

SEQ ID NO: 529218 - DNA, 110 bp, Homo sapiens
tggagatgtattgagagcagggtgaattgtggttacgggcactgtaactgtgcagttacatgatagtgaagatgggacgtgacacagtggtcacgtctgcagtcccagta

SEQ ID NO: 529219 - DNA, 590 bp, Homo sapiens
gatcacctggggtcaggagttcgagaccagcctggccaacatatagacaacatatatgttacaacatatataatggccaacatataatacaaaaattagctatgcatggtggtgggcgcctgtaatcccagctactcaggaggctgaggcaggaaaattgcttgaatccgggaggcagaggttgcagtgagccaaaatggcaccactgcactccagcctgggtgacaaagtgagactctgcctcaaaaaaaaaaagaaagaaaaaggctgggtgcggtggcttatgcctgtaatcccagcacttggggaggccaaggcaggcggatcacgaggtcaggagattgagaccatcctggctaacacggtgaagccccgtctctactaaaaatacaaaaaattagctgggtgcggtggtgggcgcctgtggtcccagctactcaggaggctgaggcaggagaatgggcgtgaacctgggaggcggagctggcagtgagccgagatcgcgccactgcactccagcctgggcgacagagcgagactccgtctaggaaacaaagaccgcaacgaaagaacaaaacacaaaaaggggg

SEQ ID NO: 529220 - DNA, 456 bp, Homo sapiens
  misc_feature (34)..(34): n is a, c, g, or t
  misc_feature (37)..(38): n is a, c, g, or t
  misc_feature (282)..(282): n is a, c, g, or t
  misc_feature (372)..(372): n is a, c, g, or t
tgaagcgctcaaagaccaaggtttggttatgaangcnnaggcggctccgtttattgtatattggcattgtcggtgatactgggcgtttcatgtacagtatggatcaagaaactttccgcgtggtatcagaattatttggttatgatttcgactacgaagctgttttgcaccatatgtcaacatttcggaaaatgctgctaaattgtcgggttatgtgctgcaaaacctcacgattttaccatcaggatttgcctatgtggtcttaaccaaagcactcttggnacaatttgatctgcaagattcaggcacggcgtttgttgtgccattgccggcgacaatcgacaaggttaaggcatgggcgatttttgagancaagatgaaggcattatcgtgtgcggctccgtcacggcgattgtcattaacaaattgcgaccaatttagggtggggcatccaat

SEQ ID NO: 529221 - DNA, 453 bp, Homo sapiens
  misc_feature (224)..(224): n is a, c, g, or t
  misc_feature (243)..(244): n is a, c, g, or t
  misc_feature (254)..(254): n is a, c, g, or t
  misc_feature (256)..(257): n is a, c, g, or t
  misc_feature (272)..(272): n is a, c, g, or t
  misc_feature (292)..(293): n is a, c, g, or t
gatggtatagcgatgagtagatttatgcaagttttccccaaatgttaaggcattaaatggacagattaatggtaggttgtatgtttcatcaagctgagcagttctttgtgttagatttgaatgccctggcctttttaaaacagctttattggagtaatattttcatccataatattcaccaattgtgttgctatctactgaaaatgtacaatttaatacttttntgtggaaatttcatagganngcagttaccnanntcatcactgtaaccntcaattttaggatattttcnnatcacctcaaaaagaattcctataagccattttgcagacagtctgcacttccagcccaaggcaaccactgatctgctttcattctctacacatttgccctttctggatatttcatataaataaaatcatacagtgtgtgtttgtgtgtattagtttacca

SEQ ID NO: 529222 - DNA, 258 bp, Homo sapiens
aaatagtatcactgtctgtggcaaagggtacactagtgaatgatattaatcagcctccctgtaattgtagctttccagataagctcagttgattggaaagtggtactattttcttctaacaactccccgacttaataggactttaaaagtagcaaagctgttctttgggataagtgttttcttctgggtgctattgtctggtttaatagaattcaaagcctgcctaagctgtctggaaagcaaacttcaagcactgga

SEQ ID NO: 529223 - DNA, 762 bp, Homo sapiens
  misc_feature (3)..(3): n is a, c, g, or t
  misc_feature (103)..(103): n is a, c, g, or t
  misc_feature (127)..(127): n is a, c, g, or t
  misc_feature (192)..(192): n is a, c, g, or t
  misc_feature (201)..(201): n is a, c, g, or t
  misc_feature (215)..(215): n is a, c, g, or t
  misc_feature (219)..(219): n is a, c, g, or t
  misc_feature (233)..(233): n is a, c, g, or t
  misc_feature (249)..(249): n is a, c, g, or t
  misc_feature (318)..(318): n is a, c, g, or t
  misc_feature (320)..(320): n is a, c, g, or t
  misc_feature (347)..(347): n is a, c, g, or t
  misc_feature (364)..(364): n is a, c, g, or t
  misc_feature (374)..(374): n is a, c, g, or t
  misc_feature (381)..(381): n is a, c, g, or t
  misc_feature (383)..(383): n is a, c, g, or t
  misc_feature (387)..(387): n is a, c, g, or t
  misc_feature (392)..(392): n is a, c, g, or t
  misc_feature (411)..(411): n is a, c, g, or t
  misc_feature (413)..(413): n is a, c, g, or t
  misc_feature (419)..(419): n is a, c, g, or t
  misc_feature (421)..(421): n is a, c, g, or t
  misc_feature (444)..(444): n is a, c, g, or t
  misc_feature (449)..(449): n is a, c, g, or t
  misc_feature (455)..(456): n is a, c, g, or t
  misc_feature (458)..(458): n is a, c, g, or t
  misc_feature (477)..(477): n is a, c, g, or t
  misc_feature (490)..(490): n is a, c, g, or t
  misc_feature (521)..(521): n is a, c, g, or t
  misc_feature (524)..(524): n is a, c, g, or t
  misc_feature (529)..(529): n is a, c, g, or t
  misc_feature (540)..(540): n is a, c, g, or t
  misc_feature (544)..(544): n is a, c, g, or t
  misc_feature (549)..(549): n is a, c, g, or t
  misc_feature (565)..(565): n is a, c, g, or t
  misc_feature (627)..(627): n is a, c, g, or t
  misc_feature (661)..(661): n is a, c, g, or t
  misc_feature (674)..(674): n is a, c, g, or t
  misc_feature (684)..(684): n is a, c, g, or t
  misc_feature (694)..(694): n is a, c, g, or t
  misc_feature (755)..(755): n is a, c, g, or t
gtngtgggctcagggcagaaatttttggggcactgagacataggactgctcccaagtgtgttccagttactgctgggtttggaggggctctttaaaggtcccnagattcaaatgttcttgtagcagntgaagagctcttggctggacggatggttccagtgggggcctcctccttccccactcagttctttncttccccgnggcgcactgggcgnaggnagtggccagctgcngcgcctcctgcaggcngccaacgttcttgcctgtggcctgtgcagacacatccttgccaccaccttttccgtccatcaagcctgncncctgctgcacccactcgctggcttttnagccccgattggctgcnttctgggggncttgacncnggcncgtgntcttgccagcctcattgtncnccgtgnanagcatggcagatgtctgaggggngtgcntcttgnngngcttcaaggcttcattcanggccttggctgangcgccgctctccatctccaggatgacaagangcnagttngggttgctgtngaanaaatncttcgtcttctctaanactcgtttctggacatcggctttgctggctcggtccaagtcatccatgaccttctttagggntttgagagtctcccgcaattcatccttctgccantgggggatgactncagtggccanggcctctccnaagtcagcgatctccctctgcacatccttgtttggagcagtctgagcttcactttggcttncatgaca

SEQ ID NO: 529224 - DNA, 883 bp, Homo sapiens
gattaaacggttgcaggcgtagcagagtggtcgatgtctttctaggtctcagacggtcgtcgacgatcgttcagcacgctcgtctctgaggctcctgaatgcgcgaaacctagctagactttctctctcttcccggctgccgtgtagacggacgttgtagccactccgacaacatgttcgaggcgccgccggggtccagggctccaatccgtcaagaaggatgtaggaggcaggtcaaggacctcgagtcatacgtaggcctgctgggatattatgcttccaggcggatgtaaaccttgcaagagcaatggacttcgtcccgacgtctctttggtgcatgctcaccctgaggtctgagggctgcgacaatcctacactgatgcgatcggcaaccctggccaatggactgtgaaccgtcaccagtatgtcctacagatacgtaaagatgcggcgcaggagacaggaaagatatcagttagcacgtaaagggccgaagataatcgcggatacacttggacgctagtatttgaaagctaccaaaacctagggagaaatgttacagagctgagtgaaatgaagtaggagtggactttacgatgttgagacaaacttggaatattcagagacaggagtacaggcatgaggtagctacaagaatgcgcgttcctggttgcacatggcggctaccgtgaatattgaccgaggactcatcaaggactactactgggcacagaacggctgggcaggtcaatacccgtggggcgcagcaccacagggaagggaaaaatggacggggcacgtggcacgacacgaagggaacatgggcagacatgtagaaagtggtaacacaagaactgggacaggagtagaataacgggaggag

SEQ ID NO: 529225 - DNA, 791 bp, Homo sapiens
  misc_feature (89)..(89): n is a, c, g, or t
tggggaccccgaaaattctgcacattatagggcggggcatctgaccgcgtgctctctaacgggggagagggggaacagtacggctctcnctccaaacaacagagcgcacccacgacgcgagtgagatattacctcgccggcgaacgtcatatgcagcgcgcacacctctccctccacatcctaaaccgagggagcaagacagagcaagaaggaagaaaccacaacgaaaccaaaatacggcccatatgtcgcggtggtggtggggtgtgttggtgtggtttcaggggtcacaaaatgacgctgtaaaagaaatgtagggggtaggaagttggagagacagtctggttgtatttatatttttttatataacggaagattgtttaaagagatgttagggttgggagtgattgttaggagaattatacacaataataaaaagtttaacaacgtgagggcgaagaaggaggaggtaacgaagggctagacacctcgatacatccacgattgtcagtatggccgagcgagggcgtgtgtgtagcatagttatgttcgatgtgctaggccaccacactctattcgtcagatgcacatgatcagtgttacggtcggggactgagtcgagtcaacctgtcaggccggttagcgcgtagaacggtgaggagtagatagacggagagtattgatatgtccccgacatttagaaccgggatgcgaatccatggagggcactgtaaggagggaagagaggacgatatacgagtaagaatcagagtatagaggaaatgattggt

SEQ ID NO: 529226 - DNA, 1111 bp, Homo sapiens
ttgggggggggcgtctcaccgagaaggcccccctacatagtgttaatgaagtcgttgctgccgggtattgcgcgctttctcgctaaagagggttctccccgcggcgggtgatcgtcctcactacagagggggcggttgtccgcaccgacagtggattgtgtctccacaggggttgtgtagtgccccacaataaacgagaaaggcgccggctttgagagaatttgtgtcgcgcgcggtttaaatagacttgatcagcggtgttctataatacctgtacaaacaaaatggcgtgtttcccccctcgcgggttcacaccttagggtctctttctagagggggcccaccgcttatgtgatatggcgccacttttggttgcatactgtgtgggtcccgctgccctcggggttgggggagaagtagaaagaacacactttgccgagtagtttgtccccgttacatactcgttggagacatgggtggcccacataagaagacaccacgcgggttatataaggtgttgtagaacgataacacacgaatatgtctctttggagaatttttagacccgctgttttttttgtttggtgcacaaagacactcgagagcacacttcctctcctcgcctcgaaagggtgttcttatagtcgtaatgtcccccgaggtggactcggtcccttcctaactctctataaggtcactctatacctctttataaggtgggatattatatgagaaggccacgcgtgtattcaaaagggagtaatgtagcccacgctgtggggtgaaaactcacacaagtataaaaaaggtgacaaagagatttgctttgggaataaactggtggttcttcttagagggatattttagagagtccacacgttggagggcttcttttcccccctcccacatgagagcttcttggtattcacgaggctcccagaattagacctcgggcttaccaaacactaggggaccaaggtagggaaaacctgataacaagagcttgtgacagagaattggacaattggggaaaggcccttttatgccttatgggtagctttttacccggtaccctttttacacgtggtaaattaaaggaacgtgttgtcca

SEQ ID NO: 529227 - DNA, 878 bp, Homo sapiens
taacccctctttagcttaatgcgctcaaaaaccaatttaaaccccccccccttttaacagggggggcaggtgacaaaaggcaaagaacgcacagaagccagccttggaggaccaccaggttcctgtgccccccgccatttaattcgccctgtgattgggattttggtttatcattcttgctcccgtgtggctggggtgagattgtagaggggggagacgccttctctgggggggcgcatctgggccatctggagccccctcttggagaagacagtgtcacacagaggggagattggggaagacaggcgccatctgtgtccggggctcgaggtctttctggggggaccatgtggctttggtgtccccacagagatatgttctctgagaggggcgcgggacgggggcgggtgtctgggcgacagggggtctcccctctcacaagagttttgtacagaggagagggagtgcgctccagagagggcgccaaaagagaaagggggagagcccccactagaggctgggcctcaaagaagagatgggcccccagacagggggagacaggcgggacataaaccagtgtgtgtgttgttacaaacaagagggggtcacacaaacaaggaagccagggaggacgacaatgtgtgggcgacgtggcaattctcgcgcgcaaccacgtttgagagagagaaacgacctttcaccactattatcacccttaggaggagaaacattctttgtgcccccgagccccacttataaagacaccccgtgagacactttgtgtcttctccagagagaagttgctctcaagaaaagcacttgtgaggagaacaccctgcttggagaggagcccaataaggagtgggaataaaaggcag

SEQ ID NO: 529228 - DNA, 463 bp, Homo sapiens
atgagagcccagaggtaacagacaggctccgggttatcgaaataccaatgttaaggaacttctttctcagtcatgcataaatatgcagtgatagggcagaagcccccagagcagatgcagagacccattttgtgaatggattggattatttaataccattcccttactgtggaggaaggattgtaaaaaaaagccctttgagccagtttttaagctttttaatggttgtttctttcaaggggtcttggtaagagggaaaaagcatcccttctttgaaaatgttaaatttgtaagtttcaggggacagggggaccccttttttaagatttttctcaaagttttgaaaagctattagccgggatcagggggtaataagacaaaacgttttccctttaaaaaaatttaagggggggggtagagttaaaaagctgttgtccatttatgatttaataaaatattttta

SEQ ID NO: 529229 - DNA, 289 bp, Homo sapiens
  misc_feature (249)..(249): n is a, c, g, or t
ccgaggattccaagcttagcgaggatctggctgtgcgttagagactggaaactgtgtttaaagaatggataagcaaaagaacttcagccaagagaagctgcatagatacacataatgcctgctctgcatttactaatttgttcagtttaaatagtaaactttttactcctgtggaaattttgccaaacgtttcaatacactatagattactatatcttaaaactaacactgcacagagaaagacaaagnctacttctttttttttttttgggaattccaagtttctcct

SEQ ID NO: 529230 - DNA, 176 bp, Homo sapiens
gcgtgccgcttgacttctgctggtcgtctcttcgacggtctcccgcccggtctgtgggtcgaccgcgggacgactgggtgcctcgctcgtccgtcggctgggccgcctccgggctgctgctccttgtgcgggggtgtgctttgctgcgctgtcccccccggggtctcgcgctctcc

SEQ ID NO: 529231 - DNA, 789 bp, Homo sapiens
gcgcgcctgaatcccggtcccgaaggccgttgagaggactaccaaaagaagtgggcgccacaacccccgcggcggcaataaataacccgagaagcgtggaagcccctcccccagaagaatggtgttgcgcgaaagaaatcttgagcgaggtttacagagaggtgtcctaggcgccgcaaaagggcggaggaactcccccccgtacatagggccctgttgtgtctccccccaggtcccccgcaccagtgaaggtcccgggggaacaatatccgggccaaaaaagggcccacccaagctatccccgggaaatatattatgtgtggtctgtagagaaacccaagaggcgacgtcgcttctttctctaattgcagcgcaccatttctctggcggtacactccccctgaagaacgaggatatttcttttctccagcaagcaagtctgcttctgaggctcctgttgttgtaaaagcccccacacacatgtaggcgacgaccacaacttctaaaccatcgggagtattcaaaaaccaaaagagcgagcacaacatctgctaggacactctacggggtaatacatcacaagagtatgcggcaggaaaatgatcggatagaagatcaatacatgatccaaccgccccccccgtgacaggcgccccagtggtcccccgccgccggtaaataaggccccttctttccaaaaagcaaaacaaaaaggggcaacacgagaagatggaaacaaagcccacttctgtttccccttttcattttctacccagggcccacataaca

SEQ ID NO: 529232 - DNA, 288 bp, Homo sapiens
cgcacgtatgtgtcaggcggctgtgatgcctctatcaagctgcgggaagtgcgggattccatgtgccgaccgaccttcatcgggcatgaatccgacatcaatgcagtggctttcttccccaacggctacgccttcaccaccggctctaacgacgccacgtgccggctctttaacctgcgggccgatcaggagctcctcatgtactcccatgacaaaatcatctgtgacatcacctctgttgccttctcgcgcagggaacggatgctgctcgctggcctacagcaaatg

SEQ ID NO: 529233 - DNA, 131 bp, Homo sapiens
aggaaggagttaattaaaatgattttattttggtctgaaggatgtttttttaaaggaaaattttttttttgaaccctcagcccacttttttgagggccggaaaagggcttgtaaatcttttttttttttta

SEQ ID NO: 529234 - DNA, 433 bp, Homo sapiens
cttgtaaagctagagaacgttgcctgtgggggattgagatgcaggattttttcaaccctctccttggggactcaagaggcctcgggcatttttttttgcaagggcccctgaatgggtttgggttccggttagcaaaatgtgagggggtggaaagacggccccccccggggtccccggtgaccccggtccccacattgacctgggttccctccccgattttttttcctgttccaaaaggggggggggggaggttcccatttttgtttcaaattcagggggcactggggggccccttctttacttccctaaagaggttaagaccctgaaaataaatttgggttttcaaatttttggtatgaggggttggggggttaattaaataggtcaattcctagaggttgggggggcaaataaagccctgggacccttccca

SEQ ID NO: 529235 - DNA, 105 bp, Homo sapiens
gctagaggacccgacttaagtctacgtctgatcgacactcgtgagcgtcggtccccacaccttctataccaccagtgagtcctaggttctggatggacactcttg

SEQ ID NO: 529236 - DNA, 287 bp, Homo sapiens
  misc_feature (124)..(124): n is a, c, g, or t
  misc_feature (143)..(143): n is a, c, g, or t
  misc_feature (212)..(212): n is a, c, g, or t
  misc_feature (265)..(265): n is a, c, g, or t
gaattttacagaccgggagcggtgactcatgcctgtagtctcagcactgtgggaggctgaggcaggaggatcgcttgagaccaggagtttgagaccggcctgggcaacatggcaagagcccgtntctataagaagtgaaaganttggctgagtgtggtggctggcacctgtagtcccagctactcggcggggtggggcagaaagatcgcttnggccagggaatttgaggctgcggtgagccatgatcgcattactctctaccctncagcctgggtaacagagcacgg

SEQ ID NO: 529237 - DNA, 625 bp, Homo sapiens
agttaactttaaaacaatgtcaggcaggtccttcaggaagtattccagaagaaggcattgttaccacaggagtgatagctctatgagtgtcactgcccccaaagaccctccagggggacaaaacgtggaggtggaaacaatgatactgatgatcctgaccctggttaggcctagcctaatgtgcgtgtccgtttttaacaaaaaagcttaaaaagtaaaataaaaaaatttaaaaatagaaaaaagctatagaataaagataataaaaagcatttttgtacatctatcaaatgcgtttgttttgagctaagtgttattacaaaagaatcaaaaattaaaaaaataaaagtttataaagtaaaagttataataaggtaagattaatttattttgaagaaagaactattgtttaaataaaattagtgtagcctaagtgtacagtgtttataaagtctacagtagtgcacaataattctagaccttcacattcacttatggttactcactcactcgcccagagccatttccaggctccattcatagtgcccctagacgggtgacccattttttttctgtttccctcaccttattttttctggacttttttttgttagaaacaaaaaac

SEQ ID NO: 529238 - DNA, 1618 bp, Homo sapiens
tattaatgagtccccggaaaaaagtggttgctttcctataatatgaccatactggaacgcctggcagtctggttccccgtttaagaattaagaatatgtattttgagaaaatatgtcaacaaaaaaatggtaacacattctgtgaaaggatcaccttctggtggacactatgtaattctcttaacacgctgggtgtggcccttttctcaagtgtgtgttccttttattttaaacgcttggcgtattattattttaatctttaaaatattggattttcactggaaatattcaatataacttcacacctgtgtgtacatggaacatgtgtgtgtgttttaaagaactcaagaggggaaactcgttgtgagagacacacgagaagacacccgagaaagagagagttaaacaccctttttctatgacacgagggggctgccagacacaacaataactcagagcccacatatctctgtggcctaaatattctcaaacaaacactaacccgagtggtctctttatagtgtgggggtgcagaacaccctgtgagatctcccagaagtggccagtggagtgtgcccccctatgtgggggaccatcacccgtgtgaagggcagtgtggtgggtggaccccccatatattatgtgcaattttcctttaatcagggaagatggggttccaagacaatgggcgccacacactgtgttttcacccaaaaatgtgtgtgcgccacactttaactattggggaactcatattacacgcgtgttccatctcatataaagcggggggcactacagtgagtgtgtctatattcacaaacacaacaacaccccgaggggaccctgttaaggagaccacaaatttggggccccctgtaaggtggctccacacccttgtgggagagccccccgttcacaacttaatacttctgtggggccccgtggggagccatacaacttaggggggacgagtgtgggagcagaggacccacttatgcggttgtatttacacggagaacaacaaaaacgcagtttgtactacgtggtatagcgaggtttcggcttcataacaccgacttatcaaacaagtcgcgcgttttataaaccactctcacacaaaacagaaacacacaaaacgaatcaaacagacgaccaaccacaacaacaccaaaggggggggggggccgactcactcaaaaaagaaattaccacccaacgaagggaagggagccaccaccaccatcttaatcccagatccacccaccggtagtttgtttggtaacacaaaggggggccccccccactacagagggcgggcacgcatattactataaccacatagcgaacagagcgccgccccccgtactcaccaacgcgcccctgtccgcgtgggacaaccaaaccaccaacctatgagaaggcaaatattgacaggcgcgaccaccacaccaaccgggagcggcgcaccacactaagcggccacaaccccaccacaacagagtaagatacaccgagtgcgacaaaaaaactacgaggaaatcgatgaaacacccaacgacattggctgctcgtagaaagtagcgcagaaaagcaacacacagcaacgcacaaggacagc

SEQ ID NO: 529239 - DNA, 1081 bp, Homo sapiens
tatgatctatttgggacccaaaaaatgttgcattcaatttaacaaatatggcagatttttcagtaactaacgtcttaacggtcttctaaaaggaagctggttacccttctgtcttgtaacttaccacttacattgacaactgtggttttaacgagatacaactttcaggcactagtttctagtagtacttaacttgacattacattgaacactgtcgttcttacacgacgactaccaactcttcatgcactacttttactactacttaaaaaaccaaacaaacggacttacggtacttgacagccagttgggcccaaaagggtacactacttacctacccatgttagaactgttatagttcaaatttgtcccacttcacccagaattttagaaactagaagtctgggaggtactatatcagctgtagttgggtaattccaagtgctgatagtactattcatctttttcattatggtgtcagatgaaacaaatgccaaagttgcaaaatatgcagatttttattatataatggtatcaggcataaattattaacaagccatgccttatgtgttacatcttatattttactttcagaactaaactataacagattctcggacaatgactctgacttgcttgctcacttgattgacttgggtccgcatactctgaatgatggtattacctagattctaattccttggatacctagattatcatcactacataactattagcactttgcaccacttatggtaggagcacttaactggtacactctacatgtccgtaccctcacatacaatgaccacacttacacactatgaactgcgcacgcaggaatcgagaaataaagagatacagcaccacagcagagcagcgaacaagagcacaacgaattaacatgcccccaacaaggacatcaaatacacgaacagcgacacgtagagcggcgaaccgcagcactgtggaaccagcatacagagacaagcgcagagcaaacagacaaagcggaacaagacacaacgcacaggaaagaacacacacaacacaagtgagccacacctccggaccaacaaac

SEQ ID NO: 529240 - DNA, 193 bp, Homo sapiens
cctgttgtacgatcacgattctgagactatggtcgttacctatcaagggttgccgtagcatgtcccagactctgctcgtaatcaggaggctatcagctgtacttaagacgccagcttatgcgccgaataataggtgtagtgttccaatgtcttgactggtagaaccctagcgtcaacggtcggcgaacatcag

SEQ ID NO: 529241 - DNA, 238 bp, Homo sapiens
gggggggtttttttcccccccccccgggggggggtttggggggggccccccccccccccgggtttttccccccaagggggggggggggttttttttcccctcccccccccttttctttttttggggggggttttttccccccctttttgggggggttttttttccccccttttgggggggggttttttttttttggccccccccccttccctttaaaaaggggggggggggggcccca

SEQ ID NO: 529242 - DNA, 908 bp, Homo sapiens
  misc_feature (100)..(100): n is a, c, g, or t
  misc_feature (121)..(121): n is a, c, g, or t
  misc_feature (422)..(422): n is a, c, g, or t
  misc_feature (452)..(452): n is a, c, g, or t
cccaggacagacccagccgcatgccagtcgagtgagggaaaagtcacaagaaatgttctctccagaacccttttctcgggaaggaggaagttcaccaaanggagcagggaagagagtcttntgggattcaggaagcaagggtgtctcaacagcagggcgctagggagggtctcgggggcaagaggctgggtacatttgctcgcatagcgtggcccagagaggcagctgatgaggcagtgaggtcccgggaggccaggggtggtccagggccagggtcagagctgtgggctgacacagccagggcctccctgtctgctagcctccatgcttggccacgggaaggggaggtgggtgggcggcgaagaccacgcacacaggccacctgggatccaggtagggagggggcagtaggttccttgggngggctctgatcagctgggaggacaccgtgnaaggcacggtgtggaaccagaggatctggaccctgttggctcgaggtcctgcagccacggaaggagggggatgtgtctcagcgacactggaacctcagagggccgagtgtgagagcccttgggatggacctcagaggtctgagtataggagcctctgggacagaccaactcagggagtggaggcccacgctctggctgggaaatgacaggtggaggtgagggacccctggggcggtggacagtttggagaccaagtgcagagctgctcctggcagctcagagcctggggcagaggagggtgatgtcccaggaaggaagctccacgcaggcctgtagagcacagcagggtctggctcctgtgggcagggtgggacctggtctccctagacgctggaccagccctgcctcctcccggtgcccatcatcctgcaggctggacctgggccctgccttttg

SEQ ID NO: 529243 - DNA, 445 bp, Homo sapiens
cacattgcccagaggaagtgctggtgccggtccagtaccacggcaactcggtccacgacaaaaaggtcatgaacgccggcagctcatcgccggacgcctggcgcatcaggtacattcccatggcataaccgcccagcgcaaagaaccagtccgtgcccgagggacaacatcccggcataaccccacaccaggtccaagcccagggcgacgatggcgtagcacagaatcttgcccaccaacgtcagggtataggcggaaacgtgcagcggattttccggtgacaacagcgagaacaacgcagcgccagcagcaggatcagcaccactgcaccgaccgcgacggtcaccttggggcggccttttgcgcggccgtaagcatcaatggctggttcatcagtcgatcacccgtcctttcagtgcgaagagtcttgcggcgtttctggatg

SEQ ID NO: 529244 - DNA, 305 bp, Homo sapiens
accgcccacgtctacgcccgtcccacctccaaggatctatccttcattacagagtggtgtttccacatgtctttcatctgcataaacttcaggtcccttctcccgttcctctattaaacttctatttatcctttaaaagctaagtaagacatcctctcctgcaggaagttttctctgataccctcctactcaccgtcagattccccatcctttatatggtgtccaaatagtcattgtttcaaaaaaacatttaaaagataggaagtttctcttcatctcaatgcagtgaggtgggaggagaggaa

SEQ ID NO: 529245 - DNA, 180 bp, Homo sapiens
catacctaggctggaacgcgtgctatgatcttggctaactgcacctcagcctcccaggttcacgccattctcctgtctcagcctcccgagtcgctgggactacaggcgcccgccactgtgcctggctaatttttttttttttttttttgggttattttaaagtataaagacagggtttaa

SEQ ID NO: 529246 - DNA, 690 bp, Homo sapiens
agcgtggggggtgagcgaagcttgtccggttcggcaatggacggaatcgtcactgaggttgcagttggcgtgaagagaggatctgacgaactactctcaggcagtgttctcagtagtccgaagtctaatatgagcagcatggtagtggagggggggagggtaatgatagtaagaaaatttaaaggagaagataaaatggcatggtgctccttctcggtgtacttcatattcgaaaattacctggggaagtaacagaaactgaagttattgtttaggcttacgcgttttggtaaggtgaccaacatccttatgctgaaaggaaaagactcaggcatttccggaactagacaaccgaggaagcgagctattactatggttaattactattctgcgtgtgacacctcatcgttcggtaaccaaccaatatatatccagtactcgaatcgacaaagaactacgagacagatcaatacattaaagcaacgtgctcaggcaggtcttccaaggctgtgacagctgtccagacagcaaatactcctcttagtggcaccacagttgagcgagagtgcagtgactccagcccagagtccagtacttagaataattattgaccacatgtactaaccctgtaacacttgattgtacttcaccaaaatatcttcctaaaggttggtgctgtattcgacggat

SEQ ID NO: 529247 - DNA, 590 bp, Homo sapiens
  misc_feature (41)..(41): n is a, c, g, or t
  misc_feature (199)..(199): n is a, c, g, or t
  misc_feature (301)..(301): n is a, c, g, or t
  misc_feature (379)..(379): n is a, c, g, or t
  misc_feature (388)..(388): n is a, c, g, or t
  misc_feature (415)..(415): n is a, c, g, or t
  misc_feature (473)..(473): n is a, c, g, or t
  misc_feature (477)..(477): n is a, c, g, or t
  misc_feature (486)..(486): n is a, c, g, or t
  misc_feature (513)..(513): n is a, c, g, or t
  misc_feature (531)..(531): n is a, c, g, or t
  misc_feature (551)..(551): n is a, c, g, or t
  misc_feature (571)..(571): n is a, c, g, or t
  misc_feature (583)..(583): n is a, c, g, or t
gaattcggcacgagaacttatcatatgcaaaagcttaggtnatttgcatcatcttctggcccggaggctgtaaacattttaagaccttttcttcagaaaacttatttttctctaaaggtggttggtcaggagccaccctccaaaaaagcattagataaagttgcattcctacagagcaaaggtgtggtgggctataacnagaaaaagaattaactcaagggtcccaggttacaaacattaaagctactacttcaccaattatattaatcaatacactgccagggacacagcaggtaagggntatggaaacttagcagcaaacaatggcccaacaagtggaaaaccattcaccatacaatttctaatcatcttgtaactncttcaaagnatctgtgtttaggcagtttggaccatntcctgcctttcacagttgggggggtcttgaccattcccatgtgggcccggaaaacccntttntgggaaggnttgggggttcccaaagggggttttttngggtaaaccattttccancccgggggtttttaccttgnccttttggttactttttttnaggggggggtantgggggg

SEQ ID NO: 529248 - DNA, 645 bp, Homo sapiens
gaacaataggaaacgtcaaaatgggatagtcggcagttctggcccctgcagctggaggtcaccctgagttctgagggtcgtagtgctgtggtctggtattctcatcgcggtcagcctcgtaccggtgtggacgaaacgtaaagttggaaccagcttctccatggcctgggcaccagttcccggttgagccattttccttttgctaaaagtccccgcccagaggccaattcgtcgcggggcgagtggagatcgcaggtcgctcaggcttgtagatgggtcaagggttgtggagagtgggtcagaaaccagcaggtgcaaaagaaggctacagtgagcaagggtactcaccagagagcagagcaggagaatggtgtgagacaacatttctaaaagcaatcatcgtaaacaagtccagggaggcatggacaatatatcatctgtttgaaggacctgtggaattgatgaacttctcctggaagggttgtgcaaatccacttggggtcactgttcgatatacaataagaacccagctttaggatttcttttagaaaatggtatatgcagatggatgaaggcagcctcaacttaatggcaaccagatgagggagtgaaccatttttggtccaaggtatcctggatgattcg

SEQ ID NO: 529249 - DNA, 513 bp, Homo sapiens
gtcccagccgcggccggctctccgccccgctcctcctcctcctcttcctcctcctcctcctctctaggcacccccgtccctccttccagggtgagcctcagcccaactctccgcgcttactcctgggacgcgcgtctcgccccatcctttgcttccttccttccttccttcttccttcctcccctggctcccgcctccctctccaggtcgccctcccggggcccgatgtctcggtgcccgttccctgcccgcgccctgccccgttctcccttgcacttcctgagtcgcctgcgcgccgtcgcagacgtcgccgcgacggagccgccagtgctcagacccgagcccgagcagtgcacatggccccggtatccagattccaatgcccctacagtcctcgtggctgctccgtgcccgaggggagccccgggagccaccgcgggaacggtctccaggtggagcataggtcgcacatgcccagtccggtgcacatgacatggccggcccgcagagcac

SEQ ID NO: 529250 - DNA, 142 bp, Homo sapiens
actccccacccaccactagtaaatacctatacagtcctcaagagctacatgatagcgctaatgatagcatgctgaaaccttcctgaactaaaccctaccgctcctaaagcaggcttaagtcactactactactcgtaggagt

SEQ ID NO: 529251 - DNA, 117 bp, Homo sapiens
gtccgagaaggggtgggcggctcggtcaggctggcctcggtagggcttgcggccctgaagctcttgtccaccttgacgaagcccgcctcctccagcttgcgcaggtggacggacaga

SEQ ID NO: 529252 - DNA, 187 bp, Homo sapiens
taggattttaactcatctcaggttgccatactttcagttgtataatggaaagtcccgtgtccgaggaaccccttcaacactaagcaaactgggtccaattggtcacctatatagttggctgcactagggcactcaggatttccactgtgagactgatccctgcaagaggacgcgactgtaggacgtg

SEQ ID NO: 529253 - DNA, 430 bp, Homo sapiens
tgtgctctaggatatctctaaaaacctgtaactacctaaagaaaatacatgacaaattgatgtgcatgtgttatcccctctctaactttttgcaatccccttacaaacctaactaaaacctataattataggctccatcagttagtgtagggttccatgatcatcttttgtgttcagctttatggccaataatgagtataaactcatcaaaacttaacatgtgcgaaatcgaaaacttgacacatacaaatcgtgaactccctaacttattggctgatgtaatgatatgtattcaaaatctgggatgcaaataaatcctgcagtggcctattgtgattagttcctgacccatgcacgaagcccgtgcacgggcagtacagtgtaagggtgtcaggggcgcccaaaggggccccccggggccccttccaaa

SEQ ID NO: 529254 - DNA, 283 bp, Homo sapiens
acactggcctctgttccccgattaattttcggatatttaagcggatgacgagtatttgtttgactagccgaccgtatttcttggggttataccggcactggggtattcaacccagcccagcaatctctcgaatattccaggttccgggcactcaaacgacgcaggcgtgaaagcaaatcgcatctttactgacaaggcatcgcggcagttcacagcgatccggaaacgggcttggacgttgctgcacggcatgaacggtcggaggcaacggttgacgtcatct

SEQ ID NO: 529255 - DNA, 250 bp, Homo sapiens
ggatcgaggcttacctgtggagacgggtctcatgttaaataacaagtatgccagcgctaccagcatctacaaaatcctacatggatggatgggaagggctagccatgctgggggtacacagtacccagccccgaaggtcttggaggaggtctcatgtctgtgctggggctcgtggggctccctccatcctttgcgggtggctccaggaaaattggtgtgactgagggtgggttctacactgagtaggggg

SEQ ID NO: 529256 - DNA, 531 bp, Homo sapiens
  misc_feature (75)..(75): n is a, c, g, or t
  misc_feature (220)..(220): n is a, c, g, or t
  misc_feature (380)..(380): n is a, c, g, or t
  misc_feature (433)..(436): n is a, c, g, or t
  misc_feature (450)..(450): n is a, c, g, or t
  misc_feature (468)..(468): n is a, c, g, or t
  misc_feature (483)..(483): n is a, c, g, or t
  misc_feature (487)..(487): n is a, c, g, or t
  misc_feature (512)..(512): n is a, c, g, or t
  misc_feature (517)..(517): n is a, c, g, or t
gggtacatggccgggcttcctcgttgggggttgggcaccaattcccaagggccatggacagataaaacctattgncttaagcctcccgtatatggggcctgcaagctcttggacatggagctggaaatggctttttttgtaggccctggaaacagattgggagagccgatcccatttccaaggcccatgagcccatttttggaatggtccttatgaacgnctggagtgcccgacacattcaaaagtgggagtatgtccctctcgggccattccttgggaaaagttttgggacccctgtgaagtcatcataacagggttctgccagggggatggttacgcactcggctttggccagtgtgctggaaaagtgctgcctgctntcctgccatcatgagattttttttgcttttttggaaacaaagggctcaagccnnnntttcaacctgtgantggggtcctccctcgggntgtaggcctggtccnccantcagtgacaaataaagccattgtgntttgnggcctgccctgcca

SEQ ID NO: 529257 - DNA, 204 bp, Homo sapiens
tcaagaagagactgactgtgcgcatcagcagactcgtagttaagcgagagaatacctgctagcgacactcatgtacgagcggaccacttcctaggccccatctagctaaaatacctccaaactctgggcaggcgcctgcttactcaacacaggactacccttaacagcatgccggatacagcgacgggtaccgaagctcgaaat

SEQ ID NO: 529258 - DNA, 258 bp, Homo sapiens
gcaggtttgtaagcatttaccaagatagttgtaggtaaagaagggcagatttattagagaaattgtgaaaatatgttgcagtgggcagctcagcagagaaggggctacctgcaaagaggcaagggctggaggaaagttttatagggtcctgctgaagggtgctacgtgtggaatgaggtcattgtgcccgcaggttgtttgtgattagctgtctctaacaattgttcatacaataattgttcattattgttctcaggc

SEQ ID NO: 529259 - DNA, 345 bp, Homo sapiens
tgggaaagcacacccttgaggttaacctgccttagtgcaggagtgaaaataaggcttgccctgccatctctctcgatttgtagaacgcgaacctctctatagggcctactatattagaaataccatagctgtgcacatggagtagagatcttctttaaactcgggaccgtatatatctgctcagatcgcccaagcagtacatatgctcgactccatcaagtgtcaggccacattctatcagcacagcgagactgcctatcagtgacaatataggggagctctatgtggatccctcttaccctacctttgatatttatgacagcattatcataaaactccaatatt

SEQ ID NO: 529260 - DNA, 363 bp, Homo sapiens
acagggagcccccaccagtggcttcctggccctgtgctgggggtggggggaaactgggggcccatgtggcccttcccttttgagcagctcccagtgccagggcttttagactttcccccatgataaaaaaaaagggaggtccagaagttcccattccctttttattttgctggttgggatctgtaaatgtttaataaatatctgagcatgtttctatcccccccaagaatttcaaagtctccttccccaatatgaggcttttaggatgtttatattccttcacccctcttgtttcccaggttttgcagggaaaaaaagtctggaattataaatcccgcttattattaaatttgttcttgccta

SEQ ID NO: 529261 - DNA, 703 bp, Homo sapiens
  misc_feature (198)..(198): n is a, c, g, or t
ccggtgttccaggtccctctcctcttgttaccggtaaaaaattctccggtatcttgtcgaagtcttgtttttattaaaggctcgcccaagcaaatgggtgtattacaccccaccaggtccccctaatagtaatcaccaaggtccttttcttcacaaaaacaataaaagctgttctttgaaagaactttgacaccacantatttcatcatcttctgctcaccactgtgttatcaggagtgcgccccctggagtaacactatcaagtcagtccccgtgtggtttctgaaggagcacgcattttgactcactgctgaggtacgcacacgctagtagacagaatgcaccctcttccggccccgcgggcaatactctctctcctttcgcgggagcaactccttgctagtactcactccccgcccgccgcccaagtcctggctagtttgtgttctctcgatcaaactcgtcgccaaggacgcccgagtggtcgactccccctccacggacacaataggtataacatttaggaaaggccgcgaagtaccactctaattttgtttaaagcgccacaccaccactgtgtgaatcccccatttcaatggtaactcctctctctctccttgcctctttctattttttctatgtttctctccgaaataagacaccattccgtcatgtttagtcccgccaaactaaatatcaaaca

SEQ ID NO: 529262 - DNA, 230 bp, Homo sapiens
agactcatccgccaccaagccattcctctgggtatttataaagtgagaaaatatgaattaacatcctcatttacataatcatttttcataaccaagatgtcttaagcatccaaaaggttgaatgtgtctctgtgtgcataatagcttcaaatgatatatttggatttcttcttttgaaatgcttcattctcctttgacaaagcaaagctgcttgaatgaaggaagtctca

SEQ ID NO: 529263 - DNA, 617 bp, Homo sapiens
tatagattccttttagaaatggaattgaacaaatcccttgaaagcctccaaactgtctcatttcaatcagttcttttaagagctgaagtaagagtattcttagctccacttaattggtcgagctgatatactagctttttcttgatttttgtctgaagtaattaggttaagaaaagttagtttaacacatacatccctgaatagcagaaactgaatccaccacagatgtacttcttactcgtctgaagtcaaatgtggatgtttgtattcagagggcggccctctgacaagtgacgattcaggggctcagctcctttcatcttttggttctgccaccttcaacatatggcttctaaggccactgacatcatctgtgttgagctgtgaaaggagtggagcctgggaagttttttatggactaaatattcccaggaggaaaacggagtaggatttatgatcacttatccagaacctgctacaagatttctccttatctcatacttgcagtctgtcagcaaatcctgttggttttatctttgaaatatcccttgacttacccacttttctcccttgcccatgcaccccccagtcctggctggggccatcacttcccctgg

SEQ ID NO: 529264 - DNA, 551 bp, Homo sapiens
  misc_feature (428)..(428): n is a, c, g, or t
  misc_feature (434)..(434): n is a, c, g, or t
aagatggtcctcagctttggtcactgtggctgtgacacgcctgggtgtggttttcttggtgctgcctgcctggggtgtctgagcttctgcaaaagttttcagttcttatctcttcaaatatttttcctgtcttattctacccatacttccctactctaaccccaatttcatgtatgttgcccaacttggtaatatatgaagggtcttactttgttgcccaggctggagtgcagtggtatgaacacagctcactacagccttgacctcgcaggctcaggtgatcctcctgcctcagcctcctgagtagctaggattacaggtgtgcaacaccacgcccagctaatttttttgtattttttgtagagacaggattttgccattgttgcccaggctggtctcaaactcttgagctcaagcaatccgtctgnctcggnctcccaaggtgctgggattgcaagcgtgagccatcccgccctgacagtattttattttattttttagacggagactcattctgtgcgccaggctggagtgcattggcgcgatctccg

SEQ ID NO: 529265 - DNA, 421 bp, Homo sapiens
aaatgccaccagatggcgggttaggatgcagctccgtggaaggcgcggccccggtcccgaaccccgaggacaccccgtaacaagcccccacatcgggagatagacgacggagaactttggagggcgaataggctcgatggtcggctggcagcccgcgactgggcagactagagagatcgagctattagcagcgttactgttaaaacagctcttgtagtcgatacagacactttgcattacttccgactgcactgtgacaacggaccctctcacagacacatgatttactctcagaaacttaccacgtagtatcacagcgacttcaaactaactgtaaactatctagccccattatccgactgacttggcagctgagtcttgcaagcaaacacgaggtcacaggcaaaacagacaccagggg

SEQ ID NO: 529266 - DNA, 858 bp, Homo sapiens
  misc_feature (194)..(194): n is a, c, g, or t
  misc_feature (394)..(394): n is a, c, g, or t
acatgagccaccgaaaagggtggtgtcagggctgtgaggcttgcggactaatgccaggggatgcacggttgtgcgatgccggatggtgaacctgaaggaacgcgcccaaggtaacatgaaacacgtactgttccaagaattgaacgttaactgctttcagtgtaggaaacctgacggagtcagagactagtcanactaagcgagcctagctgcttctcacagcatcacccaacctgtgaacgaagcatcagcgaaggcacagacttcacacaagagccgtgaccttggctattctccggaagtgagcgacgagagggatagagcatgcaatcgagtatcgagtcttatcgaaggagtaggctagcatcataatggcgatggatcaggccccagntcacttcatctaggaaggatgcaaagacgtcgatgagagagcacagtgggtcattacgaagatcattagcaagagaacatagtttagagcgtagtgcttaggagaaacgaagatggagagcgaaagataatatagtcaaactggaggacatttggaaactaatgagctggatttcgtctgggaatagttgctcaaacgttcactgttgcagacgtctgcattcaagggttagaagatgatgctatgaagaccatatgcatcattggctacacttccattttgtctactgttgttactggacaagctttttgtaattgatgctttgtattcagataatataagcaaggaaaaactgtgtttccagaagctcactgatgtggcatagatagtggatgtatactatcccagttctttgggcctttactaaaaaatggacgcctggcaaccagtatcataccgttcac

SEQ ID NO: 529267 - DNA, 554 bp, Homo sapiens
actagagtagcatttggctcaattctggccaatggattataagcagagagtgtgcatgggacttctgggaaatctaaaaggggatttagtagatatttcatcttcactttctatccctgccgcctggcatgtagatgtgataacaagcgctcctgcagccaacttggaccacgaaaatcaaaggccacaccccaggagccaaaagctggaaggagctagggcttctgataattttgtagcaccaaaatcacagaactcaaccttgggactatctatttacctaagacagaaacagacagagtcatcatggcagtgagcggggccccggctggcatggaggcaacctggcatggacacggcaggccgggatgtgtctggcatgtgtcagaaaatcccatagatgtgtagaagataaatagcacaaattccaaggcacctgcaagcatgcacaggaggcaatgaccaacgggtgtggaagtgagcaaggcacagcaaataaactaggcacaacctgctctttgccaaggatagtctactgtggccacatggcaggc

SEQ ID NO: 529268 - DNA, 431 bp, Homo sapiens
tttcatgccccatccgtctcacaattcaattcccctcaaaacatctttgcaaatcagggccgtatttacctatagccacccctcccatccctacgcatcctttcacatcaaccagcacgcggtccaacgatccctcccttcaccatcaaatccaattggcccaccaatggtcactgaacctacgagtaccacgactcacggcggactaatcttcaactcctacatacttcccccattattcctagacacaggcgacctgcgactccttgcacgttgcaccatcgggtcatactcccgattgaaaccccattcgtataataattacatcacaagacgtcttgcactcatgagctgtccccacattaggcttaaaaacagatgcaattccccggacgtctacaacacaacactttcaccgctacacgcacggg

SEQ ID NO: 529269 - DNA, 299 bp, Homo sapiens
catttttagtagagacagcgtttcaccatgctagccaggctggtctcaaactcttgacctcagatgattcacctgccttggcctcccaaaatgctgcgattacaggtatgagccactgtgcccaaccaaaaaatttaaaaattagatggttgcagtagtgtgtctctgtggtcccagctattcaggaggctatggcaggaggatcccttgagcctaggagtttgaggtggcagtgagctatgatagcaccactacactccagcctgggtgacagtgtaagaccctgtctctaaaaaatg

SEQ ID NO: 529270 - DNA, 756 bp, Homo sapiens
cgcaccgggcccctactgcagttcctcgtcgatcctatggcaggccgaccctctgaccttcttctttccgccaccactgcccacagcctctgggacctcggtcccaggaacacatccagcctcctggctgttgacttcccctgctcttggaccccccatccaagagattccaagagattcctgccggcccgaggcggcgacacccccttatggctggggctctccgtggtgttctggaccccgcccctggagacacccttcacgttttactgctttgtagtgactcgtgctctcccacctgtcttcctgaaaacccaggcccccttcccccccctcttccctggggtgagacttgagccagaaccggggcttcccccagttgccccgaaagactgtctgggtgagaagccctggcccgagcttctccccggcaccggtgttgcacccgggacttctgcttcacagttttggggtaaagacccctggatcagactcccagggctgccctgagtctgggacttctgcctccctggctggtcatgagagccaaccgtagtcccctggagaccgcgactcccgagaacctcttgggagacagaagaggcatctgtgcacagctcgattttctacttgcctgtggggaggggaatgacaggtccacacaccaccctgggtcaccctgtcctggatgccttctgaagagagggacagaccgtcagaaactggagagtttctattaaaggtcatttaaaccca

SEQ ID NO: 529271 - DNA, 237 bp, Homo sapiens
  misc_feature (216)..(216): n is a, c, g, or t
caagattcagtggatgtgcagcgatggaaggtggtgtccaccgtacgagcaggtccgttcgcaccaagaagtgtgaggcgtgcccagcccgcggcagggcccaggaggcccccgtggtggtggacagcggattcccacctagaagagtcgccctcgtcctgccgcctaagcacgttcacacctggacccgtgcgttcaccctcacccccgtcctgngcaattcaaatacagcgttca

SEQ ID NO: 529272 - DNA, 880 bp, Homo sapiens
ggctgagtagagcggcgcccgtcgagagaagtggggccgagatcgcgccgtccagcccgcccgccgggtctgcgctgtccgggcccttacccctgctggcccttgcaaggcgcgacctggcggccatgcagcccccgggctgaggccgcccatgcaaagccgggcggtcccgggcgacgacgggcgcttgggagaaacttcccgtaaggtggcgctcccgaaaggaggccgccaacgcggtgttgccggggccagagggaagggcggccccgggggctttccgggccccctttcgaaaaacttgggggcgcgggccggcgggtcgcccattgggggggcccagaggaacgggccagcaaaagatccgggagaaacctttgagttggcttttcgggccgaccggccagagatttgccgcaaaccaaagcacaagggcgccaccaaattcggtcacatgacagcgggccgatgcgggcgagggaggcgccaccccacacccaaaaacgcccgggaccacgacgttggcccccaggagagaatccccttaagaagagggcggcccgcatatagaagggggcgcctgtcacacaccaatggggtccacacaggcggggtatgcacaccacaacaccggggaaagcagtataccgacagaggggtgtggtaggagcagagcagcccacccccggcgggtgcccccccacgcaggtggcccagacacgtctgggagaacccaggcccggatagaacaccgggcgattactaagacagccgttgcccgggccttcgcaaccataactttaccaagcgacccgcgaggacccgggaaagcccggtaaacaggcccggaaatcccattcggggtccctcgccccgacag

SEQ ID NO: 529273 - DNA, 456 bp, Homo sapiens
aaaaaaaaaaaaaaattttaattaactggacgtggtgttgcacactcatagtcccagcaactcaggaggctaacgtgtaaggattgcttaagcccaggaggtgaaggctgtagtgagctatggttgcaccactgcattccagtttgggcaacagtgagaccctgtctcaaaataataataataataataataataggctgtgctcagtggctcatgcctgttgtaatcctaccagccagattgcttgagcttaggagatcgagactagcctaagcaacatggtgaaatgccatctctacaaaaaatgcaacaattagccaggagtggtagggcacacctgtagtccagctacttgggaggctgagatgggaagatcgcttgagcccaggaggttgagattgcagtgagccaagatcatgcactctagcctgggtaacagactgagaccctgtctca

SEQ ID NO: 529274 - DNA, 159 bp, Homo sapiens
tccgtgatgcaggcctcctcccagtatgcgaacggtcaataccgactggggcgagcgcgtgcccacgcttgcgtatctcgctccgatcaggaccggctccagagcctcggcctgagttccagcgacgtgacccagcagcttcagtttctgttgaggggt

SEQ ID NO: 529275 - DNA, 665 bp, Homo sapiens
atcgcactaatttacactcacagcaccctcgggtgactaaacatactactactcactgtcactgtccaagaactatgaaactcctgagccaacaacttagtatgactagcttacacaatagcttatatgggaaagatacctatttacggactccacttatgacttcctaaagcccatgatgaagcccccattgctgggtcaatagtacttgccgcagtactcttaaaactaggcggatatggtgtaatacgcctcacactcattctcaagcccgtgacaaaacacatagcctaccccgttcttgtactatacctatgaggcacaattataacaagctccatctggctacgacgaacagagctaaaatcgctcactgcctactctttaatcagccacatagccctcgtagtaacagccattctcatgcgaaccacctgaaggttcaccggcgcagtcattctcataatcgcccacggacttacatcctcattactatattgcctagcagactcaaactacgaacgcactgacagacgcatcagaaacctctctcaaggacttcctctacttccactgatagctttttgatgacatctagcaagccttgctaacctcgccttaccccacactattaacctactgggagctctctgtgctagcacgtt

SEQ ID NO: 529276 - DNA, 281 bp, Homo sapiens
tatttgcgttgctgtgggttcttctccttctcggagggctccgagcggcctccgaattctcctctccgcttgcaacctccgtgaccatcgttctcgtgccatctcctgcttctgggacctgcccagtttacccgcttaaatgtggcttatgctcacttcattgcccaaatcaattcatcgagactctcatgattccgtcaagaaattattcacacccgaacgtggagagcaagccgatcaacaagcctggtcaattgtgtacctgaggaactcctaagact

SEQ ID NO: 529277 - DNA, 210 bp, Homo sapiens
ggtaccctcggattagggccactgtgagagtgagggagtctcacccaccgcgttaccccagccctcccctgggagacagagagagaaatcctcttcatgggccagagctctgcatccgtgtgagtgaggacagtccctggtgtgtccttttgatcttgaatctcatgccactgcaagtgccattcaccactgcgtccttggcttatcgag

SEQ ID NO: 529278 - DNA, 240 bp, Homo sapiens
cccgactagatcgacagccgactagcccgacagcccgactagcccgacagccagctccctctgcatcccttctccagcccggcggtcccaaagccccccattcacagcctcctcggccgggtactggcaaggtaagaaggggagggcgtgtttcctcggacaattggttctctttcatgggcggtttcagcggctcggtcggaatattccacgtgccacatccggtcgggctagtcgggg

SEQ ID NO: 529279 - DNA, 410 bp, Homo sapiens
ctgactctagagcatcccccgtatgcgatgtgcgcgggcaagccagcctggagccccgatgaggcggctcctcttcaagagtgggagggtgtgcagtgcctgtgagtgttgttggcagcctgggaacacctccgcttaatatggctgtggttagagacgaagagtggactcgctgtgcagcagccccatcctgaccgctcggagtgtactttccttgacatggcaaggctgtttggccagggctcgcttgacatactcctcctgcgcagccttcaggttctccttcttcccgccccaggccttcagggcagaggcctgcagggctcggccgtaggagaaggtcagggcccagggctacagcagggggcacttgttaatggcattgaggttgatggacgcctcctcctcac

SEQ ID NO: 529280 - DNA, 411 bp, Homo sapiens
cggatgtgctggcacatgcctgtagtcccagctacttgggaggctgaaggatcgcttcagcccaggagctcaaggctgcagtgagctataattgcaccactgcactccggcctgggtgacagagtgagaccctgtctccagttgaaaaaataagaggtaggtggctcatgcctgtaaatcccagcactttggaaagccgaggcgggtggatcaccgagttcaagagattgagaccatcgctggctaacaattggtgaaaacctgtttcttactagaaaaagaggaacacacgattagccagggcgtggtggcgggcacctgcagcctcccaagtagcttgggactacaggtgcacactggccatgcccagctaaatttgggtgatattacagtacgagacaggagtttcat

SEQ ID NO: 529281 - DNA, 195 bp, Homo sapiens
tagcaggatcttgtgtcatccccttcgtatgacctcccaccccatccgaagcagttgcctagagaagagttctggagccacagcacagcgagccagaggccctggggctaggttcactgggcatgctgagcagcagcaagtgggcctgcaatgagcagaggcgggtagagaagagcacgaagggggggatgggca

SEQ ID NO: 529282 - DNA, 247 bp, Homo sapiens
gtcgagtgtacctgacggagaggagacgagatgaacataaagcttcgcctttccagagcttatcctcgagaaataagcttcgtcttgacgttgatgaatctacacaaacactattttctgcagtcatccgaagaattgtgccattacttgtgctgcctctgaatgtggaggctgactctccctgtctctctgtccctcctaccccacggggccgcagtaaaagccatctcgtctcttctcttggggc

SEQ ID NO: 529283 - DNA, 690 bp, Homo sapiens
  misc_feature (690)..(690): n is a, c, g, or t
ggatggacaagccagacccaggtagctatacacgaatcgagagcatcactgcagtttgttgtaagtccttaaggcaacagacctgttggagagagatggcagcaatccttactagctggataccctatgatagtagcactttcattgtgactgaggggggcgtatagaactttgcattcaggagctccaaggaagtggtaagagcatagctatgctacacacccagatgcttgcctgcagcacctggaatgtgttccacaggatatattgagcctatatagccggacatatatgccatagaagtatgctgtaggagaaattacaagcctatgggggtgcttagctataagatacattaggtggactgttggatccttaaacttgatctcttgcacgatgggacgtagtcctccttactctgaagaaatcgaggctttttaaaactgtatactgggtgaattaaaggcacgcatggtggcgatacacacttcacagtccctatgtccaatactgtaggggcgtcgatgctgatatacaggatagattgaggggcgcttccctccagacaaggagaaaccagctgggagatcgaggctagtactgtgggccaatatactaacgtgccacctcagggtaatcctatatttttttcgattagtccttgctcataaggtttccatgctatatgan

SEQ ID NO: 529284 - DNA, 137 bp, Homo sapiens
tagggaagccccccggtccagggtttgggcccccccacttcagctttgcctcccgggttttggtttcccagaaaatcaaagggggcccattggtttgtttcccctatgatcctttttaaataacctcttttttttta

SEQ ID NO: 529285 - DNA, 291 bp, Homo sapiens
agaggatccgtgcaggatggttaggacatgaggaggatctgctagagtccagctgtgaagctatgtgagctttgggtggtggactctgctgttgttgcctggtacgtgactcgcgactgccctgtgggcgtgcttggagagtagctgggacagacaggcgagtccctgagggttggagataaagacgtgctggagactggggagtaactcagtgaaagtggtgggcttggtggtgatcccagggttcctggaactgacccgcgctgaaatgtgggcgtggttggagagtag

SEQ ID NO: 529286 - DNA, 468 bp, Homo sapiens
gaatccggcaggcacaaccaggtatcccatgatgtgtatgtacagccttggtagtgtcccacaactacaaaatttaaaaatggctatggtcaaaaaaaatattaaatatgaaggcgaatatgtggttccactttttttttccccacccttttggaactttccggtttcagtttgggaagtttctatggacacatcctcaagcggggggttccttcctcagcggtgtgcagtctaccagtaagcatcaaaagcattcttcatttctctaacagcattttttttctgagacagagtctcgctcggtggcccaggctggagtgcaggggcatgatctcagctcacggcaagctccacctccggggttcatgccattctccggcctcagcctcccaagtagctgggactacaggcatccgccaccaagcccggctaatttttgagtattttaagtagagacggggttcacca

SEQ ID NO: 529287 - DNA, 738 bp, Homo sapiens
  misc_feature (716)..(716): n is a, c, g, or t
tcaacctgagtttaaacaaaataaacaagatattttgtaaagaaagcataacatagtgtgtcttagcaaggacatgattcatatggaagcagaatgtgagaagttgtaaggtccttggtactcacttgtaaagatcaacaagacaaggaagaatttggtaaggggtttgtggaaaacaactaagtaccaccttaaaagttcaagtgatacagtttcagaaaatagggtgccttaaagtaattttgagaaagagtttaatccttcaagtcaaggcttaagaatgaagagagcgcttcttcttcccttggcttccccttctaccctctcaaaagttgagagtaaatagaatttggtttgaattccagggaaggggaaaaataaacacgaaggaattaaggaaccttttaataccttcccataccacaggatataagatgtgttgggaaaaaaaatggggtcccagcaaacctatcgagataatgtgaatacgataaacttcctaatggcaggatattcactctcaatcctgaagttaccggttcctgcagaattgagcttcagctgttactgttttgaagccgctgtaaattactgctttccccagttcccccactattttttttaagtgggcgggggcgcctgttaagatctaaaatagatatgttggattgatattctcacgtgttcggtgtggaaaacaaaacaagtacatgctntaccacaacgacaatgaatcct

SEQ ID NO: 529288 - DNA, 900 bp, Homo sapiens
  misc_feature (42)..(42): n is a, c, g, or t
  misc_feature (62)..(62): n is a, c, g, or t
  misc_feature (80)..(80): n is a, c, g, or t
  misc_feature (182)..(182): n is a, c, g, or t
gagagtgcatataggacggcggtggataaaggtgcagcgaanggagctgaccagccagctgncccctcacactcacctanccaccatggacatcgccatccaccacccctggatccgccgccccttctttcctttccactcccccagccgcctctttgaccagttcttcggagagcacctgntggagtctgatcttttcccgacgtctacttccctgagtcccttctaccttcgggcaccctccttcctgtggggcacccagcgtggggtgttgacactgggctctcatgcagatgcgcctggtgaaggaggagtgcgttctgttctgtcctggctgtgtgtcacggccttccctcccgagaggaactcaaagttaagggtgttggggacgatgtgatcgaggtcgctatggaaacacattgaagagcgccaggatgaaccattggtttcatctccagggagttccacaggaaaataccggatcccagctgatgtagaccctctcacattacttcattccctgtcaatctgatggggtcctcaactgtgaatggaccaaggaaacatggtctctggcctgagcgcaccaattcccatcacccgtgtaagcaggaagcctgctgttcaccggcagcccccaagaaattagatgcccttcttgaatggcattcttcttacaccaggaagtgcccccaacaagtgacttgacagtctggtgacttcgtggcggaagctattcagtgctcagggcaggccccaattacgagctattcaatatctgccgcacaaacgacaaaaacccctaaccacacacttgcgggcccgcccacagagatctatacacactggggcggcggcccgattttaacggacaacggtcctaggacgcgacgtagggac

SEQ ID NO: 529289 - DNA, 110 bp, Homo sapiens
  misc_feature (102)..(102): n is a, c, g, or t
tcatacccactagaacagaaggaagagccaagcactcatatcattcaaaatctgaatggcttcatgaaggatgaatgcctctgcaaaggaaaattctttaancccacagg

SEQ ID NO: 529290 - DNA, 387 bp, Homo sapiens
tcttattcacagccaaaatggaagatctaacaaccagagggtgatttggcaataagtatcaaaatcctttcaagtcttgtcccatctttgacctgccaaatctacttatattgatttagaataaggaaataattgggaagcagtcaaagttatatcacaggtttatacttgtgaaaaattgcaaataacgtaagcatccattagtctggactgaatcaagaaatagggtatgttcataaaaacaaaatctttttaggccttaaaaatgatatagggccgggtgctgtgctcatgcctgtaatcttagcactttggaaggcagaggcaggtagatcacttgagcccaggagtttgagaccaggctgggcaacatgacaaaaccccatc

SEQ ID NO: 529291 - DNA, 1697 bp, Homo sapiens
ggcgtttccctgggggcctggttggcgtggcggacctgggcggtgcggggcggaagtgggcggctgcgggacgcgcgcggagtcgcgcggcgggcgggacctggccgagctggagggcgccggggagcggggctcgggcggtccccgaggcccggcggagcgggcttctggggtgtctgcggcggcgccggcgtcaagaagggccaggagcaggtgctgggggacctgtccatgatcctgtgtgaccccttcgccatcaacacgctggcactgagcacagtcaggcacctgcaggagctggtcggccaggagacactgcccagggacagccccgacctcctgctgctgctccggctgctggcgctgggccagggagcctgggacatgatcgacagccaggtcttcaaggagcccaagatggaggtagagctcatcaccaggttcctcccgatgctcatgtccttcctggtggatgactacactttcaatgtggatcagaaacttccggctgaggagaaagccccagtctcatatccaaacacacttcccgaaagcttcactaagtttctgcaggagcagcgcatggcctgcgaggtggggctgtactacgtcctgcacatcaccaagcagaggaacaagaacgcgctcctccgcctgctgcccgggctggtggagacctttggcgacttggcctttggcgacatcttcctccacctgctcacgggcaaccttgcgctgctggccgacgaatttgcccttgaggacttctgcagcagcctcttcgatggcttcttcctcaccgcctctccaaggaaggagaacgtgcaccggcacgcgctgcggctcctcattcacctgcaccccagggtggccccatctaagctggaggcgttgcagaaggccctggagcctacaggccagagcggagaggcagtgaaggagctttactcccagctcggcgagaagctggaacagctggatcaccggaagcccagcccggcacaggctgcggagacgccggccctggagctgcccctccccagcgtgcccgcccctgccccgctctgagggccctccagacctgctcgggtgctggggccatgccgagtcgcggccctgctcagccggaagaggctcccggacctggatgtacagggcagtctctcttcccggggctatggctgggcctgtcctgccgtcatggccccctgcttcctgctccttggagctggctcccggaccttgcccaccatccatgcagtggctcccagggcagagcctctccttgtactttggcagccatagaaagcgtgctcattttctgttttcctgtgttaggaaaaaaccacctgttttccaaggggagagggcggggcctgagggtgggggcggggcctcttcattggcccagcttggcgaaagcgaggcacactgcttactgccttggggttgtggagatggacccgtgacctcgtggaggccgtgtgggggcagcagcctggcctgtgccatggtgggtgtcctggggcctgtgcggagggagccacctcaccctgcagcccaggttgcaggtgtggccttgtttctccttgcccagcagtgctgccttcagcggccgtgacggggccagctggacacacggtgagattttctcgtatgtaaataaaaggcaatttggtaaacgtgaaaaaaaaaaa

SEQ ID NO: 529292 - DNA, 186 bp, Homo sapiens
atggcccggggcccaagaagcacttaaagcgtgttgcagcgcgaagcattggatgcttgacaaactaacgggtgtatttgcacctgtccatgacaggtccacaagcgagggaatgtcttccttgatgtttcctaggaatagataagtatggttgactggagatgaggtaagaagatatgtatgcaa

SEQ ID NO: 529293 - DNA, 2849 bp, Homo sapiens
ggcgtttccctgggggcctggttggcgtggcggacctgggcggtgcggggcggaagtgggcggctgcgggacgcgcgcggagtcgcgcggcgggcgggacctggccgagctggagggcgccggggagcggggctcgggcggtccccgaggcccggcggagcgggcttctggggtgtctgcggcggcgccgggggaacgggctggggatggggcgcctagccgggcggtggccggggcctcggccatgttcgcggggctgcaggacctgggcgtggccaacggcgaggacctgaaggagaccctgaccaactgcacggagccgctcaaggccatcgagcagttccagacagagaatggtgtgctgctgccatctcttcagtcagccctccccttcttggacctgcacgggacgccgcggctggagttccaccagtcggtattcgatgagctgcgggacaagctgctggagcgagtgtcagccatcgcttcggaggggaaggctgaggaaaggtacaagaagctggaagaccttctggagaagagcttttctctggtgaagatgccgtccctgcagcccgtggtgatgtgcgtcatgaagcacctgcccaaggttccggagaaaaaactgaagctggttatggctgacaaggagctgtatcgagcctgcgccgtggaggtgaagcggcagatctggcaagacaaccaggccctcttcggggacgaggtttccccactcctgaagcagtacatcctggagaaggagagcgctctcttcagtacagagctctctgtcctgcacaactttttcagtccttcccccaagaccaggcgccagggcgaggtggtgcagcggctgacgcggatggtggggaagaacgtgaagctgtacgacatggtgctgcagtttctgcgcacgctcttcctgcgcacgcggaatgtgcactactgcacgctgcgggctgagctgctcatgtccctgcacgacctggacgtgggtgaaatctgcaccgtggacccgtgccacaagttcacctggtgcctggacgcctgcatccgagagcggttcgtggacagcaagagggcgcgggagctgcaggggtttctcgatggcgtcaagaagggccaggagcaggtgctgggggacctgtccatgatcctgtgtgaccccttcgccatcaacacgctggcactgagcacagtcaggcacctgcaggagctggtcggccaggagacactgcccagggacagccccgacctcctgctgctgctccggctgctggcgctgggccagggagcctgggacatgatcgacagccaggtcttcaaggagcccaagatggaggtagagctcatcaccaggttcctcccgatgctcatgtccttcctggtggatgactacactttcaatgtggatcagaaacttccggctgaggagaaagccccagtctcatatccaaacacacttcccgaaagcttcactaagtttctgcaggagcagcgcatggcctgcgaggtggggctgtactacgtcctgcacatcaccaagcagaggaacaagaacgcgctcctccgcctgctgcccgggctggtggagacctttggcgacttggcctttggcgacatcttcctccacctgctcacgggcaaccttgcgctgctggccgacgaatttgcccttgaggacttctgcagcagcctcttcgatggcttcttcctcaccgcctctccaaggaaggagaacgtgcaccggcacgcgctgcggctcctcattcacctgcaccccagggtggccccatctaagctggaggcgttgcagaaggccctggagcctacaggccagagcggagaggcagtgaaggagctttactcccagctcggcgagaagctggaacagctggatcaccggaagcccagcccggcacaggctgcggagacgccggccctggagctgcccctccccagcgtgcccgcccctgccccgctctgagggccctccagacctgctcgggtgctggggccatgccgagtcgcggccctgctcagccggaagaggctcccggacactggaatgtacagggcagatcttctatctcaccgggagactactggccatgtgaccctgtcactgccgtacactggccacaccatgactttacctgccttcctctggaaggcctgggtaccacgggacctttgcacctaacacatacactgacaggtgagactcccccaggggaccaaggaagagcctttcttacgcctctgattacatatatgcgacaaggtccagttaggaaaacggcgatgacatcagtatatgtctggctatataacccgtgagtgttcaagtgacaaaaagacacccaacactgctaatataccaaatggtgtgacgtaatcgtgcgtaggctgccccttcgagcgtgatcgtgcccgagacgaggcgacccttcttcacaatatgggaccccagcgagtatgggtgctagacattatgcatcagcgacacccacgttggatatatagcgtgacacattgcggggaggctgggccggacggactggagacgcccagatgacacccctccagactgccaggagaccagcagagactgtagacagcgcaagaaccacggcacatgggagccatgttgtcccactggaactggaactggtccacaggcgagcaccagtagacagcagacagcagcgaagaccacatttcacaccccaattgcaaagcaacaaaaggatctggaacgagacgatgatccaccaatggcgacagcacctctgtctccacagcacacagatggttagcacacttccaagtcacgagccaggagccgg

SEQ ID NO: 529294 - DNA, 1985 bp, Homo sapiens
ggcgtttccctgggggcctggttggcgtggcggacctgggcggtgcggggcggaagtgggcggctgcgggacgcgcgcggagtcgcgcggcgggcgggacctggccgagctggagggcgccggggagcggggctcgggcggtccccgaggcccggcggagcgggcttctggggtgtctgcggcggcgccgggggaacgggctggggatggggcgcctagccgggcggtggccggggcctcggccatgttcgcggggctgcaggacctgggcgtggccaacggcgaggacctgaaggagaccctgaccaactgcacggagccgctcaaggccatcgagcagttccagacagagaatggtgtgctgctgccatctcttcagtcagccctccccttcttggacctgcacgggacgccgcggctggagttccaccagtcggtattcgatgagctgcgggacaagctgctggagcgagtgtcagccatcgcttcggaggggaaggctgaggaaaggtacaagaagctggaagaccttctggagaagagcttttctctggtgaagatgccgtccctgcagcccgtggtgatgtgcgtcatgaagcacctgcccaaggttccggagaaaaaactgaagctggttatggctgacaaggagctgtatcgagcctgcgccgtggaggtgaagcggcagatctggcaagacaaccaggccctcttcggggacgaggtttccccactcctgaagcagtacatcctggagaaggagagcgctctcttcagtacagagctctctgtcctgcacaactttttcagtccttcccccaagaccaggcgccagggcgaggtggtgcagcggctgacgcggatggtggggaagaacgtgaagctgtacgacatggtgctgcagtttctgcgcacgctcttcctgcgcacgcggaatgtgcactactgcacgctgcgggctgagctgctcatgtccctgcacgacctggacgtgggtgaaatctgcaccgtggacccgtgccacaagttcacctggtgcctggacgcctgcatccgagagcggttcgtggacagcaagagggcgcgggagctgcaggggtttctcgatggcgtcaagaagggccaggagcaggtgctgggggacctgtccatgatcctgtgtgaccccttcgccatcaacacgctggcactgagcacagtcaggcacctgcaggagctggtcggccaggagacactgcccagggacagccccgacctcctgctgctgctccggctgctggcgctgggccagggagcctgggacatgatcgacagccaggtcttcaaggagcccaagatggaggtagagctcatcaccaggttcctcccgatgctcatgtccttcctggtggatgactacactttcaatgtggatcagaaacttccggctgaggagaaagccccagtctcatatccaaacacacttcccgaaagcttcactaagtttctgcaggagcagcgcatggcctgcgaggtggggctgtactacgtcctgcacatcaccatgcagtggctcccagggcagagcctctccttgtactttggcagccatagaaagcgtgctcattttctgttttcctgtgttaggaaaaaaccacctgttttccaaggggagagggcggggcctgagggtgggggcggggcctcttcattggcccagcttggcgaaagcgaggcacactgcttactgccttggggttgtggagatggacccgtgacctcgtggaggccgtgtgggggcagcagcctggcctgtgccatggtgggtgtcctggggcctgtgcggagggagccacctcaccctgcagcccaggttgcaggtgtggccttgtttctccttgcccagcagtgctgccttcagcggccgtgacggggccagctggacacacggtgagattttctcgtatgtaaataaaaggcaatttggtaaacgtgaaaaaaaaaaa

SEQ ID NO: 529295 - DNA, 641 bp, Homo sapiens
ctgggtgtggtggtttatgcctgtaatcccagcactttgagagtccgaggtgagatgattgcttgagctcaggagttcaagaccagcctggacaacatggtgaaaccactcatctctcctaaaaatacaaaaattagctgagcatggtggtgtgcccctgtggtcccagttactcagaaggctgaggtgggaggattacctgatccagggaggttgaggctgcagtgagctgtaattgcaccactgcactccagcctgggcaacagagtaagactctgtgtgaaaacaaaacaaaataaaaccctgcattcctgatgagagttcataaaccactgaaactgtatgaattatgtgtatgtgtgagaatgtgcatacattttaggaagaggatctatagatttaatccaaatccagaacaaattaagaatcactattcttaaacttcagttgcctggggactaggaattagtgacaatgttcccccaaatcaaagtattcattagaagaaaaataactaaggctaccactgcagccattcagagcataagcagcatcattcagcactggttttaccataagccgccgcctcaggaacaaattgaatcgcttttgccaggctgtgaaaccaccaattaaagaat

SEQ ID NO: 529296 - DNA, 456 bp, Homo sapiens
gccagttacaccagctgccaaataaaaataatctctgaattgagttaggaaatttagttcctgctacaactggggatttcctgtacaggaagaggaaggggtgggcaattacagaggattagggaacatccctttagagttcttcctgggatgacaatggtcgaatgagataatgtgagagtgctttgcagttggaaagtgctgtaggaaccctgaattcatctgaaactgtagcttagtgtttaaatgatgtctgttattacttttttgaatagtctggagtgcttgttaaagaaaaaattattctgtgatatttgttgaatgaagcacagtgaggaagactttactcagggcccttgtaatagctatagggaccactgcaatagggtcttgcagtgggggagagagaataggctcaattctgaatacatcatcatgggcaagtgggaattatag

SEQ ID NO: 529297 - DNA, 1296 bp, Homo sapiens
aagtttctgatccacattgaaagtgtagtcatccaccaggaagcacatgagcatcgggaggaacctggtggatgactacactttcaatgtggatcagaaacttccggctgaggagaaagccccagtctcatatccaaacacacttcccgaaagcttcactaagtttctgcaggagcagcgcatggcctgcgaggtggggctgtactacgtcctgcacatcaccaagcagaggaacaagaacgcgctcctccgcctgctgcccgggctggtggagacctttggcgacttggcctttggcgacatcttcctccacctgctcacgggcaaccttgcgctgctggccgacgaatttgcccttgaggacttctgcagcagcctcttcgatggcttcttcctcaccgcctctccaaggaaggagaacgtgcaccggcacgcgctgcggctcctcattcacctgcaccccagggtggccccatctaagctggaggcgttgcagaaggccctggagcctacaggccagagcggagaggcagtgaaggagctttactcccagctcggcgagaagctggaacagctggatcaccggaagcccagcccggcacaggctgcggagacgccggccctggagctgcccctccccagcgtgcccgcccctgccccgctctgagggccctccagacctgctcgggtgctggggccatgccgagtcgcggccctgctcagccggaagaggctcccggacctggatgtacagggcagtctctcttcccggggctatggctgggcctgtcctgccgtcatggccccctgcttcctgctccttggagctggctcccggaccttgcccaccatccatgcagtggctcccagggcagagcctctccttgtactttggcagccatagaaagcgtgctcattttctgttttcctgtgttaggaaaaaaccacctgttttccaaggggagagggcggggcctgagggtgggggcggggcctcttcattggcccagcttggcgaaagcgaggcacactgcttactgccttggggttgtggagatggacccgtgacctcgtggaggccgtgtgggggcagcagcctggcctgtgccatggtgggtgtcctggggcctgtgcggagggagccacctcaccctgcagcccaggttgcaggtgtggccttgtttctccttgcccagcagtgctgccttcagcggccgtgacggggccagctggacacacggtgagattttctcgtatgtaaataaaaggcaatttggtaaacgtgaaaaaaaaaaa

SEQ ID NO: 529298 - DNA, 272 bp, Homo sapiens
tgcccagcctccgctgcctcatcccctgcatggagtctctcttcccagccgagtgtctatgactcctgttcttcttcatcgtcatcatcattgtgctgaacctcatctttgtggtaatcatcgacaccttcgctgacctgcgtagtgcgaatcccaagacggaggagattcttaagaggatatgcttcatctgtgttctggagagggacaagttttgaataacaacgacaggtgtcatttgaggaacacaatcaagctggagcacaacatgt

SEQ ID NO: 529299 - DNA, 1987 bp, Homo sapiens
ggcgtttccctgggggcctggttggcgtggcggacctgggcggtgcggggcggaagtgggcggctgcgggacgcgcgcggagtcgcgcggcgggcgggacctggccgagctggagggcgccggggagcggggctcgggcggtccccgaggcccggcggagcgggcttctggggtgtctgcggcggcgccgggggaacgggctggggatggggcgcctagccgggcggtggccggggcctcggccatgttcgcggggctgcaggacctgggcgtggccaacggcgaggacctgaaggagaccctgaccaactgcacggagccgctcaaggccatcgagcagttccagacagagaatggtgtgctgctgccatctcttcagtcagccctccccttcttggacctgcacgggacgccgcggctggagttccaccagtcggtattcgatgagctgcgggacaagctgctggagcgagtgtcagccatcgcttcggaggggaaggctgaggaaaggtacaagaagctggaagaccttctggagaagagcttttctctggtgaagatgccgtccctgcagcccgtggtgatgtgcgtcatgaagcacctgcccaaggttccggagaaaaaactgaagctggttatggctgacaaggagctgtatcgagcctgcgccgtggaggtgaagcggcagatctggcaagacaaccaggccctcttcggggacgaggtttccccactcctgaagcagtacatcctggagaaggagagcgctctcttcagtacagagctctctgtcctgcacaactttttcagtccttcccccaagaccaggcgccagggcgaggtggtgcagcggctgacgcggatggtggggaagaacgtgaagctgtacgacatggtgctgcagtttctgcgcacgctcttcctgcgcacgcggaatgtgcactactgcacgctgcgggctgagctgctcatgtccctgcacgacctggacgtgggtgaaatctgcaccgtggacccgtgccacaagttcacctggtgcctggacgcctgcatccgagagcggttcgtggacagcaagagggcgcgggagctgcaggggtttctcgatggcgtcaagaagggccaggagcaggtgctgggggacctgtccatgatcctgtgtgaccccttcgccatcaacacgctggcactgagcacagtcaggcacctgcaggagctggtcggccaggagacactgcccagggacagccccgacctcctgctgctgctccggctgctggcgctgggccagggagcctgggacatgatcgacagccaggtcttcaaggagcccaagatggaggtagagctcatcaccaggttcctcccgatgctcatgtccttcctggtggatgactacactttcaatgtggatcagaaacttccggctgaggagaaagccccagtctcatatccaaacacacttcccgaaagcttcactaagtttctgcaggagcagcgcatggcctgcgaggtggggctgtactacgtcctgcacatcaccaagcagaggaacaagaacgcgctcctccgcctgctgcccgggctggtggagacctttggcgacttggcctttggcgacatcttcctccacctgctcacgggcaaccttgcgctgctggccgacgaatttgcccttgaggacttctgcagcagcctcttcgatggcttcttcctcaccgcctctccaaggaaggagaacgtgcaccggcacgcgctgcggctcctcattcacctgcaccccagggtggccccatctaagctggaggcgtgcctgtgccatggtgggtgtcctggggcctgtgcggagggagccacctcaccctgcagcccaggttgcaggtgtggccttgtttctccttgcccagcagtgctgccttcagcggccgtgacggggccagctggacacacggtgagattttctcgtatgtaaataaaaggcaatttg

SEQ ID NO: 529300 - DNA, 1864 bp, Homo sapiens
ggcgtttccctgggggcctggttggcgtggcggacctgggcggtgcggggcggaagtgggcggctgcgggacgcgcgcggagtcgcgcggcgggcgggacctggccgagctggagggcgccggggagcggggctcgggcggtccccgaggcccggcggagcgggcttctggggtgtctgcggcggcgccgggggaacgggctggggatggggcgcctagccgggcggtggccggggcctcggccatgttcgcggggctgcaggacctgggcgtggccaacggcgaggacctgaaggagaccctgaccaactgcacggagccgctcaaggccatcgagcagttccagacagagaatggtgtgctgctgccatctcttcagtcagccctccccttcttggacctgcacgggacgccgcggctggagttccaccagtcggtattcgatgagctgcgggacaagctgctggagcgagtgtcagccatcgcttcggaggggaaggctgaggaaaggtacaagaagctggaagaccttctggagaagagcttttctctggtgaagatgccgtccctgcagcccgtggtgatgtgcgtcatgaagcacctgcccaaggttccggagaaaaaactgaagctggttatggctgacaaggagctgtatcgagcctgcgccgtggaggtgaagcggcagatctggcaagacaaccaggccctcttcggggacgaggtttccccactcctgaagcagtacatcctggagaaggagagcgctctcttcagtacagagctctctgtcctgcacaactttttcagtccttcccccaagaccaggcgccagggcgaggtggtgcagcggctgacgcggatggtggggaagaacgtgaagctgtacgacatggtgctgcagtttctgcgcacgctcttcctgcgcacgcggaatgtgcactactgcacgctgcgggctgagctgctcatgtccctgcacgacctggacgtgggtgaaatctgcaccgtggacccgtgccacaagttcacctggtgcctggacgcctgcatccgagagcggttcgtggacagcaagagggcgcgggagctgcaggggtttctcgatggcgtcaagaagggccaggagcaggtgctgggggacctgtccatgatcctgtgtgaccccttcgccatcaacacgctggcactgagcacagtcaggcacctgcaggagctggtcggccaggagacactgcccagggacagccccgacctcctgctgctgctccggctgctggcgctgggccagggagcctgggacatgatcgacagccaggtcttcaaggagcccaagatggaggtagagctcatcaccaggttcctcccgatgctcatgtccttcctggtggatgactacactttcaatgtggatcagaaacttccggctgaggagaaagccccagtctcatatccaaacacacttcccgaaagcttcactaagtttctgcaggagcagcgcatggcctgcgaggtggggctgtactacgtcctgcacatcaccaagcagaggaacaagaacgcgctcctccgcctgctgcccgggctggtggagacctttggcgacttggcctttggcgacatcttcctccacctgctcacgggcaaccttgcgctgctggccgacgaatttgcccttgaggacttctgcagcagcctcttcgatggcttcttcctcaccctgcagcccaggttgcaggtgtggccttgtttctccttgcccagcagtgctgccttcagcggccgtgacggggccagctggacacacggtgagattttctcgtatgtaaataaaaggcaatttggtaaacgtgaaaaaaaaaaa

SEQ ID NO: 529301 - DNA, 1734 bp, Homo sapiens
ggcgtttccctgggggcctggttggcgtggcggacctgggcggtgcggggcggaagtgggcggctgcgggacgcgcgcggagtcgcgcggcgggcgggacctggccgagctggagggcgccggggagcggggctcgggcggtccccgaggcccggcggagcgggcttctggggtgtctgcggcggcgccgggggaacgggctggggatggggcgcctagccgggcggtggccggggcctcggccatgttcgcggggctgcaggacctgggcgtggccaacggcgaggacctgaaggagaccctgaccaactgcacggagccgctcaaggccatcgagcagttccagacagagaatggtgtgctgctgccatctcttcagtcagccctccccttcttggacctgcacgggacgccgcggctggagttccaccagtcggtattcgatgagctgcgggacaagctgctggagcgagtgtcagccatcgcttcggaggggaaggctgaggaaaggtacaagaagctggaagaccttctggagaagagcttttctctggtgaagatgccgtccctgcagcccgtggtgatgtgcgtcatgaagcacctgcccaaggttccggagaaaaaactgaagctggttatggctgacaaggagctgtatcgagcctgcgccgtggaggtgaagcggcagatctggcaagacaaccaggccctcttcggggacgaggtttccccactcctgaagcagtacatcctggagaaggagagcgctctcttcagtacagagctctctgtcctgcacaactttttcagtccttcccccaagaccaggcgccagggcgaggtggtgcagcggctgacgcggatggtggggaagaacgtgaagctgtacgacatggtgctgcagtttctgcgcacgctcttcctgcgcacgcggaatgtgcactactgcacgctgcgggctgagctgctcatgtccctgcacgacctggacgtgggtgaaatctgcaccgtggacccgtgccacaagttcacctggtgcctggacgcctgcatccgagagcggttcgtggacagcaagagggcgcgggagctgcaggggtttctcgatggcgtcaagaagggccaggagcaggtgctgggggacctgtccatgatcctgtgtgaccccttcgccatcaacacgctggcactgagcacagtcaggcacctgcaggagctggtcggccaggagacactgcccagggacagccccgacctcctgctgctgctccggctgctggcgctgggccagggagcctgggacatgatcgacagccaggtcttcaaggagcccaagatggaggtagagctcatcaccaggttcctcccgatgctcatgtccttcctggtggatgactacactttcaatgtggatcagaaacttccggctgaggagaaagccccagtctcatatccaaacacacttcccgaaagcttcactaagtttctgcaggagcagcgcatggcctgcgaggtggggctgtactacgtcctgcacatcaccaagcagaggaacaagaacgcgctcctccgcctgctgcccgggctggtggagacctttggcgacttggccttggggaatcttcctccacctgttcccgggcacttgggctgtggcgagaatggcctgaggttcgggggccttcggaggtttcccccgcctccagggaggaggccgggacgcgggcccaaccg

SEQ ID NO: 529302 - DNA, 153 bp, Homo sapiens
aaaaatatcgagggtatgaggactttacttaactgggcgcattgccatggggctgttcgtggaacatgatggcaagttgtcttgggaactcttcagcatcgtgtgtggatcctgggattaaagcctagtagtggcggagccttgaaacctggg

SEQ ID NO: 529303 - DNA, 115 bp, Homo sapiens
ctcctacctcatctttcctacttactaaatacagatgattttattatgattattatcttcatcattggaaatggataagatagataagatatttcttgtttttgttattcgggag

SEQ ID NO: 529304 - DNA, 91 bp, Homo sapiens
aaaacaaaccaaccaactttttcgggtttttggttgacccccccaaaaggggtttttttcctttcaaaaaaaattccccccggctgggtga

SEQ ID NO: 529305 - DNA, 861 bp, Homo sapiens
gctccagcttagatggggccaccctggggtgcaggtgaatgaggagccgcagcgcgtgcagaaggccctggagcctacaggccagagcggagaggcagtgaaggagctttactcccagctcggcgagaagctggaacagctggatcaccggaagcccagcccggcacaggctgcggagacgccggccctggagctgcccctccccagcgtgcccgcccctgccccgctctgagggccctccagacctgctcgggtgctggggccatgccgagtcgcggccctgctcagccggaagaggctcccggacctggatgtacagggcagtctctcttcccggggctatggctgggcctgtcctgccgtcatggccccctgcttcctgctccttggagctggctcccggaccttgcccaccatccatgcagtggctcccagggcagagcctctccttgtactttggcagccatagaaagcgtgctcattttctgttttcctgtgttaggaaaaaaccacctgttttccaaggggagagggcggggcctgagggtgggggcggggcctcttcattggcccagcttggcgaaagcgaggcacactgcttactgccttggggttgtggagatggacccgtgacctcgtggaggccgtgtgggggcagcagcctggcctgtgccatggtgggtgtcctggggcctgtgcggagggagccacctcaccctgcagcccaggttgcaggtgtggccttgtttctccttgcccagcagtgctgccttcagcggccgtgacggggccagctggacacacggtgagattttctcgtatgtaaataaaaggcaatttggtaaacgtgaaaaaaaaaaa

SEQ ID NO: 529306 - DNA, 219 bp, Homo sapiens
cgtggtctaccagaatgcatgaaagctcgagtctgtgcgaacgtaatggagtagctgcgcaggacagtagctcacacctgtaatcccagcactttgggaggccgaggtgggcggatcacctgaggtcaggagtttgagaccagcctggccaacatcgtgaaaccccatctctactaaaaatacaaaaattagctaggtgtggtggcgggcgtctgtaat

SEQ ID NO: 529307 - DNA, 1306 bp, Homo sapiens
ggcgtttccctgggggcctggttggcgtggcggacctgggcggtgcggggcggaagtgggcggctgcgggacgcgcgcggagtcgcgcggcgggcgggacctggccgagctggagggcgccggggagcggggctcgggcggtccccgaggcccggcggagcgggcttctggggtgtctgcggcggcgccgggggaacgggctggggatggggcgcctagccgggcggtggccggggcctcggccatgttcgcggggctgcaggacctgggcgtggccaacggcgaggacctgaaggagaccctgaccaactgcacggagccgctcaaggccatcgagcagttccagacagagaatggtgtgctgctgccatctcttcagtcagccctccccttcttggacctgcacgggacgccgcggctggagttccaccagtcggtattcgatgagctgcgggacaagctgctggagcgagtgtcagccatcgcttcggaggggaaggctgaggaaaggtacaagaagctggaagaccttctggagaagagcttttctctggtgaagatgccgtccctgcagcccgtggtgatgtgcgtcatgaagcacctgcccaaggttccggagaaaaaactgaagctggttatggctgacaaggagctgtatcgagcctgcgccgtggaggtgaagcggcagatctggcaagacaaccaggccctcttcggggacgaggtttccccactcctgaagcagtacatcctggagaaggagagcgctctcttcagtacagagctctctgtcctgcacaactttttcagtccttcccccaagaccaggcgccagggcgagaaggcagagccaggtgtacaggatggaacatgaaggcggacaaggagcgtgaccactgaagcacagcatcacagggagacggttaggcctctggataactgcgggcaggtctgactgatgtcaggccctccacaagaggtggaggagcagcagtctcttctctaaactacccccggggaaagggagactccctttgccctgtctgctaagtagcgggtgtgtgttccttcacatttttcgctaccgactagaccctggtccgcctggcaacgggcgtcttcccagatgctggcgtcaccgctagaccaaggagccctctcggtgaccctgtccaggcataacagaaggctcgcactcttgtcttctggtcacacctcactatgtcccctcagctccctatctctgtatggcctgtttttcccagattatgattgtagaaagccgcttgtatatttattggataag

SEQ ID NO: 529308 - DNA, 1065 bp, Homo sapiens
  misc_feature (379)..(379): n is a, c, g, or t
aaaaaagttaaaaaaacaattagctggacctggtggtgcacactcagtaggctgaggtgaaaggattcctttaacctgggagactgaagctgcagtgagccatgatcgtgccactgcactccagtctgggggacaaagtgggaccctatctcaaaaaaaaaaaaaaaaagttcattccttcttccaacttacgtgattgtgacattagtggatctcactcaggttcaaacccttcacgtgcattacaggaattcccttaaaggggttccatatttataatatagcgctttgaggagaaggggacgactttatacaaagggccggtgttgtagacgtagaacattaggagattattacgccattatcaccacgggtggcncaggggaccttggacacgcggttcccaaattccttttattgggcagagcaagtgggggaacatcacaagaggggtgggcatatgcccaaaaagttctcaacacctcgaaggggccttgaaaggttttatccacacatatgtgtctcccaacaactcagaggccaaaaaagcccctgtggcacactgtgacaggggtgtggagaaagcccctctcagtgtggggaaccagaagtgagaccgaccactgtgtgttgtttgtgggaaacaggagagagaatctccccccttgttgtgtgtaaacaccgggtgtctctatggcgaggtgggcggggagtccctactccttttccacagtgtagacacttaaaagaggccctttcaattgtgcccccccccttttattttcacctggtgggcacctattgtagagacgcgtggtgatgaagaaaacatttgagggggagaaatgttggggcttgagcgagacgacaaatattatttccccgctgtgaaaaggagaagcgcccttttcttccccctttttgtgtggggcgcccccccccccggaaagcttttttattgtgggcccagagcccccccaaaacatacttctttctgtttctcacctccgtgggggcggagtgtggcaaaatccttctcactccgaggacaaaacggcggcaaac

SEQ ID NO: 529309 - DNA, 906 bp, Homo sapiens
ggcgtttccctgggggcctggttggcgtggcggacctgggcggtgcggggcggaagtgggcggctgcgggacgcgcgcggagtcgcgcggcgggcgggacctggccgagctggagggcgccggggagcggggctcgggcggtccccgaggcccggcggagcgggcttctggggtgtctgcggcggcgccgggggaacgggctggggatggggcgcctagccgggcggtggccggggcctcggccatgttcgcggggctgcaggacctgggcgtggccaacggcgaggacctgaaggagaccctgaccaactgcacggagccgctcaaggccatcgagcagttccagacagagaatggtgtgctgctgccatctcttcagtcagccctccccttcttggacctgcacgggacgccgcggctggagttccaccagtcggtattcgatgagctgcgggacaagctgctggagcgagtgtcagccatcgcttcggaggggaaggctgaggaaaggtacaagaagctggaagaccttctggagaagagcttttctctggtgaagatgccgtccctgcagcccgtggtgatgtgcgtcatgaagcacctgcccaaggtagggccctaaccctaaccctgatggcgtggaccgtccgcccactctcatgcccttggttagtggaagttccggtggccgcctagctccgggagcttcctgtgctgcctgcccaagtgctgtccatggtgagctctgtgctgacttctcccacatgagccgcgtggagaccgaaccttagcactggagttagggtgtggggcccctcctgggaaagagctgttggtatttagcatgtctgtctgacatgctggggccggggaaccagtcataggtgcctgtggggtggagcttag

SEQ ID NO: 529310 - DNA, 330 bp, Homo sapiens
  misc_feature (264)..(264): n is a, c, g, or t
  misc_feature (283)..(283): n is a, c, g, or t
aattacaggaaaagaattgaaataactttcagtagctgtgaggctgcaaccatttgaggaggggggaaaataaccacaagtaaaaaggcgaagagcgtgaactcatatttgaacttcgttcaccttacttgtttttatttggggtaaataaagcaaatatatggtatgtaaatatttgaacttcgtttaccttacttgtttttatttggggtaaataaagcaaatatatggcatgttgcagcaccgtttgcctaaccccctttnaaaagatggtcgaatagtngtttgctatacctttactgggagggcagggggagcacaaagttgaag

SEQ ID NO: 529311 - DNA, 989 bp, Homo sapiens
  misc_feature (989)..(989): n is a, c, g, or t
aaagctaacgatagccatgagccaggaatttcccttagggatagagttattattgaatgttttagaagtagtagctcccttcaagcactttaacaagcttagagaatttgttcagatgaagcttcctccaggcttacctgtaaaattagatatacctgtgtttcccacaatcacagccactgtgacttttcaggagtttcgatacgatgaatttgataggctccatctttactatacctgatgactacaaggaagacccaagccgttttcctgatctttaactgacgtggaacaggatgccgtctaaccaaggaaagaaaatacagagaccctagaaggaagacccaagccgttttcctgatctttaactgacgtggaaaaggatgccgtctaaccaaggaaagaaaatacagagaccctagaagtggatccaaatagaagggacaaatgctttcagtgaagaaaagggaattacacatgaatcgacacatcagtaatacgatacagtgaaatgggtctctaatacgaatttcagcgagttttctgatgtgccattgtggtctttttaaaaatataccatattataaatgtaataggtctgaacattaatgaccctaagactgggatatgtgaagcagtatgagtgctgtggattgtctgaaaaagtgtcacaggtgctggtgccctatcctatgccataataagtatactctagcagccataccaaattaacacacgtccggagccttcaccgtcaatcaccgtctcagcagactggagcccttcaactgccactcagcacggtgacatatacaattccgtcgcgactggacacagtaacaagttacctgagctgcagaagaaggcgccccaagacacagagccctccgcaagacacaggacagaaggctgcaacacagcaaacaacacaaagaaaacacacaggaaagaggaggaacaacaccagcagacaccgtgctacaatacan

SEQ ID NO: 529312 - DNA, 376 bp, Homo sapiens
  misc_feature (229)..(229): n is a, c, g, or t
  misc_feature (266)..(266): n is a, c, g, or t
  misc_feature (276)..(276): n is a, c, g, or t
  misc_feature (328)..(328): n is a, c, g, or t
  misc_feature (370)..(370): n is a, c, g, or t
gatgactatagttaacaataatatatagtttcaaatagctagaaggagaatattgtacgttcccaatacaaagaaatgatgttcgagatgatgatatgctaattaccctgatctgatcactacacattatacagatcaaagcattactatgtactccatgaaaacgtataattattatttgtcaattgcaaaaataaaattttaatttagtttgttgaggcagggtctngctctttcacccaggctggagtgtactagcaccatcncagcacactngcagcctcaacctcccaggcttcaaacaatcctcccattctcagccttctgnagtagctggggaccacagacacacaccaccacattccagctngttttt

SEQ ID NO: 529313 - DNA, 353 bp, Homo sapiens
acacgcaatctcaatttctgccaaacagttttaaaacaacaaagataaaaaaagacaaagggcattacataatggtaaagggttcaattcaacaagatctaactattctaaatatatatatacccaacacaggaacacccagattcataaagcaagttcttagagaccctaatagaaacttaagactcccacacaataatagtgggagactttaacaccccactgacaatattagatcattgagacagaaaattaacaaagatactcaggacctgaactcagcactggatcaaatatatacacaacactggatcacagaatatacattcttctcattgccagattgcggtgtt

SEQ ID NO: 529314 - DNA, 1270 bp, Homo sapiens
tcgcagtgaccagtggtgtgtgaaccagaggactatgctggtggtgtccacggcagatgcagagctccgagcagctaaggacacctccattggcagaactagcacgccagttagccattgcaaggccattcaacatccatcaccggccaccacactcatgcatgacagccaacttctcaacgcattaatttccaggcacaaccagtcaccagccacaagagccgtcatctccagacatgacccattgcagcatcatggcaatgcacacccaaccatccagcaccccatgcccaagcatgctacaacacactgcccagccccaagcattcaccaatcaaccagattcatcaacatggcagccccatggcatttcatcacaactctgtgcagcatagcttctgcacacgccatgcgcaagctggctgacggcaacctcacaggcaggcattctaggctattcccagcccgcatgcctctcttcaaaccatgctcagcccagccaggctgctcgctgcttggcaattccacatcagatgacagatgaggccaacagctctgcactggcctcatcgcactctctatcacacacccctcacaccccatctcacgcggcacttatgcaacggagcaacgcaggggctgatcacgcatgtcttcactctggcgcatccagttagccattgtccaggactggatatgcagatggctaccaccctggcccaccacattcgtcccccacgagaccgctactcctggatgcgttctaacctggcccccagggactagcaaccacgcaacgccatagtaaccaacaactcggcgctcacacgcaacctgggcaactaactggagctcgcttccggaactgtgacgcaacttcttccacacacccacacctgccacacataccggtcgcaactccttccatcggcgaccacatatcagaccccagcagaccaactaacccggtatctcacccacacagtcacatcattcacaccggaccgcatccccacccagtaccacttgggccaatgttgtgctctgaaacctcattgcaacccacctaggggtcaccttacccccctcaccctgcgacctcaccacaaccgagtgcgcatacctgccaggtagagcgctaacaccgactttcaacgcatcgcttcatacagatgaaccactgtgatcaaccacacgcgttctaatatcatcgccacccactacacccgtctcagccacgcgtcacacaccccaccccgtccacacctcc

SEQ ID NO: 529315 - DNA, 310 bp, Homo sapiens
ggctgatttctgtaatcctcagcgctattagcggctgaggtgggaggtttgcctaaggggaggttttcgagaccagcctggcccccatggtgaaacctggtctctactaaaaatacattagctgggtgcggaggcacgcacctgtaatcccagctactcaggaggctgaggcaggagaatcgcttgaacctgggaggcggaggttgcagtgagctgagatcgcgccactacacttcagcctgggtgacagagcaagactccgtctcgaaagcgtcagtaaggacgaactcaagacatgtctgcccgaatt

SEQ ID NO: 529316 - DNA, 649 bp, Homo sapiens
  misc_feature (621)..(621): n is a, c, g, or t
cgtcgaacgcggcagcaacccctcgagcgcctcaccgtgcccatcgccggcagcttcgccaccaataacagcgaagccttgcgcgacgccgcactcaaccacctgggcatcgccctgctcccggacttcagcgcccaggcggcgctggccgctggcaaagtggtgcaggtattgaaggactggacactcaaaggcgcgtttgccgatgagatttacctcattcggccctactcgccccatgtgcccaagtcggtgaccgtactggtagggtatttgaaggaaaagctgtcaggcgggtttcaatttggtggctgctgatgaaggctcttgtaggagcgagcttgctcgcgaaaaaaccgagaaccccgcgttaaacctgatagcgcgcgttatcgttggcgatcttcgcgagcaagctcgctcctacagaggacagtgacccaatcctgttggattcttgcctgatcctctgaacttgagggcaatcggatagatagcccttgcgcgttggtctagagttcgacaatgggcgacttccattcgcaccgctcctataagaactcagcaccaccaaccgatgatcagcaggtgagcccgcatggaattacgtatcacccacangggattcatttgggggggatctctagag

SEQ ID NO: 529317 - DNA, 236 bp, Homo sapiens
gtttgcatgcaaagaacatcatccatagagacatgaaatccaacaatatatttctcatgaaggcttaacaagttaaaaatttggagatttttggttttgcaacagtaaaagtcacgttgagttgttctcagcaggttgaacaacctactggctctgtcctctggatgggccccagaggtgatccgcatgcaggtaacaaccccttcagtttccagtcggatgtctactcctctggc

SEQ ID NO: 529318 - DNA, 268 bp, Homo sapiens
taagagcggctccgcaccttatggttcctagtcggattcgttaaccactgagccacgacgggaactccacctatcatttcttgcatggttagtctgtgccgggcattgttctggatattgtgcacttattttctcatttaatcatcacagcaaggtgtgtactattattgccatcatttcacagatgagaaactttaggcacagaaaagttaagtatctttcccaaggtgacataaatagtgaagcgacagaaatgggatccagaccc

SEQ ID NO: 529319 - DNA, 886 bp, Homo sapiens
ccaagtggtagcaaggcaaatgagagaagaggaggaggaggaggaggaggagtgctgagtgcttggagagtgagtgctgtccccgaaggaagaatggccccactgtagtgcttgaacccccacccgagccttgtgctacaaggagatcctggaaatggctgagagtcggtcggaggctctggctgtggatggatgctgggaaggcctgggtggcttgatgtgatgtgctcatgtgacccctgaatgggaatgtggatgaacatggatgcactcccatgcagaaatgatggagtgatgtgatggtgatgatggcatgtgtgtccctgcaagggcctcttcctgtgggtgggaagagcggagaggctggatgcagggaggaggagctggctctccaaaggtgaggttggggaagtgactccagaactgcttggagcaatgattgggacccatgcttggcccaatggaatgcttgaccgtgcttgagaatgctgtgcttggatgtgggcatgggatgggaaggatggaggggacaaaccgggtggacagttccaatagaatggctctgcctttccggtgggcccgggggcctactgtggcttcaggggggcccctttggtgcctggcaagttagcgaacaggaggggttgagatgtgccaattccttcccccgggggaagggaccaggcctttgaagtgccgggggccttgcccctaccaagggtcccgaaaggctaacccccgaggaagaagaaacgagggaggtgggcagtgaaaaaccggagaccaagagggacaggggaggtggagaagcttggcctggccattgtcgagaagctggaaaatgtggcccaccaggttccgggcctaagtgggggttgagaacacg

SEQ ID NO: 529320 - DNA, 1003 bp, Homo sapiens
gtgtggctggacctcgtgtcgcgagctgccattgcccagtggatggaagaagaaagggctccgcgcaagcgccgatggcgcggcctcccagtgccctgcggcagcgactcggaggacgcgcgagtttgcagatccatgtgctggacagatgactgccctgggcccggaagctgggacctggaagacccctgcccaccttccccacctcggaatgcacctcgcgatgtggagcccggacacccgggcagatggctgcgtgcccagaacaagcaagacagaagaacgtctggcaggcttccagtccatgggccctgagctacccggtgttcaaaggcatcatgacacgaaggggtacaaggtgccaacacccatccagaggaagaccatcccggtgatcttggatggcaaggacgtggtggccatggcccggacgggcagtggcaagacatgctgcttcctcctcccaatgtccgagcggctcaagacccacagttgcccagacccggggccctgtgccctcatcctcttcgccgacccgagagctggcccttgcagaccctgaagttcactacggagctaggccagtcccttggcctcaagactgccctgatcctgggtggcgcccggatgcccacccgcctcgcagcccttgcaccgcaaatcccgacatacttttggcaggcccggaccgttggggcctgtgggctgtggcaattgagcctgcagctcccagttttgcgctccgtggtggtccgcgcaccctgccgcgctcttcgccccgcgttctcgctcatccccttccgtggcgctttccgccggcctccccgcgggggccccaccaccggcgggcgctccctgcgccggcctccccaccctgtcgtgctcggcgattgtccccggctgtgcctccggggggcggtggtcaccccggctgcgggcgactacacccctcgcgcctcagtgcccctcttcccccgggcgggaggacccacgccgcgtcgcc

SEQ ID NO: 529321 - DNA, 343 bp, Homo sapiens
attcgcggccgcgtcgactttttttttctttgagacagggtctcgctctgtcgcccaggctggagcacagtggcgtcatctcagctcactgcaacctccacctctcaggttcaagccattctcctgcctcagcctcccaagtagctaggatcacaggcgcctaccaccacgcctggctaatttttgtagttttagtagagacagggtttcaccatgttggccaggctggtctcgaaccccttgacctaaggtaatccacccaccttagcctcccaaagtgctgagattacaggcgtgacgacagtgctcggctgtctataaatacttactttaaaattaaaat

SEQ ID NO: 529322 - DNA, 719 bp, Homo sapiens
gtggagtagtatttatatgttcttccggaacacatgagcaagtaacagagccaggaaccctactgcagtaaactgaagacaagaactcttcccccaagaaaaagtgcacagacagctggcagtggagcctgctttatttagcaggggcctggaatgcaaacagccactggggcacaggcaccggagaccaacatgcacagggtaacaccccttgagcgcacacaaagaagcttgatattttttttatggccatagaaatacaagccaggccagtatttgagacgtttgctctggtacctggtgcatttattatatggaaccctctaacccctgacaccacgacgcattcctaattgcacgccgctacgacgcccgtctctttgcccctccgccgcgcccctcaacgcttacccaaaaccccaccccacccgcaccgcgccccaccccaccagcggcgaggcccgcgagcgcgcgtatacatatgcgagggcaccgagacgatgcggctaacaacgaacaggcccaaaatcccgcggcgcacgacacggggcatcgctctcagttcctccgcccgcctctggctcggcgcccgcgccgcagtaacgccgcctgacgcattaaccgcgccgccaaagaccccaaacgcgcaaacttgagccatccccgtattgtccgcccccacccacctgtcgatcgtccgcgaccgtcccagagcacat

SEQ ID NO: 529323 - DNA, 87 bp, Homo sapiens
gaaaattcaaaaatttattttgttttaatttgaaaggcccgttcagggttccttatgcaaaaaaataaaacaaattccggaattgga

SEQ ID NO: 529324 - DNA, 859 bp, Homo sapiens
gtatgagttttttttttttcccttggtacttttccatttaaatgtggtcagagaacatggttaatatgtgagtgtgatccttgggaatccattgggatttatggatggcctaccatatggcacatttttctaaagtatccggggtacagtgggtgagtgcaggtgatctatatgtgtccataaattcaaggttggctaatcattaaatggtcttagatccaatacttttctctgctgtaacactgttatatcttataatcttatgtgtctggtaaaatggcccaatagaatagtggattggtctacttttcctggttttaacttaaattattttaaagctagcttagtaggtgcactctagatggcaatggatatatttcctagtgatttaacaatatttatggggtgatttcctctagtagtaacttggagtctggtctcatttcatgtaagtacagcagcttatttggtagtactggcctggtacattttccctatttttcactgttcaggcatgccctttataaaggggtggaatgggctggctaagacttctttaaaaacattccctttgatagtttttttccccttggaatttgagagttcaatttctcacatgtattgtcactgggttaatccctatattggggctaattttgggctacatactttttacccaatctgggtctcggaattaaaaatttcttgggcacgagaaaaaatattctttgggaaaaaggccttgagagcgcccaggggtaaatctggccgaagtcggatatacggcgaatgccgccgagagaggaactcgtgcccctaatagaggtccacaatagtaagatgcatttcggtaacatcc

SEQ ID NO: 529325 - DNA, 174 bp, Homo sapiens
gttaacagctataaccatgcactgggccgtcgtttaacagttaacagctataaccatgcattggccgtcgttgaacagccaacagctataaccatgcatgggccgtcgttgaccagttaacagcttatgaccagtcatgggccgtcgttgaccactcaccagctataaccagtc

SEQ ID NO: 529326 - DNA, 735 bp, Homo sapiens
  misc_feature (225)..(225): n is a, c, g, or t
cccctggccttgtggccaatttccgccgctgtagtaccacggttgggaaccaccaggggttgttcacttctttgcagaaaatgttctcccaaggggggtggcaccaccctctgtgaggcccgccccctctttgagggggaagttggcaccccgcggtggtggtacacccacgcacgtggagaaatggatgcgggagaccccccccccgacgtttgtctttagganaacaccacccaattgtcggcagtagatgggcgggactaagtaatagaactgggtctcgcctttaggggcgttacacttgttgcgcacacacgcattttggttgccaacaactattaaatcattatttgttgtctaaacactgaacccccacttgcgcgcctaagaacaccttgtcgaccttcaccaggtttttctgatcagaaatatatatccggacactaatattggacacacctccttgggccgtctctgcctcagcaatttctttgtaatcttttcttcttactccgtcctgacaatccttgtggaactacatccgtcctcacccgccatacctgcttttataacgaccacaccacgtagatctctaactaccactctttactagagtgctctccactcatcctcccccgtaacagaccgcccccaccactgattcttttatgacgatgtaacctgccagcaaaacttcgttactaatcatacattaccccaacgcaaacacaaaca

SEQ ID NO: 529327 - DNA, 281 bp, Homo sapiens
gcccgtctgctccacgagatggatgggggcgtcacagtccaagttcaaatcaccatctgctggcgctggcgtgccaacgattgcacagctagaggagcaggtctgagcaggaggccagagagaaacaggcggcaccaagtctgctgaagcagaaagacaagaagctgaaggaaatcttgctgcagtgtggaggacgagcgcaagatgggcgagcagtacaaggagcaggcagagaaaggcaatgccagtgtcaagcagctttttgaggcagctggaggagg

SEQ ID NO: 529328 - DNA, 128 bp, Homo sapiens
gacaaaaagaagaaagataagaagaaaaagaaaggagaaaaggaagaaaaagagaaagagaggaaaaaaggccctagcaaagccactgttaaagctatgcaagaaactctggctaagcttaaagagga

SEQ ID NO: 529329 - DNA, 680 bp, Homo sapiens
  misc_feature (2)..(2): n is a, c, g, or t
  misc_feature (135)..(135): n is a, c, g, or t
  misc_feature (140)..(140): n is a, c, g, or t
  misc_feature (145)..(145): n is a, c, g, or t
  misc_feature (183)..(183): n is a, c, g, or t
  misc_feature (199)..(199): n is a, c, g, or t
  misc_feature (204)..(204): n is a, c, g, or t
  misc_feature (208)..(208): n is a, c, g, or t
  misc_feature (219)..(219): n is a, c, g, or t
  misc_feature (243)..(243): n is a, c, g, or t
  misc_feature (325)..(325): n is a, c, g, or t
  misc_feature (328)..(328): n is a, c, g, or t
  misc_feature (331)..(332): n is a, c, g, or t
  misc_feature (344)..(344): n is a, c, g, or t
  misc_feature (376)..(376): n is a, c, g, or t
  misc_feature (381)..(381): n is a, c, g, or t
  misc_feature (384)..(384): n is a, c, g, or t
  misc_feature (386)..(386): n is a, c, g, or t
  misc_feature (390)..(390): n is a, c, g, or t
  misc_feature (409)..(409): n is a, c, g, or t
  misc_feature (416)..(417): n is a, c, g, or t
  misc_feature (421)..(421): n is a, c, g, or t
  misc_feature (426)..(426): n is a, c, g, or t
  misc_feature (430)..(430): n is a, c, g, or t
  misc_feature (435)..(436): n is a, c, g, or t
  misc_feature (442)..(442): n is a, c, g, or t
  misc_feature (467)..(467): n is a, c, g, or t
  misc_feature (477)..(477): n is a, c, g, or t
  misc_feature (492)..(492): n is a, c, g, or t
  misc_feature (500)..(500): n is a, c, g, or t
  misc_feature (513)..(513): n is a, c, g, or t
  misc_feature (515)..(515): n is a, c, g, or t
  misc_feature (546)..(546): n is a, c, g, or t
  misc_feature (556)..(556): n is a, c, g, or t
  misc_feature (558)..(558): n is a, c, g, or t
  misc_feature (566)..(566): n is a, c, g, or t
  misc_feature (574)..(575): n is a, c, g, or t
  misc_feature (577)..(577): n is a, c, g, or t
  misc_feature (581)..(581): n is a, c, g, or t
  misc_feature (583)..(584): n is a, c, g, or t
  misc_feature (590)..(590): n is a, c, g, or t
  misc_feature (592)..(592): n is a, c, g, or t
  misc_feature (597)..(597): n is a, c, g, or t
  misc_feature (662)..(662): n is a, c, g, or t
tngaaagaggggccgtgaggtgagaaagtccgggagccgaccttgagatggcctgatatgaaggagtcacgcctcccgcctccggagctgccagtggctgccttgtccttcaagtgcaggagctggttaaatgtnaggantggangccactgtggtaaggggcttcccacgggcacggggtantggtgggacacggttngggtngctngggccttgctngaatgtactgtaaaaagttctganactctccattgagcactcccttttcttccagaggcccggaatttggagcaaggccaccgtttacattccctaccccctaaanaanaannaactaaaaaacnaggggcactttcaggaagttcattgtaagttncgccnttngnggtnacagagggacggggaaggnaaaggcnngggntaatncccnacacnncagctnacttgcctgctgccccttgccctgnaccctgcccncacattggactggcntttagccngcaagccgggttntncccttggggtgggctgggcccagggtgtgcngctgggccantngggcgganctggcccnncnactnannaattgncncattngtacttgtccccctcagcacattgctcttgttccctcaggttttgttggcaattccagtctcccncaaaaccttagcagaggc

SEQ ID NO: 529330 - DNA, 254 bp, Homo sapiens
  misc_feature (2)..(2): n is a, c, g, or t
  misc_feature (135)..(135): n is a, c, g, or t
  misc_feature (140)..(140): n is a, c, g, or t
  misc_feature (145)..(145): n is a, c, g, or t
  misc_feature (254)..(254): n is a, c, g, or t
tngaaagaggggccgtgaggtgagaaagtccgggagccgaccttgagatggcctgatatgaaggagtcacgcctcccgcctccggagctgccagtggctgccttgtccttcaagtgcaggagctggttaaatgtnaggantggangccactgtgaccatccaatctggcaaaacaggcaacatggggctgctcgagtgtagtaagagattggaccacctacccttgagccgtgtgcccggcgtcttgagacctn

SEQ ID NO: 529331 - DNA, 597 bp, Homo sapiens
gccctggtgtgattccgtcctgcacgattgtctctggagcaacgtctgtttatctccgtaacgccgttctctcctaactaagtgcgtgccgcatccgatgcgaagattcgttggacatggacatgagtccccctgcaggcccctagataactatctttacggttgtgtaccactacaggccgcccgcacacgattcattcacttttaaggttggataagtgatcgaataatgatcaccagttatcttctacagaacggtcaatctagggtgcggtatgcaaaggatgagtagcacatagttgaacgcgtaggcgattgcaataacgagaaaggcaagcctcgaaattaaagttaagcacttggcaaacgtttgagaagattgtcttgtacagagccaaacgtggttgaacttgagagggctgcaggaaatatcatccagacaagtcgttacttaaaaggtctggacttcgtaggtatcttaggccaggtgcatacttaagtgcgacatgcactttacttacgctgtgtgatggaaagattgcacaagtactagaagatcaagacgatggagggatttcaatactcttccataatatc

SEQ ID NO: 529332 - DNA, 153 bp, Homo sapiens
cagaggagcgtgccaagactcttagcacactgtgatacagctctacctctgaggacctggcgccactggctcgggctgacgactattaacaggtcaagaacgtggtcgattactacccggagtacaacgctgctcttcgagggtgcaaggtaa

SEQ ID NO: 529333 - DNA, 257 bp, Homo sapiens
  misc_feature (254)..(254): n is a, c, g, or t
gtgggtatttaaaaagttaatgtcagaggaagtacacttctgtggtctgcagtagggagctcaaacaaaaataagcaaggggattaattagttttacgttttttaattctgcagaactagttaagtaagtttggggttaaggatcctttcttactaacacagatgtacctgagcaaacagttttcccattggtgctctggtgtgtcagtcatgcaatctcccctcctagctcctcaggtaggagggtgtcaggnggc

SEQ ID NO: 529334 - DNA, 264 bp, Homo sapiens
tcgataagggccacaggcataattatgggcttgcagaaactcttatgtagatcaggatttgactaatagaagtctggacaaaactggtttataaaaggatcttgagaccagctgaggcttcatctgtctgctcagctgatggtgaccacagctggagctgccaccaggggtaggtgggtgaataaaggatagctctcatctccaccattccccgcccccaaaccaacacttcctggtgtggctcctggttggccccttatcgag

SEQ ID NO: 529335 - DNA, 303 bp, Homo sapiens
atcaattaaagctccttaaaccacacaaggtattcctgaagccccactttttatactgattcaaaaagctcagagtaagatctctaccctggatgagttatctctgttactgttaggggatactaaggcctgggatgggatgaagaaaagaagaaacaagctgacactttcattcacagtcaatcatatgcaaaagcagaaagctagagctcaagttcactcaatgcctaatgccactcctgattattgcaaattagttccgaaaaactgattacagactgagctaactgcataacagctaaa

SEQ ID NO: 529336 - DNA, 666 bp, Homo sapiens
  misc_feature (454)..(454): n is a, c, g, or t
  misc_feature (493)..(493): n is a, c, g, or t
  misc_feature (508)..(508): n is a, c, g, or t
  misc_feature (516)..(516): n is a, c, g, or t
  misc_feature (567)..(567): n is a, c, g, or t
  misc_feature (586)..(586): n is a, c, g, or t
  misc_feature (590)..(590): n is a, c, g, or t
  misc_feature (642)..(642): n is a, c, g, or t
  misc_feature (651)..(651): n is a, c, g, or t
tacatgatacgactcgaggtagtacccggagacacttacgaatcaggagagatgcaaagagtctagcaaattatttctagcataatcacacatttaacttcagactcagccttgtattataattccaaaaaaaaaaaaaattgagggccaaagaatacggtttacccagtatccaaggttttaacatttgggcagccgggttaaaaatagagcctaacctatttaacttacccactgccgggctgggatactaggtgggtatcaccaaagagaaatcccccttgggacaggagcaatataaattagccaggtattataaaatggcctggtataggtctaagcattcccactagggtgtcaccagggcacctaagagacctaaagctcatagtcctgaccttgaaaaactttatgatctagtggggatgattccaaaaggtttccatgggttttnaattgggcttaaaaactactgaatctggtctccaaacangctttccggggaagnccattaantaggtggagatcccccctttctagccatctccccaatgtcatggagtttanggacagagcagtgaatgtnccanttatctcatggataaggtcaaacatacacttgataggaaaaacacaacgtangtgtccccnggggaccctctgagt

SEQ ID NO: 529337 - DNA, 434 bp, Homo sapiens
cgtgtacagggttgctggttgcagtgagccaagatgcaccactgcactgcagcctgggtgacagagcaagactgtctcaaaaaaaaaaaaaaaaaaaaaaacttccccaaaatgggttcttttataaaaaaaaggggtttaggggggctcacagtcccacctggctttgggaggccccccattctgggtggagggcaaaccaggagtgagggcatggtttacataggcgacaggcacaaaatgtgtgtgcgggggacctggccgtttgtaagatcatcagatcttgtgagatttatccactatcttgagattagcttgggaaaaacccaccccaatgattcatttacctcccacgggttccttcccacaacccagggggttttggggagctatattccacgattgagatttggggtggggccacagccaaacaa

SEQ ID NO: 529338 - DNA, 148 bp, Homo sapiens
tatagaaacagaagacgtaccacatatgatgctcaaaatgtaccagcataagcacttacaaaataacacagttgaaaaggagtagccttgagaaactctcagttcattccattgaccaccatttaataaataaacactgtaccaggat

SEQ ID NO: 529339 - DNA, 191 bp, Homo sapiens
atgaccaccaatcacatgctatcatatagtaaaacccatgccatgatccctaacagtgtgcctctcagccctcctaatgaactcctggctagccatgtgatttcacttccactccataacgctcctcatactaggcctattaaacaatacactaaccctatatacaactgatggcgcggagtaacacgaga

SEQ ID NO: 529340 - DNA, 200 bp, Homo sapiens
cttgtgatgagcgatcgagtgctattatggctaggacgcctcctagtttgttacggacggatcggagaattgtgtaagtcaataggacatatcattctcggcttcatttgaggaggggtgtttaacgggttggctaaggtataattgtctgggtcgccttatgattgtctggcttagaatcctgtttatgtctttcagga

SEQ ID NO: 529341 - DNA, 205 bp, Homo sapiens
cccccggggaaaagaaaaggttttgtgaggttttgccccccggaatttttaggtatttccaaaaaaattttgccaagtttttcaaaatgggccttaaatttttttccccccaataaaatttatgggaaatgggaaaaaaaacggggttttttttttttgaaccctcccggtaaagattttttaaaaaaaaattttttacccccca

SEQ ID NO: 529342 - DNA, 277 bp, Homo sapiens
  misc_feature (14)..(14): n is a, c, g, or t
actctagaggttanctatggacaatgcgctacgcggtgcttactgggcgcaagaaggccttctcggagatgtgcgcggcgctgcgccagcggctcgaggaagcccagcgcaagggcggcgagatccaagagatgctgactgcgtcgttcgccaagctcaacgccgagtacggattcggcctggccacaccgaaggcgcccgacctgacgcgcttcatccgcgacctggacctcatcgagcgcaactacatgcagtaccgcgtagcgcattgtccata

SEQ ID NO: 529343 - DNA, 806 bp, Homo sapiens
tggaaacagggtctcactgtcgcccaggcgggattgcaggggcgtgatctcagttcactgctgctttccctccgttgggctcaagcaggttctcccacctcagcctctcgactaacaggggactataatctggcagcaccatgccgagctaatttaatttttggtaagaagatagagctctcactatgtcacccaggttcgtctcaaactcctgaaccctagtaattctcctatctcagcctcccaaagtggctgggggttacaagacttagacgccactggtggcctggtctaaacttggtactttcaactggtccatttctccctggtctggtcccatggggcactcataaaaaaacaagaatggctcccaatttaattcatcttccaagcctgtagctctgggaatactcactggttgcaagtcaaaacgctggattccatcatggaggtttcctcacgtttcacatctcactcatcaccaagtcatgtgggggtaaatttctggataaacccttgaatttaccggtcttctcaatcctctggtcacaaaagcctcaagtgagggtcaaattcaacattatcctgatctagacaggccccattctcaatccacccttttccacgttgatggcccaaggacttctaacaataaactctctttggcaccacagacttcttggaaacatatacatgctgtggaccctctctgtaaaaaaccggaccacttaaaatttcaccatcagattccatgggtcctggggttccccccgaaagactatccagggttaatagcatcacgaata

SEQ ID NO: 529344 - DNA, 2022 bp, Homo sapiens
ggccaacacgtaggcgtgtggctgtaggtcgttctagtaccaacgtatcacttgtcttgtatcgtgtctcctctgtgctattggtgtggatcctcgtctgcccgaatgctctcgggatcagtgtagcagaaggtcagtgattccaggtgtgtccgagtgtggtacctgagtgttaaggagtatgtactggataaagaccacatgtgtatacttcgtctggtccacgtgcaagaactgctagaccaggcagatatagggaaagaggactgaccaacaggagtgcaacgcgaagaacatggcacgtttaaagactgcgtgcaatcgcagtcgcgcacgaggaacgatatgcacacgcggccatgttcgcaaaggagagcagacaccgtacacgtcatgatggcgtgcaccgtatcctgtacgcattaaaagaacacgacggtgaacattgcaggtgggtgcgtgacatccttggggaatatagctctgagatacttggaagctcggactagcaagtcatccctgagcgggagataaatatcccaattcagaccgccttgctagaggtccctatggcacgaagaggtgacgcggctcccctgactatgtgccatagacctgaacggaggaaagtcgcgggccaaagacgccttagccgaaagggaaagaaaaaccgttacgggcgtcgagaactctctcatgctgggccacagttgtccagccttgaggatggccccagcggaggcaaccatatgggtcggaaacgacttggaggaggccccaattccatgtgtccgaatattacgtaggctcgccgtgggcgcttaatccaatgtggcgatatggggactctttaactggcgaccacggcagctagttagggcgggcaccataggaggggtgtcttccttttgcggcggaaggccttcctaccaaataaccaatagagggaacagcctcgcggtgaggggcacgccgactggcgcgcacttaattagcgtaaaccagagggacacagggcgtgtacatagtgggacgccttggggccacttggcccccggaaaggcgaatgcggggaagtataacctaggttgaccattaaggataccccaaaaagcccgctcctgaaacggaagataaagatggggggacacgacgtagtttaaagaggccttaggcctgggcggaatagtgtatcgcccctctaggacactcctccaaccggtgaggaaaatggctccgttgggggcgccaagcggtaattcagaacgggtccccagtccgtggtgtgccctcggcatgtgagaaagcaacacaggccatggggctgtacagaacgcaaggaccatctggagattttccaacagacagccagttaaagagtgtggagacaaagatacacccccaaagagagttccaagggcaacagctcttccacttgtttctcccgggcactataggagatgttgtcaccggcgagtgtgaggccagaaagagaacgacccccctgtatgggagggaaaagagatcccccgggagcagacaccaaagggagcgcccttcggtcagcagaaaagcgggaaacccgttggggccaactgagcgctttcaaaatccaacagggcgagaggcagccaaacagacagcggatttggtgcgcactcagaaacttactggagcggacaccgaagaacacctaaagacagtgtggatatgaaacgaacaagctacagggaggagacgcgagaacacccgcgagaaaatggggacagcccccaagtggcccaacgacagcacagacaaccacaacgagaggaggacgagacgtcgatgtgctgaacaccagggatttgaagaggacaccgtcaacgtgattgacacacacagggagcagaacccgtgttgagcgagacaacaaccacctgggggagtcaccacatcgagagcgcagaggcaagagaagaggacaagatagacgagaaacgaaagcactcgaaacgatcagacaccaaccgaggcaaccaa

SEQ ID NO: 529345 - DNA, 1108 bp, Homo sapiens
tgctggtctgccctcggatgtatccgggatcggggctgcagtggctgagctgcgatttgcgcagatgacccccgctgggggctgcgtgctgtgccgtgagccccgatgagtcccgagctgtccctggccgcgctggcagctgccccctgtgccctgttgtgagaccccgccgtgttgacccagcccgcaacgactcgctgctgccacgcttgacccggccgtgcccccctacgtgaagcttggctcaccgtcgtctacaccgtgttctacgcgctgtcttcgtgttcatctacgtgcagctctggctgtgctgcgttaccgccacaagcggtcagctaccagagcgtctcctctttctcttgcctcttctgggcctcccgtgcgggaccgtcctcttctccttctactttcaaagacttcgtggccggcacttcgcctcagcccttcggtcttctggctgctctactgcttccccttttgtgcctgcaggtttttcaccctcaaggctggatgaactatgtacttacacgcagggttgatctctccaacggcgaagttcaaagtatttcctccagcacttacgtccaattaccggttaggcccttctaccctgggacctcccctcttcatcaggccttggtcatcgccttgttgggcgcatctctacccttgtgctgtcatgcctggcttaccagcgacgtggggcaaatcttcggccgaaaccgcaccgggtacatcggtcatccgctgttcgcgaattttggcccattaactgtcccaggcggaccattcggtcgaccagttgtgtccgccggcctcctcctctctcccgacccggtcagtacttctcgcacaacccccctccagaatgtctccctatggctgacagctcttatacctttggcggagcttccacagctgggtctcctcccgcgtgatgtttcccgagctcactttgccatctgcacttcaccgagtgtatactgtccttatcgcacgcccttcggggcctgccttacaaccgtgtccatcgcctctcttatcgttcgacaccacgagacgtccccatcccttggaactgacgcgcgccacacgctgttaccacctc

SEQ ID NO: 529346 - DNA, 403 bp, Homo sapiens
cgtggcatgtctgatgtgccatgtacgtgtctatgtttgggcagtcggtgctggtggtccttgtgcccatcgtctgcgatctggatccgtggcaggcgaattggtgtcgggccatgcctctgggtgcatggccggtatctcagccaaggttggcatatggagataggggaggtggaatgggacggagctgtctgatgtctacctgcgtgcatattctcaggcctgattgagaggcgggtctctgctcagagaggactgaatttagactggatctggaggcatgatactccagtgaagagctgttgcgttcttgccttttcagctgacagtgctggctcaggtgataggcctcctgtccccctcaagtccctagtgccgcttcattcctcctcctttgggcccc

SEQ ID NO: 529347 - DNA, 191 bp, Homo sapiens
  misc_feature (14)..(14): n is a, c, g, or t
  misc_feature (128)..(128): n is a, c, g, or t
tcacccgacggggntggctccaacccggtaattattttggattttttgtagagatgggatctcaccatgttgcccaggctggtctccaactcctgaacttaggcaatcctcctggctcagtctcccanaatgtgctgagattacatggcacgctgccaccttctcccgtgtttacttgataaagcattata

SEQ ID NO: 529348 - DNA, 293 bp, Homo sapiens
tttacgcagcttcatgattggtaaacgtgtgacgggtggtggcagaaattgaccaacctggggttagtatagttaattaaactttcgtttatatggtaaaggttaatcactggtgtttcccgtgggggtgtggtaagctaacgttttgaactggattggtgcgtgcttgatgcttgttccttttgaatcgtggtgaattagaaggtgaactcactggaacggggatgcttgcatttgttatcttactaagaactaatagaaaggctaagaacaaatctatgtctgcgtaaaag

SEQ ID NO: 529349 - DNA, 122 bp, Homo sapiens
ttttttttttttggggggaaaaaaaaccccccccccccctggggggttggggcaaacccctttttgggccgggggggggggtccccccccttgggggaaaaatcccctttttttttggggga

SEQ ID NO: 529350 - DNA, 105 bp, Homo sapiens
gatcgagaggataccagactgtggtgatccacagcgatgtaccagaggaagggcccatgacatgcaaggcaagcgcaactcaccctcgtcctggcggtattgggg

SEQ ID NO: 529351 - DNA, 102 bp, Homo sapiens
tcccaagatgaggaattgggtcagggccacattgaggaggtagattaggggcctttccaagattgctgttttgtttgggagcttcaagactttgcatttcct

SEQ ID NO: 529352 - DNA, 760 bp, Homo sapiens
gccaaggagacacttactcaattgaccagtacactccattcgtgtggtagtggcagcccacatagtgatgactgttttaattttaacatcatttggcagccaacctttctgtcattcgtttggtttttaacaccacattaccaccccagataacagggtgtttcacgaccccgattaggtcaaacattatcaaagaaattgtagatacgggttggccttgggggtcaattcttagtgcacaccacttatttatctgtcaatttatttagacgggctcgtaactcctgaatccttgcttccctcaataactttggtgtaaccagatctatgtgtaacatcaaattttagccacttaagaggagttcacttaactcctctgtatctttaaaagggatatcataataatgtccatggttgttggagaatcacatgagggataatgcttttagacacttcccactgacaatcagtaaaagttttccttttccactcattccctattttatctaacccagatgcacatctttcaaataaacagaaatgagatcttcccaaaatatgctggcttcctccaatcgccaatggctggctgtatctggagggtccatccctattaacttaggagatgagtatccaaacccaattatgggccaaatcctttgtccaaagaccttgctctagaagacaggtttatattttcctataaattctctcaaagaaaatgcagaaaatattgtccatgtggttatgcccatggtat

SEQ ID NO: 529353 - DNA, 137 bp, Homo sapiens
ccaggattcctagggtcttagggagcaccctgcgttggcaatgctgacttataaccacacaagcgaatctctgcctttcgagctctgcgagcactcttatctacatacggatgaaggtatccggagtgcgcactggc

SEQ ID NO: 529354 - DNA, 132 bp, Homo sapiens
  misc_feature (95)..(95): n is a, c, g, or t
ggctcatatccctctagaggagctgttctgtaatcgataaaccccgatcagcctcaccacctcttgctcagactatataccagcatcttcagcanaccctgatgaaggtcacaaagtaagcgcaatgagaga

SEQ ID NO: 529355 - DNA, 422 bp, Homo sapiens
  misc_feature (104)..(104): n is a, c, g, or t
  misc_feature (253)..(253): n is a, c, g, or t
ccaattcacaaaaatgaaagtagggaaatgattaacaataatcataggaatctaacaatccaagtggcttgagaatattcattcttcttgacagtatagattcnttacaatttcgtaagttccaatgtatgttttaggaatatgaggtcattactattcataatctgatacagctttatcctaaggcctctctttactacactgcatcatagcttttttgtgcagttggtctttctactgttactgaacagtnagcaacctacagattcactatcaccaaccagccagttgatggatcttaagcaaattatcaagcttgtgataacctttatatatttctgcctcattccttgtagggtttcttcagtgcccgtggtcatcgaccccttgacaagaagagaggaggctcccagcctgggcct

SEQ ID NO: 529356 - DNA, 193 bp, Homo sapiens
gctgactctagcaggaccccagatgagcaagaagttcgagatgacaaccgccccaaaggccgagagtaacactacgaggaggaagaagaggaggaagaagacgaggctgcagctgctgagaaatcacatcgaagagctgaaatgtagcggcacccaatttctagacaacgctcagccaacggattcttttcaa

SEQ ID NO: 529357 - DNA, 244 bp, Homo sapiens
cgtgtttatcatcccaggaaatattcatgatgagagcttatagattaatcactcaggaatatttaatgatctgcgacatgtttgaaaccagaatctatctgggagtatcattgcattatttcataaacagctagataaattccatattacatttctgattcggatgttcatagttctgaaagtatcttatctcttcccctttcgtattagttatatcggatttgacttttatttttattttttt

SEQ ID NO: 529358 - DNA, 113 bp, Homo sapiens
gtgactctacaggatctgattcaatatcagctctgtcataaactgaagttccataaatatatatattatctgcttttggactctctattctgttccactaatctacatgatca

SEQ ID NO: 529359 - DNA, 114 bp, Homo sapiens
cttcatttgcaggatcataaaaggggaatacaaatatttgttagcaaaagggggcatttggtgtgacagagtcgagagtcactgctctagcaagcttcccctcctagccaccag

SEQ ID NO: 529360 - DNA, 127 bp, Homo sapiens
  misc_feature (2)..(2): n is a, c, g, or t
  misc_feature (10)..(11): n is a, c, g, or t
  misc_feature (72)..(74): n is a, c, g, or t
  misc_feature (88)..(88): n is a, c, g, or t
tngtttcccnnattctgtccacttctggtgtcaaaagatttttactcatcttcttagtacattctatgtatnnnatatgtataatttnatacaattaaaaatagatttttgtctagtgaaaaaaaaa

SEQ ID NO: 529361 - DNA, 853 bp, Homo sapiens
ccgaaatactacgcgcgtcaaggaccatgacggaggcggagcagcagtagctcatcgatgaccacttcctcttcgagcaatggcccgtgtcgcccctgctgctggcctcgggcatggccggactggcccgacgcccgtggtatctggcacaatgacaaataagaacttcctgggtgtgggtcaacgatgaggaccacctgcgggtcatctccatgcgagaaggggggcaacatgaaggtgaggttgttcacccgcttctggacctggcctcaccctagtattgagaactcgtcttcaagtctaaggactatgagttcatgtggaactcctcatctgggctacatcctcagcatgcccatccaacctgggtcaccgggcgtgcgggctatggtgtgtcgatatcaagctgccaatctgggccaagcatgacaagttctctgtgagtgtgcttaaagcggttgctgacttcggaacgcgaggcactaggcgggtgtgggacacggctgcggtgtggcgagggtcttcgacgtctccaatgctggccgccctgggcttctcagaggtggagctggtgcacgatggtggttggacgcgccgtgaagctgcctcatcgagatggaacaccgggttggatgcgagggccagggcatcgacagaactcatgcttgccagaaatgaagccgggccacaaccgaaacagccgtgttgggtcctaacgttattgcctggcaggtggcagcatgcaccctgatggttctggcgctggtgagcccttaccttgtgtaaaaatccgtcaccgtggtaaaaaaatatgatggcggagaacagggctggggaaaaaccaggttggctg

SEQ ID NO: 529362 - DNA, 187 bp, Homo sapiens
  misc_feature (134)..(134): n is a, c, g, or t
  misc_feature (180)..(180): n is a, c, g, or t
tgatacaatcgagctcggtaccagcgtggtcgcggccgaggtacatgatccaagcgtgtcttatgtttcttttatccaaaatatctaggcatctgacactttgaaccaaaatttcaattgtatactgtgatttntatttgttgcaatatgttaaatttcagaggtacctgcccgggcggncgctcga

SEQ ID NO: 529363 - DNA, 114 bp, Homo sapiens
agaagagtcaactgctgatgtcgacaatttccaatttaatagtccaaaaatgaaaccataactcttaagattacaagccatattatagaaaaaattaagaatacgaccacattg

SEQ ID NO: 529364 - DNA, 1129 bp, Homo sapiens
gttatgaataaaagtgggtccgcgaagaggagattgacataaaaaaatattcacagatgtggacccagattgcctggtgaggcatccatggcaacgcactctcgtgctgatcttgcgtggaggtcatgcattaccaacggtatgtgatcccgatcgctagcgatattgcaggctgactaagtgactcgataggaacaccgtcgcattggtgctcgctaggaatatcttcgtcgtggaaatacaaggaagagggagacagcgcgagacgtggacgatgtggagattacacggcgaggaggacttctaactccgaagttcgtccatggatgcgacgtgaagtagctagcactccaggcagactcatgctgtagggaagcgaattatgccaaacttgtaacgacccgaattgtggatcagtcaacatggaaaacagggtcgatctcaagattaaaggcatcgaagccgacatacgcggttagtgacggtgtgccaagtactctagcagccattcactgctaagaagttccggtacagaaagcaacatagtatatccgcatttgcataggaagaccgtgatggaagagcgccagagaactagatcatgcgcgacacaagaacggaaacttcgaagaagcaacgactagaatagatatgggcaacacgggacgcagcgccctggttatggacacaactcaacgtgacacacagttgggaaggaatgaaactacttttcacttttcatgcacctgaacctgcacaaagagagcaccaaagggccctggccaccccaacttacatcgcttcacagcgcgagcgcgcctaaaagccacacaggcaaggaccgttccatccctcccgcagcaccaggattacggacaacgccgcccaaagcacgcgtcccagagaggagggaactaggcacagaacggccaaaagagtagggtacgtacagagcaccaccagggatacccaccacattggcgaagccacgtcacagcgaccagtcggcactgggaccaaaccaggaagagaactggggagaggagccatcacaggaaaaacattgggccataggtggagaacccaactaggcccgactcgcaccagcaggagagacacaacgacaaag

SEQ ID NO: 529365 - DNA, 105 bp, Homo sapiens
catcactcgatcgcggagaagagcaatgagggggagaccactggaaatccgggagatggagacgagggagagggagacgggatgtttgatcttttactcttcttt

SEQ ID NO: 529366 - DNA, 570 bp, Homo sapiens
ccaagcgtcgtgatcaccagggacctagggagatccccttcccaccctctctgttgtgcgctcagagtcactcctgccccctctccctgagttggtgctcagcatgcatcctcactagggttatgtgaccaggggtctggcactgcagcttggacaattttgaacgtgacactttgagcttacgtagtcatctaggaaccctggtgtttttaccagtggttccggctcgttaatcatgcttttatggctggtgctcaccccgtcgattacaaggaccgctatatatcaagcatagaacactatacaacaaggcgggcgaccgccttctctgtaatggagtctttgcccccctctcagatgggtgacccaccaaaaggccgttgaccgcgacgtgtcaccccaggccagtcttcgatgtgctccgacatagggggagccgccaattatccgatgaagcctccgatctatgtatcaacctccaaagtgcgaacatgtgcgccgcctgccgtgtcacacgaaacggctgcggggcccggtgtggcacaccaccggtgtatgcgcctttagtga

SEQ ID NO: 529367 - DNA, 210 bp, Homo sapiens
tcacacagcgtccacagactcggccctcgcaccattggctgatcccgtcctccggaagtaagaccattccgtatgcgtgtcttatgtatcagacttatgaatagagaatatcagtaacttattaatgcgcgagagtgaacaatcagcaagacactaccagctccacgttgacagaggctgaaatatataaaataaaaaggtttgcggccg

SEQ ID NO: 529368 - DNA, 409 bp, Homo sapiens
ttgggatgtagtttttggaacatcaggtatgtgaacttttgatattaaatgtaaaggtaaattttacttcatgtaagatttaaaaatattcttgaggtggtcatttggattccattactagttattttatttaatacttttatacctatgcctcagagtttgtttatggggtaaaacaaaagctagcagtaatatagatatatatatactagagtatgtattatatatattacatattttatctataagatagactatgtgttactctaaagaattatatattagatgcaccctccaattaatgtagttctgaatttcttatactgaaaggattatagtatcagaacttcaaaaggttattcatgaacagtaatcagtaataataaaaataaatttattcataaataag

SEQ ID NO: 529369 - DNA, 208 bp, Homo sapiens
ctatgatggactactcaagatcggagcctgagcgcgctgtgacgctggtgctgagactggctaccacattgctgtgctctacagagagctcctgggacgcggccattacatgcgcatgctatgcccaattgcacaacgaatgccctctcttccatgagcctgaacctttcactaagcaagaatgttatgttgtttcaccttgacgagt

SEQ ID NO: 529370 - DNA, 354 bp, Homo sapiens
gggggagggtttcactgttacataccaagaggccctgaaaagaggaaaaaaaaaaaaaagaggccaggcattggttggctcaccccttgtaattctcagcactttggaaggctgaggcgggcggatcacaaggcccaaagttcaaaagcagcctggccaacttggtgaacccccgtctctactaaagatccaaaaaattacccgggcgttgttgttgcattgccctgtaatccaaaatactcaggaggctgaggcaggaaaattcgcttaaccctggaaggcggagtttgcagtgacccgagatcatgccattgtgcacttccagccgtgggcgacagagtgagactctgtctt

SEQ ID NO: 529371 - DNA, 358 bp, Homo sapiens
agcatactctgcttttattagaatgcaactttcagcgtacatggagaacgattgtagtttactttgtcgcacgctttatccacagttagacaccatttcggaaaagtgacattatcaatagcaaatgctgttcaagctagttgagaagcctataccacacccctgaattggcttgcattttgtaactgttatgcacacagtggtgtttgtttaggtgctgatatggtttgggtctgtgtccccacccaaatctcatgttgagttggaatccccgatgtttaaggtggggcctggtgggaggtgattggatcacggggctgggtttcttatgaatgctttagcaccatctccttgatgc

SEQ ID NO: 529372 - DNA, 830 bp, Homo sapiens
ccacttcaaatggtggtagtacccacgaaatgttgggttaccgcggcaaagtttataccaaaggtttcttaaaaagggcgaccctcttccgcctcttttgttaattaagggggggaaatattatactctgttaattgcgccccccaaaattgggggaaaaggaggtgtgtaacaccgtcgtgtcggtcgccacacccgttgtgagatgattttccacccggcggagtttaatattgtgtgactcccgagcccactttgttcaaaaaacccccttgtctcactatatggttaccccgccccttgtacagaaaccccgccaaaaatatttgtctcccccgaaaaaaaaaatgtggtttccaacacaaatctgcccgaggaaagcggtcgccacctcttcctcgctccctgtaacactcttctccgccacaacacacccatttttttgaaatggaaataaaatcttctgtcgagaagtaatacctcgtgaatgtagtacaccccttttgtctcctctcccttatctcaccgtggcaccaccccaaaaagtatgagatatacaaagaatcgggtttttcacacaggttccttcccctgataacaacaacctgctgcttctaaatggtccctatactcttgtgttgtccccccaactggcttgcccccacctcataatttttcacacgccccaagccggtatttcttatcatttttggtggagaaaaaaaagatttcctgagatttttgtttttaaaataaaagcttaaaataatctggttttgccccttaaaataaaaagcccaccccgctttccggccccccaaccccaaaaa

SEQ ID NO: 529373 - DNA, 120 bp, Homo sapiens
tgacatgggttatagatgatgtcgagcggcgcagttaatggatattgcagaattcggcttagggtaaatccagcacatgggcggcagtactagtggatcggagctggggacatgcttggt

SEQ ID NO: 529374 - DNA, 534 bp, Homo sapiens
  misc_feature (52)..(52): n is a, c, g, or t
  misc_feature (107)..(107): n is a, c, g, or t
  misc_feature (119)..(119): n is a, c, g, or t
  misc_feature (196)..(196): n is a, c, g, or t
  misc_feature (205)..(205): n is a, c, g, or t
  misc_feature (222)..(222): n is a, c, g, or t
  misc_feature (278)..(278): n is a, c, g, or t
  misc_feature (340)..(340): n is a, c, g, or t
  misc_feature (390)..(390): n is a, c, g, or t
  misc_feature (408)..(408): n is a, c, g, or t
  misc_feature (430)..(430): n is a, c, g, or t
  misc_feature (456)..(456): n is a, c, g, or t
  misc_feature (460)..(460): n is a, c, g, or t
  misc_feature (470)..(470): n is a, c, g, or t
  misc_feature (530)..(530): n is a, c, g, or t
gctttccctccctccctcccccattgcaccccggaactcagcaaaggtgagntagccacagagcataacactgtggctgggacacatgtccatgtgtgtttctacanaagtgggcatcngtgccacaaggagtcatgtggcaccacagttcatcagactgtgtttaccccttcctgccctgctgtcagcgccacangttggaggnaaagacctggcgctgangagcagggtcccaggcatggacccacccacccaacagtggagcatcaggagccatnaaaagcatgagagcagtcatgaggatgtccagggcctggctcgctcttcggctagccatggncttaaagagggactcgcccgaggcctcgatgtaagtgacagtgatctctntggagctgatctccacanaggcaaagccacccagtgagtnttcagtcccatagtggaagcgcaganagcngtaggcgganctatgcgctgcgtgccgctttgaggggtccatgaaattcccagccccactcagcacgtanccca

SEQ ID NO: 529375 - DNA, 274 bp, Homo sapiens
tgtagaggtcaggacatgtgagagtccttgtctataatggggcgggacagttggagcccagtgatctgggatgtggaggaacccctgccatgctgggaagtgtcagaccttagatgaggtgtggagggacctggcggcctggtgagtgagtgaattgagacccggtgtggagggacctggctcctggtgagtgagttaattgagatgatgtatggagggaccttgtctcctggtgagtgagttaattgagatgaggcttaagggaccctagggg

SEQ ID NO: 529376 - DNA, 126 bp, Homo sapiens
aagcatacccctatccttgcttatcatgaatccaggccaattgtcttggtaagacaaggtatgtgggctgggcgtggtggctcatgcctgtaatcccagcactttgggagaccgaggtgggaggat

SEQ ID NO: 529377 - DNA, 262 bp, Homo sapiens
  misc_feature (13)..(13): n is a, c, g, or t
  misc_feature (105)..(105): n is a, c, g, or t
  misc_feature (112)..(112): n is a, c, g, or t
  misc_feature (139)..(139): n is a, c, g, or t
  misc_feature (204)..(204): n is a, c, g, or t
acaacataccgcncaagctatgttgcataaagtttggaaggaatttcataacgtggttctctgaaactgtggaaacgaatgactttcaggattttacaggatggnatctgtnctattgtgttgaaaatcactgttacangacataaatttaactggaagaattatgtgtttgcatagtcactgttctgctgttccacatttttnaggagttatacatcacctttagttctgcaaaatggacagtggtatgagccaaaactca

SEQ ID NO: 529378 - DNA, 227 bp, Homo sapiens
  misc_feature (227)..(227): n is a, c, g, or t
acggcccctcgctggcaacctaccaagtccggactgaggccaagaaccagctcttgggggacattggtaacaaagtcagtgaacactgcaggccaaaatgctatgaggagggagcaaaccttcagctactggaaagtcattgataaaaactaccaaacctcttgaaaggtacctatgctggtgcagttcagtgtcttagcagttcagaccagaccttagcagacctn

SEQ ID NO: 529379 - DNA, 231 bp, Homo sapiens
tctgcgagatttgagcgggatcttgaagtagctcttttgggtggaggggacacagaacgggcctgtgagggtggagcaggtagcggcgaattggagcgggactgtctccttgatctggattttgactttatatcaccctttccatgttctttgggggatcgggatcgagatctgcttcgagatttctcatactcagccttagatcggcttggagaaggtgaaggggaaatg

SEQ ID NO: 529380 - DNA, 875 bp, Homo sapiens
  misc_feature (373)..(373): n is a, c, g, or t
cggtttatagatgaagaaacaattagtgcagttgagtgaattgtccccctcaaataatctggatctgtgtgaccagtggctctctcctcaatagcaggctgtcctgaggaactcgggctgaacttagtttgggggagtccctcttgtgtgccaggcactatgccgggtgctgtttctttgctttgtagctttgtccctgtaagatcagcttcaatgccagagaactctacctcttgggcaagactgactgtaatccatgttactttcgcagcgttcagtggctcgctgctgtccacaggatgaagttcaggctctttggcctgcgcatagcctctctggtcacctttgccacccattcctcaccgggtgcttngcgctgtgtcctgctgaactagttgtagtccttatccccttcatattcaggctgtgcacctgacaaggcgtgctcttctcccctttctcttgcctgctaagttctactcattctcttcatggcttacctcagatgtcccctcctccaggaagcttccctgatagccactgcccccactccaattagatcgtgtctcacggtgcatctcttgtcatagcatcatcccatgctgtatctacacgttcatcgctcctcttaggctgtaaccttcttgagggccagaaggtatcttcactctttcccagcaccttggtcagaacgtcggtaccccgaacccaactgcaccccacaccaccactgacgcagacggtccacactgatcacaacgacgcccatacaaacacaaggaccactaaacatccaccgacacccctccgtaacccaacagcatgcgatacgccagggccacaacggcccatcataacccagcaacggacaggga

SEQ ID NO: 529381 - DNA, 364 bp, Homo sapiens
cgagacggacagactggactaaactccaagtggagaaaacagaaggatcaactttatagaccttatcgcatgagcccatatataatccttcagctgctgtgtcccaataatccacatcagaaagtgactgtctgcagacaccatgggttatgcataatcacctcctgcagcatcttagtgtctgagaactaaactgagcaccagactgtctcagtaacactttaagcacctgcacataatgtagctcctcaatcccagcactttgggaggccgaggcgggtggatcatgaggtcaggagatcaagaccatcctgcctaacatggtgaacacccgtctttactaacaatacaaaaaaaaaattga

SEQ ID NO: 529382 - DNA, 702 bp, Homo sapiens
gccgggcgcggtggctcacgcctgtaatcccagctctcagggaggctaagaggcgggaggatagcttgagcccaggagttcgagacctgcctgggcaatatagcgagaccccgttctccagaaaaaggaaaaaaaaaaaaaaaaaacaaaaggcacaaaaaaaaaaagcgcggtaacttcccctctcaaaggcaaaaaacccttccccaagcccaatcccggggggcgcaacacaaaacaaaaaccctgggcgaaaacaaaaaaaaaaaaaaacaaaaaaaaaaaaacacactgtgtgggcggggcgcccgcgggcccctcggagaaaagatcttttcaacaacacatcggggtgggcgcgcgcgggggccccagatgagcggaagaggagaacacgcgggggacaacaagagggtgcactacaagcggagagacaccggggagacaagagcaaaaggcgcgcgcgggaaggctctcctcccacccaacatcaaaaagagaaggcggccgcgggggggcgacaaccgcgagcgccgcttttcgtcgcgacacacacaacccccaagaagagaagagagcacacccggggagggccaccacaagcgcagggggaacaccatatcaaaagcggggggagcacccccagacgagaagcgcgatcggactatacaaaaattataagccccccgccgcggtgcgtat

SEQ ID NO: 529383 - DNA, 362 bp, Homo sapiens
tcccgtttggagtgcttgtgtctggagagttgacattgtccaaagcaggcgaacagctgtgtatgggtatggatgaaccctacgtcctagctgttgcttggtgtgaaaatgccttgaatttacctctctgggttggaagtgggaagacttcttttaaaagtcctttctaagtttaaaaatccaaaggttacgaaggtagtttttatttatctcaataagtggcctatttgcttaaagcaagtgtacctctgtatatcagcccaaagcttagggcagtgcttcttggctttagtatctgagaaaggtgcctttgggaagagtttggtcagacagaaggtagtctgaatcttaaaggtttcaga

SEQ ID NO: 529384 - DNA, 317 bp, Homo sapiens
gaacttttaaaagcccccccaaaaactggtccggggggccctaagggtttcaggttggaaaaggaattaatttccacgttggttcccaaaaaggaaaaagggtggaagtaaaaagtttccttattacccgcccccccctaaaaaaagcctcccctattttttccaacccctttacccccatggggagttttgataaaaaaaaaaacttaaaactttgggaaagggtcctttgtccccccggggaaagggaactggtctttttcccgttagggaacgggtttggtttttttttgtaataaaaagggggttttttggga

SEQ ID NO: 529385 - DNA, 116 bp, Homo sapiens
  misc_feature (13)..(13): n is a, c, g, or t
  misc_feature (19)..(19): n is a, c, g, or t
atcttctgcaganaaaaanaggaacagccaggagtacaattatctctcctctcttttaaatacacccagtattcaaaacatcacttgatataccaagaaataagagtaaatgatca

SEQ ID NO: 529386 - DNA, 685 bp, Homo sapiens
  misc_feature (267)..(267): n is a, c, g, or t
  misc_feature (281)..(281): n is a, c, g, or t
  misc_feature (295)..(295): n is a, c, g, or t
  misc_feature (306)..(306): n is a, c, g, or t
  misc_feature (381)..(381): n is a, c, g, or t
  misc_feature (383)..(383): n is a, c, g, or t
  misc_feature (389)..(389): n is a, c, g, or t
  misc_feature (400)..(400): n is a, c, g, or t
  misc_feature (418)..(418): n is a, c, g, or t
  misc_feature (442)..(442): n is a, c, g, or t
  misc_feature (471)..(471): n is a, c, g, or t
  misc_feature (476)..(476): n is a, c, g, or t
  misc_feature (502)..(502): n is a, c, g, or t
  misc_feature (550)..(550): n is a, c, g, or t
  misc_feature (609)..(609): n is a, c, g, or t
  misc_feature (611)..(611): n is a, c, g, or t
  misc_feature (617)..(617): n is a, c, g, or t
  misc_feature (620)..(620): n is a, c, g, or t
  misc_feature (656)..(656): n is a, c, g, or t
ggtcgcccggatccctgagctgcccgccatcccacgtgaccgcgccgccccccagctccaccgctgagcccgctcgccatggccctcttcggggccctcttcctagcgctgctggcaggcgcacatgcagagttcccaggctgcaagatccgcgtcacctccaaggcgctggagctggtgaagcaggaggggctgcgctttctggagcaagagctggagactatcaccattccggacctgcggggcaaagaaggccacttctactancaacatctctgagngtgaagggtcacangagctgcaacntgaacatcttccgagctcgatttccagccacagcaggagctgatgcttcaaatcaccaatgcctccttggggctncncttccngagacagctgntctactggttcttctatnatgggggctacatcaacgcctcanctgagggtgtgtccatccgcactggtctngagcnctcccgggatccgctggacggatganagtgtccaatgtctcctgccaggcctctgtctccagaatgcacgcggncttcgggggaaccttcaagaaggtgtatgattttctctccacgttcatcacctcagggngncgcgtnctnctcaaccagcagatctgccctgtcctctaccacgcnggtaggttcctggctcaactccctcctgg

SEQ ID NO: 529387 - DNA, 950 bp, Homo sapiens
cattgatatacctgtggttcgcgacgagcacccccgtggttctgtgcgcgtgccccttgatgtccaataggagactgctggaaattgactagatgatttgtgtttgttcaccattataaaaaacgagcggatgtagtcggctccgtacatggcatcgatagcatcactagatggtagctccttgaatggtcagttacctggtgtctattcgaaagcatggagtccaggcgaagtcgatatccaaattagggccccgtctcgtgaaggggtatgcctccccaaattgccaatccttgcgttttgaaaccttggttggccgggggaccttgattggatacctcaatgaaagatcctcacagaaggagggtaaaagggtttcaccaaccaggccgaggcgggaaaactcgctgcggtgacattaaggacgacagcttggtgctaggtcgccccgtgaatttcggagccaatgagatggccaacgggtttgcttacacagctcctccccttggaaaaaaagctaagagctgccttgagggccatggttcactcaaccattgcaaatggagcgggttcacgctgcccttgagggcacctcttccagcttcctctccgggggatggaagtacttgtggcatccacgaaaataccttaattccaatatgatgtgtgacgtgacattccgcaaaaactgtacgcaacaacaagtgtgtttgggggcacacattttacctggatttgcagaaggatgcagaaggggatcattgcctggacccagcacattgagatcagaacattggcctccgaaagaagaaccggggggatcggggcacactgctcgtgcacttcacagaatttgtcacaaggagtaggagcgccctatgacgaatgttagggaataatggtatttttaatatttccagaaaatggggtcgtattgggctatgcagaca

SEQ ID NO: 529388 - DNA, 615 bp, Homo sapiens
  misc_feature (261)..(261): n is a, c, g, or t
  misc_feature (264)..(264): n is a, c, g, or t
  misc_feature (266)..(266): n is a, c, g, or t
  misc_feature (277)..(277): n is a, c, g, or t
  misc_feature (296)..(296): n is a, c, g, or t
  misc_feature (298)..(298): n is a, c, g, or t
  misc_feature (305)..(305): n is a, c, g, or t
  misc_feature (309)..(309): n is a, c, g, or t
  misc_feature (330)..(330): n is a, c, g, or t
  misc_feature (336)..(336): n is a, c, g, or t
  misc_feature (339)..(340): n is a, c, g, or t
  misc_feature (343)..(343): n is a, c, g, or t
  misc_feature (348)..(348): n is a, c, g, or t
  misc_feature (352)..(352): n is a, c, g, or t
  misc_feature (357)..(358): n is a, c, g, or t
  misc_feature (364)..(364): n is a, c, g, or t
  misc_feature (366)..(366): n is a, c, g, or t
  misc_feature (368)..(368): n is a, c, g, or t
  misc_feature (374)..(374): n is a, c, g, or t
  misc_feature (379)..(379): n is a, c, g, or t
  misc_feature (382)..(382): n is a, c, g, or t
  misc_feature (384)..(384): n is a, c, g, or t
  misc_feature (387)..(387): n is a, c, g, or t
  misc_feature (389)..(391): n is a, c, g, or t
  misc_feature (393)..(394): n is a, c, g, or t
  misc_feature (399)..(399): n is a, c, g, or t
  misc_feature (402)..(402): n is a, c, g, or t
  misc_feature (407)..(407): n is a, c, g, or t
  misc_feature (438)..(438): n is a, c, g, or t
  misc_feature (444)..(444): n is a, c, g, or t
  misc_feature (477)..(477): n is a, c, g, or t
  misc_feature (484)..(484): n is a, c, g, or t
  misc_feature (508)..(508): n is a, c, g, or t
  misc_feature (515)..(515): n is a, c, g, or t
  misc_feature (613)..(613): n is a, c, g, or t
ggtcgcccggatccctgagctgcccgccatcccacgtgaccgcgccgccccccagctccaccgctgagcccgctcgccatggccctcttcggggccctcttcctagcgctgctggcaggcgcacatgcagagttcccaggctgcaagatccgcgtcacctccaaggcgctggagctggtgaagcaggaggggctgcgctttctggagcaagagctggagactatcaccattccggacctgcggggcaaagaaggccacttngtngnaaaaagtatgncgagaagcgtgtatgattntntctccangttnataaactcaggcatgcgcttnctcctnaannagnagatntgcnctgtnntctaanangnaggganggtcntgntnaantnnntnntgganacngtgcntgtgcgcagttctgtggacgagcttgttggnattgantattccctcatgaaggatcctgtggcttacacnagcaacntggacatggacttccgggggcgcnttcttcnccctgactgagaggaactggagcctccccaaccgggcagtggagccccagctgcaggaggaagagcggatggtgtatgtggccttctctgagttcttntt

SEQ ID NO: 529389 - DNA, 857 bp, Homo sapiens
ctagttctagatcgcgagtggcgcctttttttttgtgtttagatattgggaaatacaactttattctggattctaaacgaaaaggaaggggaatgacagtaacaaacaagatttcaccactgaatatggtgatgtgactgcagcagtcttatatatgaaactcaaggaatcaaggggtcccaaaacagtaaatatgcgggttgccaaacaaggaagttattgtttaaactaccacctacctccctcaccaaagcccataaaaataaaaaattataacaaacccggagaaccaaaaggaacgaaaatctggttcgcttcattcatggcccccacaatcctaggcctacccgccgcagtacggatcattctatttccccctctatggatccccacctccaaatatctcatcaacaaccggagctaatcaccacccaacaatggagctaatcaaactaacctcaaaacaaatggagtaaccatacacaacactaaagggacggaacctgatctcttatactagtatccttaatcatttttatggcacaataacctcctcggatccggctcatcatttacaccaaccacccaatatctataaactagcatggcatccccttatgagcggggcagggattatagggttcgtctaagattaaaaatgcctagcccattttaccaagggagactaaccgtatcccatatagtattatcgaaacatagtattattaacatagccggggagcttaacgtaatatggggccatatgccctattggggcccttgaataagataatcctattaaattcaattattatggatccaaagggggtaaagccaggtatataggcgtcgcggat

SEQ ID NO: 529390 - DNA, 137 bp, Homo sapiens
tatgaggcacagcgtttctgtcatgactgatcaggagctcttagagatggacacagatccatccattacacatgagaacatggatgcttatctatgagaggtaagatcgggagaggcacgaggcaccgaggaaatgc

SEQ ID NO: 529391 - DNA, 139 bp, Homo sapiens
agttgctaccgtccaaaacatggcgggttaacgagtttggcgatgtcagtttgtacttgttttaaccatttccttatgattcatgcctgtgttgagttgacagtgagggtaataatgacctgtttgtggaggtagcact

SEQ ID NO: 529392 - DNA, 184 bp, Homo sapiens
aagggagtataaggttccaaagggaagaaggtaataagctgatgctggcaacgatgggaataaccctgcataatatggagattccaaaacatgaccaggcacagaaagctgaaggtgctggagataccaagtgaagtgtgttcatttttgatgactgtgttacgtctgggtcctgctgtttacg

SEQ ID NO: 529393 - DNA, 1589 bp, Homo sapiens
cctgatccccaaacaaacctcacacccccaaacaccactctcaacacaaacacacagacaaacaaagcaacagcaacatgacaaagcagagaagagcagaacaagaagacagaacacagaaaacacaccaacgagaacgaagcaccatcacaccaacgactcagacacacaagcacaagagagagagcagacaaccagcagaacaagcaagagaacgagaagcagacgccaaaacacaccaacacaggacaacaagaagcagcaaacagagaaaccaccaaagcctaacacacaacacagcaaacgaagacacaaaaacaaggagaacaacgccaaacacagaagccacaaaaacacatacccacaccatcacgagaagcacacaccaacaaacaacaaaacacgaaaagcaacagaaggcaaagagagcaaagacacacacacgaacagagagaaacacagcacacaagaaaaatagtaacagacagaccacgcaaaagaacaacacacaaagagagcaaaaaaaaacaacaaaagacgagcataagaaccaagaaacaaaacagaacacaaaaaatagacaacacaaaaaacaagagatagcaacagcaaggaaatagacagcagtagaaacatacaggtcagacgagtccacatccactcaaaacatagtaaatgtaaataagtatagcaacctatacaaagaagagccaaaacatacaacaagacacacagcctagtcacccgaatacacacacgcgcaagacaagagccaccatatctctcagaccaagcacacactaaagcaacgcaaacaacaacagaagacacaagaagcagagaaagcgaaacaacactacacacaaccaaaaaagacaaaagagaccagacaacacaccgataaacacaaaacaaagagaaacagaaagacaaacccagaaacaatcagacacaaacatcccaatagacaaagcaagaaaagaaaaagtaaacatcaaaagaaaatagtacaaaaacagccgaccaaacgaataacgcacaggagaagagaaacaaacaagaagaagagcagaacacaacaacaaagacacacaaacaaaagcaccaacgacgacagacaaacgaccaacacaacaaccagaacagcacaacaagaacacacaagaacagagcacagaagagacgaaaagcaagagagcacagacacacagccagagcaaaccgacaaaagacacaaacaagaataagagaacacacaaaagacaccaacgcagacaagacagacaatctaccttacaatacaaagagaaacagagtgcacagagacagagcaactcaagcacagatagcaagaaggcgagaaccacctagcagccgcacacgaccaagaagcgaagaacacaacagaacacaagagcgagacgaagccaacagaaaagagcgcgagcacatgacgcaaccgccacccacacaaccaccgctacagagaacagcaacatccacgaacagcgcgaactaaagaaaaagaaccagatacactcagacaaccacacaagcaccgaacaacaacaccacacatgaagaaacag

SEQ ID NO: 529394 - DNA, 397 bp, Homo sapiens
  misc_feature (140)..(140): n is a, c, g, or t
  misc_feature (173)..(173): n is a, c, g, or t
  misc_feature (189)..(189): n is a, c, g, or t
  misc_feature (278)..(278): n is a, c, g, or t
  misc_feature (322)..(322): n is a, c, g, or t
  misc_feature (326)..(326): n is a, c, g, or t
  misc_feature (335)..(335): n is a, c, g, or t
agacacggtcaggccccagatggagccagccagtggcctctgtcaatatgaactaatggctgacttggactgggagccatttgtcaacaatagtggggccagatctgtccatggcaccaacctgtgaggtaggttgagcnccacaacaagcacctcaacctgtgtgaagactnagatggctgagacacnctgcatcaggcaggggatttcttttgtctttgactcaattttagatggaatccaagtgatgcagttactatgattatctgtactctttnttaaaaatggttactaaatacttgtagggtaccaataaaggaanaatntggcagttntgggatgaaagttaatagagtttttcttgttttatagtagttgaaatataatcaatgtattg

SEQ ID NO: 529395 - DNA, 1027 bp, Homo sapiens
  misc_feature (1027)..(1027): n is a, c, g, or t
ggaaaatcctcacgtgaggtgaagcgcaggcgagtagggccagacatggtggctcatgcctgtaatctcagcactttgggagactgagatgagaagatcacttgaggccaggagttcgagaccagactggccacatagtgagaccctgtctctacaaaatgctggccaaggagacaggagctgcgcccgtggtctcataagcctggctgtccctggaagagcacccagttgttccttctaggctgccaagccccactgatgatggctgagagggaacgaggacgacgacactgaggaagcctggatgcgggcatacaggggcacagaaccttgccttcccagtgctgcggaatttggctgtcaccctgtgtgtagacctctatcaccgagatctggcaaacgtgggaggcaagaccaaagccagcaaggacaggagggctgctgcgtgggccagattcacagagctgcccatccaagctgaactcccagagaccttcgtaggccttctgcatcatgggcatggacaaggcatcacctaagcggacacctaagcgtgtccgggttgctcgtagcccggggaacacagcgcaagattgagctgacgggcccgggcacagcacctcatccaacgaagggatcagtacatgacttagaaaatcagaaggcataaacaggccattcacccatgccacgcaggaaggaaacttgcaagtgtgagtgaaagtgctaccagaagtggggctgaggtccgctatgtgacgcacggcagataggagagaagataccggggaagaacaacgacgataaccaggaagccacaagacgaggggccaatgcggacgcgggacagacaggcccagggcaatcagcgaaccagcacgcatccgtgccgacccgagcgaacacaaagcaaacacgtaggacacacgagcacacgagcgacaagccagcactaacacacgcacacagaggaccgcagacaacggaacacgcaacacgagagaaccacaacgtcgctgatcagtcn

SEQ ID NO: 529396 - DNA, 208 bp, Homo sapiens
gatcgctttaatacacagcgtcatctattctttgtgttttgtaaatgatgatgctctataattggtacaaagatattcataatatattttgatgtgatctgtatccattagcattaaaatgggcctacttatgtctccttttttttttggaaacggagtttgtcgttctgttgcccaggctggaagtgcaggggcgcagctctcagcc

SEQ ID NO: 529397 - DNA, 306 bp, Homo sapiens
cagaaatctacaaatgctgcccaactcagactccttcctcaagcagcactgtggaaagcaaatttaatgatagcagtattttattaaaaggatgtattcaaaaaatatttacgtaatgttaaaatagcagaattaaaactaattctaaaaaataagagtaaatagttctttttatcagctaaaaatgtagggcctactatcaatagggttacagatctacctgcctgatttaaaatcatgcaattcttaaacaattatttgagctatttgaattatttcagattacacacataaagtgtgacttca

SEQ ID NO: 529398 - DNA, 246 bp, Homo sapiens
gataggagaattgccgatataagcgctgtgcttacctgttgatagcagcagtaacaggtctcggtccagctcgatttccagctcaggctccagcaccagcactggctcatgctaccaacacagcacagactgggagccccctcccctgcatgctgtcacttggagcgcccagaccatgagctgtgtcccagacctgtgtgtcggtcgtccctgtcgcgtctgccaacagggtacctgagctctgaa

SEQ ID NO: 529399 - DNA, 239 bp, Homo sapiens
tagatgaatattaggaagtaactgtgaagaggatatgtactaagtaagttaggaacctctgattaggcattgattgggcccaatgaagtgagggacagccctgggtattggataggtgggaggatttagactgaagaacttaaatacaagtgttgaagctggatgtgcttgatagtgttctatgagctgcaagagaggcggagtggctgcattgaagtaagtgagggtggaggtagtag

SEQ ID NO: 529400 - DNA, 415 bp, Homo sapiens
  misc_feature (32)..(32): n is a, c, g, or t
  misc_feature (176)..(176): n is a, c, g, or t
gcacttataatatgccaggtgcattacatacntcctgtggccttttgaagaaaatattattttatatgaagctcagtgtcttaatctgttttctgctgtttagaatacctgagactgggtaatttataaagaaaagaaattttagtggctcacgcctgtaatcccaccagtctggnaggctgaggtgggcagatcacggggtcagtagaccgagaccatcctggctagcacggtgaaaccccgtctctactaaagatgcaaaaaattggccgggcgtcgtggcgggtgcctgtggtcccagctgctcgggaggctggggcaggagaatcgcttgaacttgggaggtggaggttgcagtgagccgagatcgcgccactgcactccagtctgggcgacagagcgagactccgtctca

SEQ ID NO: 529401 - DNA, 217 bp, Homo sapiens
  misc_feature (93)..(93): n is a, c, g, or t
tctactccaacaagtgaccgtaggctgaaaaacaatttaagttagaggctagccacacaagaattgaacagtctattattatcaagagaatgnaaaagggaagtaagccccaagggaaatatataaaacagtccagtacatctgaaccaacagcaattgatatctggccattaaaatacagaggtcatttttgtagtcggtcaacttgtctggagta

SEQ ID NO: 529402 - DNA, 513 bp, Homo sapiens
gtacaggaatttggtgtttattaatgctctgaatgatacagctggctcaagggagaatttgtcacgactgtcatgcagcgtggctgctgttgtcatcaacgctccaagaactatccagtgccatgtctgctgcataagccatctgtgaccacgtcaagcacatttggtttggaaccccagagggagagtttgtgtccatgggctgttatctctgatggcgactcctatcgtgatcctgatgatctgctctactcattccctgttgtaatcttgaaaacagaacaaggaagttttgttgaaaggtctccctattaatgatttctcacgtggagaagatggatcttactggcaaggaactgacagaagaaaaagaaagtgcttttgaatttctttcctctgcctgactagacgatgattttactaaatgcttcaaagctgaagaatcttaatgtcgtctttgactcaagtacccaataattaataatgcttatactttaattacttgtgaaaaac

SEQ ID NO: 529403 - DNA, 275 bp, Homo sapiens
cgcgggcatttggaagagggactctggaaaacttctgtaactggttttagaaaataatccattgggttccagaggcagagatggctttttcccctaggattctgacctaagccaactaaaccccactccatttccccagtaaaatggatcgtgagcctaacccatccccaactaatttcttatgagagactccccctttttttttttttttgcatttttaatagagatggggtttcacaggttggccaggctgtctccagctcctgacctcaggc

SEQ ID NO: 529404 - DNA, 197 bp, Homo sapiens
ctactttggggggctcttcgcgtggctcttagtgtggcgcattgtgggcctcgttgtgtggctctttggggggctcttggtgggccaggtccagctgccctggaggctgaagcaggaggatcacttgagtctaggagttcaagaccagcatgggtaatatagcaagaccctgtctctacaaaaaaatacaaaaaatt

SEQ ID NO: 529405 - DNA, 562 bp, Homo sapiens
  misc_feature (9)..(9): n is a, c, g, or t
  misc_feature (94)..(94): n is a, c, g, or t
  misc_feature (114)..(114): n is a, c, g, or t
acgtcgtancatgttacacaaggtcttctgctgctatgcagtgagattcgtggacacgtagaagatagcacatgtctgagagctttgcgcagantcaaggttcagttgcagaanggaagtaaagaagtgtgtgaccagactgaaggagcacagatggcacctcggcgacaactacgttccaaagggaagatgagaagaatagagaagtatatagtgactccacgcaggggtgtagaagcaacgcaggcatcaaggtctactgagctaaagactaacagacgagagagaaaagtgacagtgtgagctaggagcgaacaggaggtgtcagagtgctgaagccgactctgaaggtgatcatgaagttccagaagccagaatgaggaatgaaggtgagactgcgaagacgaggcaaaaccgcggcactagagaaaagtagagttaaccttgcccaattgcgcaatgaagatctaagtgatgaaagaccgtggaggtggagtcctttaggattatggccggttatttgctttaataaagaagaagtgacccttgtcaaaaaaaaaga

SEQ ID NO: 529406 - DNA, 267 bp, Homo sapiens
ctgtttaaaagctctttagttatgtcccacttttctatttctgtttccattgcaattgcttttggagattttatcatgaaatgtttgcctaggcctaggtccagaatggtatttccaaggtattttgctagagtttttatagtgataggtcttacgtttaagtctttaatccattttgagttgatctttgaatacggtataaaaaaggggtccagtttcaattctctgcatatggctagccagttatcccagaaccatttgtcgacg

SEQ ID NO: 529407 - DNA, 1446 bp, Homo sapiens
  misc_feature (253)..(253): n is a, c, g, or t
  misc_feature (333)..(333): n is a, c, g, or t
gctggagcggcgccttgtgtgctgtgggagccgcggctacccgtctgctggatgggcagcctgcactctgatcgtggacgggatggttgggcgactcaccgttcgtggggctcatttcgagcagtggctgagcgagtagcacgagaagattgacctggagaggccgtacactggtctgagggtagacaaggcagtcgatcagatgggtgacctatgagtagtagcgcatttggcgacgtggttgacgagccgngacgcacatttgttgtcactcctagattggggtttgcagtggtaacaatcgtttgatcggcggtttgtcactaatagccnaccaagcacggacggtcacgtggacaatccagcaatcggtcgctaggaaccatcgtgttgcttgtcgctactaccctgagcatacacgttgccattgcattgatcttgcttggatctattctagtcatgatcactggctagggttgacgctcccttgtcggtgctttttctttcatagtagtttgtgcacttcttaccgtgtggtcctcactccagtctcttgctagccttgggtggtcctttccaagtgcacccccgagggttggctccagtgggggtcgtggcatcatatgccgtctagcatagtcaaaacccttccgttgcttgggcctcgagcctgtcttggtgcgcttgggggttttgcggtagcatgtctcgatgctctgggctagggtctcctcgtgaaggactgatactgttgcgtggctcttcggaccgctgagggttaacttgttttcttcatctcgtcataactagtctcgggcttccgggggtggcccgtcctcgcgaagctcgggaactctgggtgcgtggtcgtgtcagggtggggtgggttggcgggtatgtaccttgctggcttgtgaggaaacgccaagggggctacacctgttaccggacccttttggagctttgggccggcagggattctcgtgtgccacggtgggacacggtcgaacttgtgggctttcttgccagaaaggggctctttaccttggatttgaagctgttcagctgtggtgcccttggtgtggtgtgtggccaccttaggcctgtgtctctggtgggaaggcgcgccttgcaaggtgtggccagcgcaagcggggacaacaaattgtcggccgccctcggaagaggaaccctccaccagagaaggagtgttccccgacggcccttatattcacacacaaggagtaataaccactccacaccccaaaatcgagcgcgtgggatacaggcgccaccacacaacataatatggtgttcgtcaaacgcacacactgggttgtgaagacgaggagtaccaccacactactgggggtgggggacccacacaacaccactcctgggattgcagacagagagacagtgttcctactgcaagagtagtaagaa

SEQ ID NO: 529408 - DNA, 310 bp, Homo sapiens
gacagagtttcactcttgtcctcttgtcgcccaggctggagtgcaatggcacaaccaaggctcactgcaacctctgcctcccaggttcaagcgattctcctgcttcagcctcccgaggagctgggattacaggcatgcgccaactcgcctatccaatttttgtatttttagtagaagtgaggatccaccacgttggccaggatggtctcgaactcccgacctcaggtgattcgcccgcctcggcctcccaaagtgctgggattacaggtgtgagtcactgcgcccagtcgacagtccatcttaaatcgta

SEQ ID NO: 529409 - DNA, 166 bp, Homo sapiens
atccccgcatgggggcgctgatccagaagaagctacaggaagaagtggagaaatatcaacagctacagaaggacttaagataatccatgtcggggaggcagaaatttgaagcacaactaacagaaaataatatcgtgaaagagaaactggccctgctgaatgggtc

SEQ ID NO: 529410 - DNA, 451 bp, Homo sapiens
  misc_feature (65)..(65): n is a, c, g, or t
  misc_feature (365)..(365): n is a, c, g, or t
  misc_feature (367)..(367): n is a, c, g, or t
tggccggatccgggcgaataataataatccccccccccccccgagcctggacacataaatcaccncggccggagaaccccgcaatctctgcgcccacaaaatacaccgacgatgcccgatctactttaagggctgaaacccacgggcctgagagactataagagcgttccctaccgccatggaacaacggggacagaacgccccggccgcttcgggggcccggaaaaggcacggcccaggacccagggaggcgcggggagccaggcctgggctccgggtccccaagacccttgtgctcgttgtcgccgcggtcctgctgttggtctcagctgagtctgctctgatcacccaacaagacctagctncncagcagagacgccgcacaacaaagaggtcagcccctcagaggatggtcacctgacacatatacagagacgtagagtgcgtgttg

SEQ ID NO: 529411 - DNA, 445 bp, Homo sapiens
  misc_feature (16)..(16): n is a, c, g, or t
  misc_feature (23)..(23): n is a, c, g, or t
  misc_feature (44)..(44): n is a, c, g, or t
  misc_feature (70)..(70): n is a, c, g, or t
  misc_feature (122)..(122): n is a, c, g, or t
  misc_feature (131)..(131): n is a, c, g, or t
  misc_feature (153)..(153): n is a, c, g, or t
  misc_feature (231)..(231): n is a, c, g, or t
  misc_feature (277)..(277): n is a, c, g, or t
  misc_feature (295)..(295): n is a, c, g, or t
  misc_feature (332)..(332): n is a, c, g, or t
  misc_feature (349)..(349): n is a, c, g, or t
  misc_feature (440)..(441): n is a, c, g, or t
ggggaaggtccctggnaccctanaaagcattatgcagatggagncccccccttataataggtgtgtaagnatataagacaaccccacatcctcatgagcctagcccataagttttagcaacntgccttgancccacggtagatttacaatttnctgtagtattgagttgtgttcatttagaattttgtaatatttatattgaaaatcaaatttttgtccctacaaaaactncaaaaaatccccctagttttatagttcctattaaaattatagctgnacataggatgccagaagnctgtttaagaagctgaaaatagagaaatgaatttacntctcatagttagcaggncacagtagaaggatgcttaacattgaagctgatgggaacagcaggttgatatagcttgtgataacacttctaaagaaaaagcaatgagccnnagaa

SEQ ID NO: 529412 - DNA, 396 bp, Homo sapiens
  misc_feature (65)..(65): n is a, c, g, or t
tggccggatccgggcgaataataataatccccccccccccccgagcctggacacataaatcaccncggccggagaaccccgcaatctctgcgcccacaaaatacaccgacgatgcccgatctactttaagggctgaaacccacgggcctgagagactataagagcgttccctaccgccatggaacaacggggacagaacgccccggccgcttcgggggcccggaaaaggcacggcccaggacccagggaggcgcggggagccaggcctgggctccgggtccccaagacccttgtgctcgttgtcgccgcggtcctgctgttggacaccatatctcagaagacggtagagattgcatctcctgcaaatatggacaggactatagcactcactggaat

SEQ ID NO: 529413 - DNA, 996 bp, Homo sapiens
accagaagaagttctgttatagacgtaggttacgaaagattcctgggacctgaaatattctttcacccggagttggccaacccagacttgatggaggtccatctcagatgttgttgatgaacgtaatacagaactgccccatcgatgtgcggcgcccgctgtataagaatgtcgtactctcgagcgtaggctccaccatgttcaggggattgtcgtgacgtccgaacctgcaagagggattatgaatgagagtggttgagatggctagaggttctgaggcatcagcagagagagctcactcggctgggaggatcactgcctgaagcctgtggagtgtccatggtggtcgacgcatcacatgcatgcgctcacgccgtgtggttcggaggctccgatgctggcctcgactcccgagttctttcaggtctgccacacctaagaaggactatgaagagtacgggcccgaagcatctgccggcacaaccccgtctttggagtcatgtcctagtgtctgccttgaacgcgtcgtaacgatggtgtcagcgtcggggaacaagtgtccttcagcaacccagagaaggcgccgtctgtaaatagcgacgtcggtgttgctgcccagtagcgtgcttgcattggcggtgcatgaggcgcgggcgggcccttcagtacaagccatatatgccgtgtgccgagcgctgtgctgccagctctgccctttttcccggcctcctgcaatctcgctctccctcctcctcccttctcgtagtctgctgctgacaatttcaattctgtaggtggccactgtggacttcgagctcgttgtggttaccatcctttgaaatggggtcgcctcgtgtgtccgggagacttgggggtcgcgcctttccccagcgttggtataaggtgcctgggctcaacgggtttttccgcgtgtcccgtgggccggctatcaggaaatcttgggggtcccgagggggtcttttgccaacttgcgtt

SEQ ID NO: 529414 - DNA, 433 bp, Homo sapiens
  misc_feature (38)..(38): n is a, c, g, or t
  misc_feature (64)..(64): n is a, c, g, or t
aaggaaaaagacgtaaaaaagtcataaggtactgagcnattgtgctggtaaaatgcatgggacntgattctgaatttcagtttagggtaccagaatatatctgttcctgttatggtagtaatgagggatccctttcttaaactgcaaaaaatagaacaggttgggcgtggtggctcacacctgtatcccgcatttgggaagcgaaggcagcggatcacctggggtcaggagtttgagaccagcctggccaacatggtgaaaccccgtctctactaaaatacaaaaatagccaggcatgttggtgcacacctgtattcccagctacttaggaggctgaagcaggagaatcgcttgaacccgggaggtagaagttgcagtgagccgaattgagccactgcactctagcctgggtgacagagcgagactctgtccc

SEQ ID NO: 529415 - DNA, 421 bp, Homo sapiens
  misc_feature (39)..(39): n is a, c, g, or t
  misc_feature (384)..(384): n is a, c, g, or t
atgtgttgtgaaggcttatgaggaaagtggctttagtcnaggtgtcaacaccttctcagggttacaaggaataacctagtccagctgccattgcagatgtgggggcgcaggttgtgacaggtggcccctcaggtggggagggctgtcttagtgctagctggtctccacttgtctgttctgcttcccacttgagagtactgtgttcattcctcctttatggggtgttcccccatcatgtttttaagtgtcagaatgttgggcagagggttcttttctgcatcatcctataaagcaatcactaaatatatcgggctatgaagcacttttcctttaaaaaaaatttttttttctttagaaacggggtctttatgtaacaaagcgctnacgttgtgcacatgtaccctagaactgaaagtataat

SEQ ID NO: 529416 - DNA, 266 bp, Homo sapiens
ccagtcttaaaaaaggaaattctgtcatttgtgacaccattgatgaaacttttggacattacgttatgtgaaataaggcagacacagaatgaagactgcatgactccacttacatgaagtatctaaaataggcaaatatggtgaaaccccatctacactaaaaatacaaaattagctgggctagacttttgtatttttattaaagacggggcttcaccatgttggccacgctgatctcaaactcctgacctcaggtaatccgccca

SEQ ID NO: 529417 - DNA, 345 bp, Homo sapiens; identical to SEQ ID NO: 487030

SEQ ID NO: 529418 - DNA, 193 bp, Homo sapiens
  misc_feature (29)..(29): n is a, c, g, or t
  misc_feature (158)..(158): n is a, c, g, or t
  misc_feature (189)..(189): n is a, c, g, or t
ctaaccaggtgggcgaaaagcgctcacgnaaagcagcccataacgcctcggacacctgcgccgccgtatcattccacgtcggcaggcgcgcaccgttttcccaggcggcatcacccatcacgccgcgtagtggcgtccgtcaaaacctggcgcaacgnatgcgcagcgcgtcccggactcatcggggcnggga

SEQ ID NO: 529419 - DNA, 84 bp, Homo sapiens
  misc_feature (23)..(23): n is a, c, g, or t
  misc_feature (40)..(40): n is a, c, g, or t
tgccctgccctgccccgtgtccncctcccttgcccccaancctgtccccgtgcccctcccctctgtttgtgcccctctcccccg

SEQ ID NO: 529420 - DNA, 394 bp, Homo sapiens
ggcgactctagaggtcccccatgcctcatccatgtgctccactcagccactggcagggaaagctccaaatccatgagagtcgaagtctctgactggacagttccctgaattctactagtacctccaattccattttctcccatggaatcactaagagcaagacccactctgttccagaagccctataagctggaggtggacaactcaatgtaaatttcatgggaaaacccttgtacgtgaagcatgagccactcagaactcaccaaaatattcgacaccataacaacagatgctcaaactgtaaaccaggacaacaggtggatgacttcacactgtggacagtttttcccaagatgtcagaacaagactccccactggatgagggcatggggta

SEQ ID NO: 529421 - DNA, 556 bp, Homo sapiens
tccccgtatccttctgcgatatgaattaactagaaatactttgcaaggagagctgcagctaagtactccccgtataaccagacgagcttacttatgaacagctataatatcacacccgtctatttcgcatacatatgtgcgaagagtctatatgctgaggcgagcaaaccgtaccgagcctgcttattcctggtcttcttggttaataatattagttcaactttaaatttgcccacagaaccctctaaatcccctggtaaatttaactgttagtccaaagaggaacagctctttggacactaggaaaaaaccttgtagagagagtaaaaaatttaacacccatagtaggcctaaaagcagccaccaattaagaaagcgttcaagctcaacacccactacctaaaaaatcccaaacatataactgaactcctcacacccaattggaccaatctatcaccctatagaagaactaatgttagtataagtaacatgaaaacattctcctccgcataagcctgcgtcagatttaaacactgaactgacaattaacagccca

SEQ ID NO: 529422 - DNA, 208 bp, Homo sapiens
  misc_feature (39)..(39): n is a, c, g, or t
  misc_feature (42)..(42): n is a, c, g, or t
  misc_feature (145)..(145): n is a, c, g, or t
  misc_feature (156)..(156): n is a, c, g, or t
cggatcgttgatactggcatttcaaactcaataaaaganttntttcttagtaaggtaaggtttcagacacatttcaaaaatgaagctaatgaacaagtgtcgaagtataaaatatttgggaaattatcaaaataataatgtatancaaaaactcanacagaaccaccaaagtaaacgtgattaaacaagatagtaccacgtgtacggt

SEQ ID NO: 529423 - DNA, 1181 bp, Homo sapiens
  misc_feature (1)..(1): n is a, c, g, or t
  misc_feature (69)..(69): n is a, c, g, or t
  misc_feature (112)..(112): n is a, c, g, or t
  misc_feature (368)..(368): n is a, c, g, or t
  misc_feature (399)..(399): n is a, c, g, or t
  misc_feature (435)..(435): n is a, c, g, or t
  misc_feature (453)..(453): n is a, c, g, or t
  misc_feature (467)..(468): n is a, c, g, or t
  misc_feature (480)..(480): n is a, c, g, or t
  misc_feature (483)..(483): n is a, c, g, or t
  misc_feature (489)..(489): n is a, c, g, or t
  misc_feature (494)..(494): n is a, c, g, or t
  misc_feature (496)..(496): n is a, c, g, or t
  misc_feature (515)..(515): n is a, c, g, or t
  misc_feature (520)..(520): n is a, c, g, or t
  misc_feature (528)..(528): n is a, c, g, or t
  misc_feature (556)..(556): n is a, c, g, or t
  misc_feature (560)..(560): n is a, c, g, or t
  misc_feature (562)..(562): n is a, c, g, or t
  misc_feature (564)..(565): n is a, c, g, or t
  misc_feature (567)..(567): n is a, c, g, or t
  misc_feature (600)..(600): n is a, c, g, or t
  misc_feature (603)..(603): n is a, c, g, or t
  misc_feature (612)..(612): n is a, c, g, or t
  misc_feature (623)..(624): n is a, c, g, or t
  misc_feature (634)..(634): n is a, c, g, or t
  misc_feature (651)..(651): n is a, c, g, or t
  misc_feature (662)..(662): n is a, c, g, or t
  misc_feature (745)..(745): n is a, c, g, or t
  misc_feature (748)..(748): n is a, c, g, or t
  misc_feature (758)..(758): n is a, c, g, or t
  misc_feature (824)..(824): n is a, c, g, or t
  misc_feature (841)..(841): n is a, c, g, or t
  misc_feature (858)..(858): n is a, c, g, or t
  misc_feature (905)..(905): n is a, c, g, or t
  misc_feature (918)..(918): n is a, c, g, or t
  misc_feature (976)..(976): n is a, c, g, or t
  misc_feature (984)..(984): n is a, c, g, or t
  misc_feature (1047)..(1047): n is a, c, g, or t
  misc_feature (1111)..(1111): n is a, c, g, or t
  misc_feature (1181)..(1181): n is a, c, g, or t
nccccagcctcccagaccagaataatatgtgattcgagaccatgaggatagtggtctgtacatttgggnccccaggtccatccagtggggcctggcctcccagagtgggacnactccagtgaccaaggagacgggctggacaccagcgtggcctctcccagttctggtggagaagatgaggacttggaccaggagcgacggcgaaacaagaagaggggatcttccccaaggtggccaccaacatcatgcgagcctggttgttccagcacctctcgcacccgtacccctcggaggagcagaagaaaacagtggcgcaggacacggggctcaccatcctgcaagtcaacaactggttcattaacgcccgnagacgcatcgtgcaacctatgatcgatcaanccaaccgcacagggcagggtgcaaccttcatcccanagggccagcccatcgggngctataccgagacnnagccacacgtgnccntccggnctccngnatcagtggggatgagtttnaactnggaagganaatggcattatctatagaggctgatgcngganananncngcctccggctgtgacccccagcctcacacctgnctntggttcccncctggtcctcnngcttcaggancccacctccaaaggccnctccgctcaangcctacctccctagggccctgctgggacatgggggcctgagtgcccacccaagggctctcaaggacaccggcaaggcctccangcnctgagccccncttctgccttcacctctgcctgggacccgagctgggctcctgggccttggtccccagaagatggcngctagggcctcgccgcnaggacagagaagggacngggtggctgggcagtcagggaaggagggtcgcccggatccgacattntggagagattctntcacccttctggtcccccacctccttctctaattcttcttttttatgataaagcttanacacaganaaaaaagacttagagaatacgtagatgagcacttatacagatatatctcaggctaaattgttntgagatttttttattttaagtagcaaagataacactcttattttagtaatggttgagcaactanaagacggggcattattaccaaacaaacagaacccaaaaatggacatctggactagcggtgaactaatttn

SEQ ID NO: 529424 - DNA, 718 bp, Homo sapiens
  misc_feature (585)..(585): n is a, c, g, or t
gccgaataggaacagctccgggtctacagctcccagcgtgagcgacgcagaagacgggtgatttctgcatttccatctgagggtgaagaacaccagtgtgttcctcttacgtggtgtggtggcatgtcaggcccttctaccagaacggaccggaacctggccaggtgcctgggttcttggacttcctagccttcagaactacgtggttggacctcggggtaactaaaactggcagaaggcaaaacgtggataaggagactacgtggtaatgattatgctattacaagacgctcgatgggctaacatcagacatttttataaaaggccagaatcctggctaggacatctctgcctggggaaggagggctggatggcatacggggaatgggcttctaggatgacttccgggtggctacagactacaagaagcatttctggccttgatgtggtctgaatgaagaagacataggagtttcaccaaaggtaggatcctgatggttacacgaacgtgtccacctccatccagagccgtgtggcttgtagtgccttctcgtggccgatgccgaaccgggcacctggttccanaaggtgaaatcactaaatgcctgaaaaaaagggctatgatagtgggagctggagaagattgaatctgaggattgtggacctggggatagggagaacctactttctgggacaatggctcggggtcgaagaggcg

SEQ ID NO: 529425 - DNA, 123 bp, Homo sapiens
ttcggtacccctacaggctttggagcatgttgtggacacttgcctggaagtttattagccagtgaagcagagatggtttcttgccatcaagcctcctcgtgaagagttcctcaacagccggat

SEQ ID NO: 529426 - DNA, 337 bp, Homo sapiens
ggacaatattgggaagttatcagctatcaggacaaacagctcttatcccccagattgactacaaagcatagcgtgctctattctttcactgttcctatctcagccactgccatgtacaagctcctaatccataacagtcatagtctctgctccttcaggaacagtacatcttcctggccttcatccattatagcacccgtgatgtcgataactgcctgtcagggaagactggcagacagttgctttcattcttcctcaaagtatttaccatcagctacagtccaaaattgctttttgttcaaggagatttatgaaaagactctgacaaggactcttg

SEQ ID NO: 529427 - DNA, 775 bp, Homo sapiens
aaaacaatgcaggcagttaagcaagaagatggatccacaaaagaccattcacaaacacatagcagacatttccgagaaggcaacaacatgcaaaatggcaacatgcactgaaggagaatgatcaatgatcacacttgatgcaccatctttgacggattctgatgacgcaagcacagacaagccatggtatcatatgtgcaatccaatgtacttgcgatgcacacatgggcaattgacaactcttcatggcacaagagtggcccaacagctccgatcgagctgcatcggaaagctgtaccactcttgaccatactagcttcataagagactacgaagtcatcaagaagtgaaacgaacgacttgacagcggaccaaactcagaggcgcgtactagcgagctagcaactctagatgcaaaacgaaggtcactacataccttattagctatactgtactaactatactgcatcgcatactaaaacccagagcccactccgttagtcaggcactatccctcaatatagccaaaagacccagcacttgctacctctcccgcacagacaccaccaaacacacccaaacactcgcgagaagacacgcataaagaaacgcacgacaccgacgaggcctgcgcttacccccgcaacatcacccccgacgagcggacaccatacaatcagacgaacaaaactcccccatagcgccccgaaaaaggcgaaagtgacacaaacacacgcaactgcgcaaaccgcaccacgcgaacagcacccacgca

SEQ ID NO: 529428 - DNA, 376 bp, Homo sapiens
gtttcgtcctaatcaagctgaacactagtcactgggttccacggttctcttccgtgacccacgacttctaatagagctataacactcaccgcacggcccaagattccattccttcgaatccgtgaggccaagaatccccaggtcagagaacacgaggcttgccaccatcttggaagtggcctgccgccattttggaagtggcccaccaccatcttgggagctctcggagcaaggacccctggcatctggatattaagactctctccagccctttgaggttgagagaggaagcaaacacggaggaatggatttgacaacccacatgtccgtgactcaatgcaagcaaggcctttcacaaccaacttcgccacccact

SEQ ID NO: 529429 - DNA, 407 bp, Homo sapiens
  misc_feature (267)..(267): n is a, c, g, or t
gaacgcacatcaggtgatgctgaggctacagaagtgtggtctcaggactggcagctgcaaagtcaccccgggaacctgtgagaaatgcagattcttgagccccagccctggcctgctgagccagtttctggttgatgcccaaaccctctgggtgactccgatacacattaggattgagaaccaccaatggaggagcaaaaagaccagccatgaatcaagaggcctgcttctaatccttgttctacaactaatctctgagactgacgnaacacctgcctcctgtagggcacagctttcctagtagacgatgaggagtcggaatagggttgccacaatccttcatttccctcttaaaaggtgataaccctacggtagcagttcatttcctctaaggcctgaaagtgaaa

SEQ ID NO: 529430 - DNA, 302 bp, Homo sapiens
  misc_feature (58)..(58): n is a, c, g, or t
accccggtctgggagcctggtctgtgtgggaagctgtagattcctgactgacgcctgncatggtgggactgccagggaatgccgttgcgtgcgttgagcctcggcggctgcgccaggcgaaggattcttcactgacgcctgagcttgtcgtgctgtacacaagacagtgctgcgaacggtgatctggtgctactgatgaagacgctcaatcactcacataggcactgtcgcaggctgcatgccatcaacaagctgtagtcccagagccacatgacagaaagcacgtctagcaaagcagtgca

SEQ ID NO: 529431 - DNA, 958 bp, Homo sapiens
gacctcactatactctactcaacgcttgatcgtacgcccggaggggttgcacgcgtatcccacatgcgtatcaagattaggtgtaatagctggtacgagggccgccatgcttatccttgggactaccagccactgtagtgttgcgcttacgcgtctaaacgcagtgtgcttaggatcgtgtcacagttcaagcagggatcttaagatgctcagttgatatacaccttgttagatagagtagaagcagtcgacatgccctcgctagaagatttcggtgtctccacaatgttaccggcaaagctgttctgttcaagtagcttaaccgtcgtggagtaaatttcacttgtgtaagttatcgtaggtagggagcggtatgatagagtgcagaccgtatcaaatagccgagcgatagtctaatggtactttgaaactaattcgaagggccgattgcataggagtatgcttgaaacgcaaatactcattaaccagaagacggcgcaagctaaattttgtaactggaccagtaatttgcatggatggactcactggaagtctaacagcaaaaaggtacaagggcataatcatagatagttccatctcgacctttattccatccttattcgtaccccccttcttatgctgggctaggtgcgagaatcgatgctttgtggaagaaagaatgattggtataaggtatgcatactgaggtagggagttgtggggaccatttggatagaattggttcactctagataatatacttgttgtatataccgattatgaaccttttagagttgctaacagtctgagaataaaattggcccttttggtattcaactttgtgaaacttgggttagaatatagtttttaattttttgttcaccgtcaatgtgtcagacttttaaattggaacagtggcggatttaaataggaatccttcttttcctgggatttgggc

SEQ ID NO: 529432 - DNA, 273 bp, Homo sapiens
aagagacaggacacaggaagagagggacatggagagacagggacacagatacacaaaggtcaaggacacacagacacacatatatatgtatatatatgcatttagatgaaaagatcacttggacaataccacatgccggtgaggatttagaaaaactaggtcacttattgctggtgggaatataatatagtacggccactctggaaaacagtttggcagtttgtcataaacctgaacataccgttagtatacagcccagcagcaactacaatc

SEQ ID NO: 529433 - DNA, 1157 bp, Homo sapiens
gtggaacgaacgtgttccagagggcgcgtgggtcggggatgtgcagtaacctctcactggatctcggcgagaaagcaacaagccattatatctgtcgtttcctagatcctacgcatcgtgttttcgcaagggcttctcggaggcctcgtgcaagtccatccacaggccccgcctttgctcactgttgtggctctcgtggcggagcctggtggctgatgattcccaaggttgctcatacttcctgtcgtctgcgatctttctctggagaccttgggccctttggcctgtgtggggctactggaggatgggtaaccctcgatttgcacccagtccgcgtctccttccacaagcgcttgacaagaccctagatcgccgaccgtacaggcagaggatgcgtcgcgtggtccagcatcccagcaaagggtccgcgggtcatgtagccgtgtgtcttggtggggcggccactccaggaagagatatgaggttataatcaggggcctcacggagtggagccttagactatctgagcattggctgcgcgcgtggagtattgcgagccccttgggtcacatttcctcgaaagttaactgtgcctcagggcccttgacgcccaagagaagcaacgtttcattctgaagattgctctgggacaaatcgatcggctatgtgaaacctctgtgcacatagtgggtcacttggaccatgtatggcgtggcaggaccagggcctcgctagcgatggggtgcatcaaggtatagcttcaagcaaatgttgccccccttgtctgtctgtgggtctaacacgtggtacccctgtggtgttccactgttgagcacgtgcccaaagacgttgattatggcccacagctatagagggttcgaccacgggccccataagaaacctcttggccatgcttgggtggcgaattccaccctgttcgccgaagtgccttacgggctcttaacctggaagatatgctcgccttgggggacatccgtgttgagaaccgatcccacttaggtcacaagcaatcatgagggcgaacctagtttgacggcgaagttgcccttagtggggctacattcgccaagagggttccactccacccttgtacttcctgaaaaagctacatcccattttgcctgtggagggcccca

SEQ ID NO: 529434 - DNA, 101 bp, Homo sapiens
tccctgaaagcggaaagcatcaggccacgccgtggcagcctcgtgttggcctcggatagcctggtcccccgcctgtccccgccggacccgccggaaaggct

SEQ ID NO: 529435 - DNA, 1300 bp, Homo sapiens
cccccgctgtctctacgaggttggggggggaaaccccctttgtgtttcccccgcggggtatttttctcctgcgcgacggcgcggtcgtgtggttctgctacagagaggccttcttcatcgggggggggtggtgattacccccacacgggggggggctctcttcttggtgggggtctccacaccgccgtttttgtatactgtacagatcgcactatggtgctctttttatttgtggtgcgagaaacgtcaataaggcaaaatttgtttgtagcgaccccctgttgtccccacctctgggggtggtttataaacacctcttgtatattcccctcacaatgtactcccacgtagtaggacagggtgtaaatatattggaggccccttccctccctcagatcagaggagaaatttttatagagacatagttttcgagaggcgtctcttatgtgtgtcccacacagaggggagtttttaaaattttctccccacgccggctgtatatatgggcccccccgcatttgtcgccacacatacccacagcgcgtgtttacaagatatagagagggagaccccacacacaatagatattggagatcacaccgcatagagtgagagtgtatagagagagaaatattctcgtgaaatatagagagagagagagatgatatagagagagatatatatatatatatagagagatatatctctcgtggagagatcacgcatatataaacgagagagagatgagagatagagatatgagagatacatcttcttcacacgagagagagagatatataagagacacgcgcgcgcgcgcgctcgtcgacgagagagataatgagatagaatatatatatatttttgccggctctcgatagtgagagcccctcgcgcgcttcttactctctcttgtgcagatatcctccacacactgttgtggggcgtgcgcacacacatatagtgtgggacacacagtgttgtgagtggtgtgtgagagcgactcacacactgtgtctctgttgagagtgtgttctctctcttgtgtgagactcacacacagagtttagagagagagagttgaatagaagaaggacacactctcactttgtgagggttttcacttgttttgtgcgcgagaactttttccaccgcacaaagagttttcacaagagagaattttgtggtgtgtccgcgtaatatatacccacacattactttctgttttttttcctggagaaaagaaggcacccaaaaagaaaaagaggaaaaaaaaacacccaaaaaaagagagagaaga

SEQ ID NO: 529436 - DNA, 239 bp, Homo sapiens
  misc_feature (51)..(51): n is a, c, g, or t
  misc_feature (61)..(61): n is a, c, g, or t
  misc_feature (225)..(225): n is a, c, g, or t
atgtcgggtgatgtcgccagggattaccgctttgcgacgagatccgtcggntctgggccgncatgctatcaccatgctgatgggaatccttggcggtgacgacgtcgaggatgtcaccgagcaacctcctgaactcatcgtgagaggatccactgttcaggcccagtaaggggcgacgcgacggtggtgtcaacccttgaccccgccactctcaacaccgcggangaacaccttctgca

SEQ ID NO: 529437 - DNA, 817 bp, Homo sapiens
cgagactctttttaatcttgttgccaggtgaaataaatgcccgtcccttatctcggcgtttctgcccttctgggtccttacccaccgtttcttcaaagaacccctagcgataacaggggctcccgccatttcatagcacactggtaaaagttgtgcttttgaaattttatgtttagttgcacacaatgggcccaagaaacattgccttgaggaagatacgattgggaaatccagagtgtagaaggataaatactgtgtttactgtcccaagacatgtttatagtgctctgtaaatgttcccttcccttgtagtctctggccagatgctttaggaagataaaagtttgaggagaaccaccgggattctgaattaagcaccgagttgaagtttatacccctttcacaagcttttccaggatgtcgccattactaagaagccagataatggtgttttttagaaacctctattgaagtatattccacccaatactttatgtataaataatattataccatatacttgtatagaccgtttctgcttcaccactttgattttttcccatttaatatttatattagagatctatatatgtataaatatgtattttgtccaatttgttaacttaaatatatagagacccttttttcttctggaagtttgttgaaatgaccgaagcgtatatggattccagaaatttaagctgccaaaatgtatttgctattaaatgagaagtctccctgatagaggttctttattgctccttttttaaaaaatggactcttggaatctgtttaaataaaattgtaccatttggga

SEQ ID NO: 529438 - DNA, 179 bp, Homo sapiens
ccacgatatttggccagggtctacaggtggaagtgtgatcccgtcgaccaatgccaggattcagagactggtgacgttttatcaaagtggagattcatgggagaagtatgtgcatagtgtcagataccagtctactctatggccgtgcatagggagtggcattccaacctttacagacc

SEQ ID NO: 529439 - DNA, 101 bp, Homo sapiens
  misc_feature (8)..(8): n is a, c, g, or t
agtagttncgggacagcgcccctatgggaatacggcagctggtacaaggcctgtaaagtagacagccccacagtcaacaccaccctgcgcagtttgggggc

SEQ ID NO: 529440 - DNA, 141 bp, Homo sapiens
caggtgctctttcactcaacattaagtgtaagatttatttgtattgttacatgtagctgtgggtttttgtttgttttgagacagagtcttgctctgttgcccaggctggagtgctgtggtgtgatctcagcacactgcaac

SEQ ID NO: 529441 - DNA, 596 bp, Homo sapiens
gagactcggagagatgggccggcggaagacaccggccgcgtcgtgggcacccctccacctgctgctgcttggtgggccgccctgccctgtggatccaaggggtggggtcagatccggagtgccttcagactttgggcccagaaggagcagaacgaaattaccacccagtccaaccacaattatggaacttcaatcggacatccttcggaaataatgcaggaaggcaaccaaggtatctctgaaaagtgtggcacacagtgaccttacagccacttggattgaatacgcagcgaatacaccggggacttcccactggaaagtaaatatggttagctcggttccaggcacaacatccactggcaggccgaaatttcagcaggggcttacaatcgctgggacactgggcgtaacttgggacacataaggaacacccctttcttggacgcatcaggacaacccctattagtggggtaacccggcgtacttatctcaaaatattcatgacggcaaccccttcaaattccccaacaggccttaaaacgaaccactattgggtcaatcgccttggcaactattgtaatccacaaatattttac

SEQ ID NO: 529442 - DNA, 299 bp, Homo sapiens
cctcacctgatacagcgagtcaagaccagcctgcccaacatagtgaaaccgtgtctctgctaaaaacacaaaagattaaccaggcacggtggtgaacgcctgtagtctcagctactcaggaggttgaggcataagaatcgcttgaacccaggaggcagaggttgcagtgagctgagatcatgcccctgcgctccagtatgggtgacagagccaggttctgtctcaagaaaaaaaaatgtatatatatatatatatatcttttcaccatatacatgcctgtctgtcaatctctggttggg

SEQ ID NO: 529443 - DNA, 152 bp, Homo sapiens
  misc_feature (128)..(129): n is a, c, g, or t
accatgaggatgatggcgaggaggcggattagcagggggccgggacagggaggttgggaggggttacagaggggagacagaggcacggagagaaaggggggtttagcacaagacacagcggacctcgnnattggctaaactcccatagtatt

SEQ ID NO: 529444 - DNA, 219 bp, Homo sapiens
gctgagtgtctacatgtcacagagccctcatgaacgtacaatctagtgtaccagagttaagctgaccatggaagaagatatgctgctcttcgtcaactctcgtagtaaagctcgacatggtggacaccaggcggcaaagaaatcaacaagccatggttcttagtcattggcaggaaaattttgaggtccaagcgtggtaacatgagaattcacactttc

SEQ ID NO: 529445 - DNA, 807 bp, Homo sapiens
  misc_feature (34)..(34): n is a, c, g, or t
  misc_feature (63)..(63): n is a, c, g, or t
  misc_feature (120)..(120): n is a, c, g, or t
  misc_feature (124)..(124): n is a, c, g, or t
  misc_feature (130)..(130): n is a, c, g, or t
  misc_feature (132)..(132): n is a, c, g, or t
  misc_feature (173)..(173): n is a, c, g, or t
  misc_feature (181)..(181): n is a, c, g, or t
  misc_feature (183)..(183): n is a, c, g, or t
  misc_feature (185)..(185): n is a, c, g, or t
  misc_feature (187)..(187): n is a, c, g, or t
  misc_feature (189)..(189): n is a, c, g, or t
  misc_feature (194)..(194): n is a, c, g, or t
  misc_feature (197)..(197): n is a, c, g, or t
  misc_feature (208)..(209): n is a, c, g, or t
  misc_feature (213)..(213): n is a, c, g, or t
  misc_feature (215)..(215): n is a, c, g, or t
  misc_feature (217)..(218): n is a, c, g, or t
  misc_feature (220)..(220): n is a, c, g, or t
  misc_feature (222)..(222): n is a, c, g, or t
  misc_feature (224)..(224): n is a, c, g, or t
  misc_feature (250)..(250): n is a, c, g, or t
  misc_feature (253)..(253): n is a, c, g, or t
  misc_feature (258)..(258): n is a, c, g, or t
  misc_feature (263)..(263): n is a, c, g, or t
  misc_feature (273)..(273): n is a, c, g, or t
  misc_feature (278)..(278): n is a, c, g, or t
  misc_feature (283)..(285): n is a, c, g, or t
  misc_feature (288)..(288): n is a, c, g, or t
  misc_feature (298)..(298): n is a, c, g, or t
  misc_feature (307)..(307): n is a, c, g, or t
  misc_feature (310)..(310): n is a, c, g, or t
  misc_feature (312)..(312): n is a, c, g, or t
  misc_feature (314)..(314): n is a, c, g, or t
  misc_feature (318)..(318): n is a, c, g, or t
  misc_feature (321)..(321): n is a, c, g, or t
  misc_feature (325)..(325): n is a, c, g, or t
  misc_feature (330)..(331): n is a, c, g, or t
  misc_feature (343)..(343): n is a, c, g, or t
  misc_feature (358)..(358): n is a, c, g, or t
  misc_feature (388)..(388): n is a, c, g, or t
  misc_feature (390)..(391): n is a, c, g, or t
  misc_feature (396)..(396): n is a, c, g, or t
  misc_feature (400)..(400): n is a, c, g, or t
  misc_feature (412)..(412): n is a, c, g, or t
  misc_feature (417)..(417): n is a, c, g, or t
  misc_feature (421)..(421): n is a, c, g, or t
  misc_feature (423)..(423): n is a, c, g, or t
  misc_feature (427)..(428): n is a, c, g, or t
  misc_feature (435)..(435): n is a, c, g, or t
  misc_feature (450)..(450): n is a, c, g, or t
  misc_feature (454)..(454): n is a, c, g, or t
  misc_feature (456)..(456): n is a, c, g, or t
  misc_feature (465)..(465): n is a, c, g, or t
  misc_feature (468)..(471): n is a, c, g, or t
  misc_feature (473)..(473): n is a, c, g, or t
  misc_feature (488)..(488): n is a, c, g, or t
  misc_feature (494)..(494): n is a, c, g, or t
  misc_feature (563)..(563): n is a, c, g, or t
  misc_feature (587)..(587): n is a, c, g, or t
  misc_feature (592)..(592): n is a, c, g, or t
  misc_feature (595)..(595): n is a, c, g, or t
  misc_feature (598)..(598): n is a, c, g, or t
  misc_feature (601)..(602): n is a, c, g, or t
  misc_feature (659)..(659): n is a, c, g, or t
  misc_feature (668)..(668): n is a, c, g, or t
  misc_feature (670)..(670): n is a, c, g, or t
  misc_feature (702)..(703): n is a, c, g, or t
  misc_feature (706)..(706): n is a, c, g, or t
  misc_feature (710)..(710): n is a, c, g, or t
  misc_feature (731)..(731): n is a, c, g, or t
  misc_feature (807)..(807): n is a, c, g, or t
ttcagaacaagaagaaattcagaaacaacaaaanaagtatcattcacagtgtaatggaaaaantttttctgaagcaggaattataactcttccttctttttccctagtctttcatggtcncccncccggncnctcgaatataattcgtaaatcccaattcctgcagggaagtnggagacanananananacagnccnttaatccccgnnccgncngnncncncnctccccccacacccccagcccctccnggnggtcnccccnatgacagggngaggngggcnnnccnctgccagcgnggagagggnccncntngctngcncccnccccnnccagcaagtganacaaccctcggcttntggagctccagcctgcctctggggacaggncnnctgtngccnccccttgggacnctccncccncncacnnccccccnccccccccccccccncccngncctctcggngcnnnntnccccccgacttctgnggtgtntgggatggggggggggggggcccaacccccgggcgccgctcccggcccatcagcagagagagagctctnggcagacgcctctcccccacttantgtgnggncgntgnnatacttttctgcgaacttcccatagtggtagtagtggaaagtggggtagcccttgancgcctcctncncgcacaggtcttggttcttgtctttgacgcannaanaagnggcacaggcaatctttcgggnatctttgaaggcatcagcagtagcagttaagtgcggaatgaccttcttacagtgtgggcacaaggggcgtagaacn

SEQ ID NO: 529446 - DNA, 444 bp, Homo sapiens
cggcacgaggtaaaaaaagaatttatataattcatggatgaaatgtttcagaatctataggattatattttttttaaggcagacagatacgaaaatacaacgaagcgtgcatgaccgaaaccagaagagattaaagtaaaacctcattctcctgaggaaatcgtgtgagaagggacttagggactgccggaacacagcgaagcagaggcagaaggcagacaaaaggggctgggttggtccccgcctgtgtgaacgaaaaaatatgtcagattggaaaattgcggtaaaaaccaggcagagcacgtacgttgcccccacaggaagtgtccgccatgctgcctgtgcccggaagtaggtaggaacacacagtcagagggacccaaaagcaggggggaaggaaaaagagatgcacacttcccccagagaagcctccgagcgcggccg

SEQ ID NO: 529447 - DNA, 906 bp, Homo sapiens
gatcgcaccactgcactccagcctgggtgacacagcaagactctgtttcaaaaaaaaaaaaattctttaactttgataaaccctagctaaaactgatcagggaaaaaaagagagaatttagcaagatcaaatttagaaaagggagatcctacctcgtgtttacagggggagtcctttaaactttaaagatcctgccagtacttaaagggacaagagaacacctatgagcaattttaggccattggttctctgacaacttaggggaaatgggataccctgaaagacaatttaccagaatctggacacaagattattagaaaactttatacagccttatatctgttacacttaattggtaattaaaaaccttcctcagaacagctgtgtcagatggcttcacggatgatttctaccaaattgtttaagaacggattgataccaatttggtacaacctcttttagaaagagctacattttttttagaaaatctaggagggaagaacctttctcattggataccaaactcaatggatacccagattatttggataacttctcaactcaccttgataccaaaaccagacacagaccctacaaatttggacgttacagacgcgtatctctcaagaaccttgacccaacattccaaacaaaattttactaaagtcaagctcagtactatttttaagattgatccagtcttgacccagtggggatcttctccaggacccaggtgggttcaacctcttcaatggtgccacaatggtgcttccaccatattagggacaatgaaagagaaaatgtttttttcccataaatgccgggcaatttttgggaaattcactggggctttaaattctcgcaactaaagttgaacaaaatttctcacccgtaaggaaacctaga

SEQ ID NO: 529448 - DNA, 250 bp, Homo sapiens
cgaagctattcagagagaccacctgcccatgggagaacctgcagttctccttaaagcggcactttccctgcaggccggctctgcgtgtctggccaagctagcaggatggcctctggccacgcagacacgcgatcaccggatgtggacaacgtgcgactacacaggcacagtttgactctggcgtgctgctgagaggtgggccagcggcggggagatcctcgtaggagtcggaccgctgcgaggcaatgca

SEQ ID NO: 529449 - DNA, 258 bp, Homo sapiens
cccctggggggggggaaagggggggggttttcccctccccccaaaagggggcccccccccctggggggggggttttggaaaaagggccctttttaaacgggggggggggggttttttagggaaaaccccccccccccccccccgggggggggggggggccgggggggggggggtttttcccccccccccctttttttcggggttttttttttccccccgaatttgccccccggcccccaaaaagtttgttttttttta

SEQ ID NO: 529450 - DNA, 142 bp, Homo sapiens
tatccctaacacatgtaacaggaatctatccccagctgttttttgtcaggttgtcaagatgatgatgtaggtgtgcggtcttatttctgggttccctattctgttcccagtctgtgtgtgaaaaagtgttgggcgataacat

SEQ ID NO: 529451 - DNA, 210 bp, Homo sapiens
gttggttttcgctttaagtcaggagtcccaaatgcctttttttttttcaattaagggaaaagccccctttctccctttaacatcccccagacccccgccccggcccgggccccccggtgttgctaacgccagtatgatgcttattttgctactcggaaactatttttatggaattaagggatgcttttttgtttataaatgcctgtttta

SEQ ID NO: 529452 - DNA, 1251 bp, Homo sapiens
  misc_feature (132)..(132): n is a, c, g, or t
gaggactcaaaggctgggatcatggtatatggaaccctccttttactcctctcgagagcgacctggtcccttatcgccagacccatggtgtggggctccacacgtccgttgaatgtatttccacatgttccnggtgatgccggtctctgttcggggggaggctcgccggattcagtctcatgttgggctactgtggatcggagcacaccaaggtctgtgctgcattctgatagacgagggaccgcgagatccagaggaaatggctcgctcgccgtggtccggacctgctcgtcatcgcgaagccaatgggaagggggagtacaatcacgctatttgggggaatccgggcgaaggaactagcgagaagtcgccctatgtggaattggtcgtcgaccaggaagtttttcacggatatcgtagatttcatggctgaggaacgagctgcagacggtgcataacattatcatatccaggaaagtcagaaagggactcgccgtggtgcttcaatcaaacactcttgcacatgattgggagtatgcttgggggactttagacacgacgactgggagtggggccccccgaacagagggctggcctgtttccgctacccggcggggttactcgacaatcatagatttcacagacgcggagagcgactgggggctaagcggaagtttgaattcctcccaagagctctgggaaattggaccgtgagaccactagggccgttcttgcccatggggtgtaacccggcgcgaagatgggaacacatcggtggattaggggcattcccgaagaaattctctcccgccatgggtcgaaaaaaatgattccgtacactcgtaattggcagttcccttgggcatgtggtcagggcaggcacatacccacgtcaggaagagacctttaggcgtgggaaagggaatcaccaattgagccggtcgtgacacgtttgggagtttcacctatgtcaaagagattaagaccctcgggcaactgcaacatgcggggcgacaactgatgagagcaacggtccatcagccatcataaaacgtcattgatgtattggcaccccccaagaagggcaccacacaacgttggcaatcttccaacccgaacacaccccgatgctttactttggacagcaccactatggaacgtggccaactcattagagcagggtcgcctactggagggtcacatttgtggctctggactcgcgccactctgcagggcagaattccacagagg

SEQ ID NO: 529453 - DNA, 776 bp, Homo sapiens
cataatatgtctatgtgcgtacctcgtggtatatcgcacgagtggcctgtactccgaggagataccatgtcggtagacgcgagcagtgtctgacgagttagatgtggaactgggaggcactttgctgtctgcaatctgaagttgagtggtgcaaaaatgcagagtaataaaacttttaacttgtgagaatgcaaaaccatactccaatgaaatgcatcatcaacatcaccaccagcagcagcaccaccatgcagcaacatgcagcagcctgccaccaccgccaatacctgcaaatgggcaacatgtgccagcagccaaaatgaatgtgcttgactattgacctgaatgaattttagaaaaccaggagatgaagaccttcacccaactgaagcctgtctatttatgttgggaaatcttcctcccgacatcactgagtgacagaacatgattgaaactatattgagaacatattgtgcaaatgtgcatggctgaagtcttcatatcataatgtgatacaatggaatttggctttatcctgctttggaaaccctgaaccctagctggagattgccaaatgtggagcttggacaatatgccactccgtggaaatgcagctgctatgtgcgctatgactgccatagtgcatcccttacagtatcgaaaccttcctcagttatgttgtccaactgaactgcttggaagaagccttttcttgtgtactggccaggtatgagaggggctgtagtcacttgtggcatgatcgaggaagtgcccta

SEQ ID NO: 529454 - DNA, 184 bp, Homo sapiens
atactgataaaggatatatatccataatgcataaagtactctcacaaatcaaaaataagacaaccctggagttcccgttgtggcgcagtggttaacaaatccaactaagaaccatgaggttgcgggttcgattcctcagcgggttaaggatccagcgttgctgtgagctgtagcgtaggttgca

SEQ ID NO: 529455 - DNA, 868 bp, Homo sapiens
gcatgaaggtgcctgctgtgtggggcccacagccttgaaacgaccaccttcctctccagaccacccaggcaccgcggggcaaacccgccatacctggcaccgcttgcagctgtacttgtgaggctccgagtctgcgctctcgtcagaattgtcatcgttttcttccgaggagatcccgatcttgccgataaactcttccctctggtggtcatccatcaacgcgatgtcctggaaaacagccaccacttccggtttctaacagcgcagcagacgcttcactcagttatctacaccgcagggacgaccaatcatttccccagatgcagaagaaaatgcctctctgatgcccgtggcgccctaacgagctacacttgtgccctagcccatcccagcttgtccccagaggtccccacctaaacgctaaagctgcccttgctctccacgccgcccgcggcttcctctcacatgcgcccagcaagatcccaatctgtgcccagggccaggcactgctgggaagtccccctagtgagtctcccataccacctgttactttttcagttcttgatcagcgcttctcccagcctttatcacaccccaagtcctccctgctcccggggcttctgctccgttcctctctttcctcaaaggtggggagggacacagatgccagcaccgggctgagaagcagccacggtgggagagcagtacttcaagcctggcagttggggccacaggaggtgaggccaatgcagtcacagaattccatcttggagagatcaaatgcgaccagttgtcaactattgaggacgctgctgtggtctgaatacttgaaccctcccaaattcccatgttgaatccctaattcaca

SEQ ID NO: 529456 - DNA, 722 bp, Homo sapiens
  misc_feature (371)..(371): n is a, c, g, or t
  misc_feature (515)..(515): n is a, c, g, or t
  misc_feature (517)..(518): n is a, c, g, or t
  misc_feature (532)..(532): n is a, c, g, or t
  misc_feature (548)..(549): n is a, c, g, or t
  misc_feature (553)..(553): n is a, c, g, or t
  misc_feature (555)..(556): n is a, c, g, or t
  misc_feature (560)..(560): n is a, c, g, or t
  misc_feature (566)..(566): n is a, c, g, or t
  misc_feature (584)..(584): n is a, c, g, or t
  misc_feature (587)..(587): n is a, c, g, or t
caaaaaccaaaacctgcagccagtggtcatttcaaaatctttttatgttcagatactgagccttcataagggttgactacctcagatttgctgcactcattgtggacttcagtgtggatcacaacttctggataagaagattacaactattaagtgtcgatgtgaaccttgcgaaccagctctactggattcttatcagaaatcctgcataaaaagtcagccatctgggttctgatctgctgtaacaagatgaagatttaagtgaccttaattaacctgtcctgtgccctacccttaaggaatactctctgtagtaggctgttgttatattagacttcctggaacacaccgctgaaaagaactgatgtgtnccagaatcaatcttggggttaggggctggtgattggtaatttaaactaattggtattctagaggtaaccacaaatataaattcaaccaaagtggggtccaccaagtgggggaaggggaagggagagaataatcttgggggtttntnntttgggtaattttntattgggatagggctnntggntnnggtntaggtnctgcattaaggccttttnggnttggacttgaaataagttcttggacagagcatatggctgggttaattaagtaacctaaagtatgcattaggatggtgaaaggtctcgtgagtatgccaatcctgagggtggaaccaaatagcctttgatgaacag

SEQ ID NO: 529457 - DNA, 427 bp, Homo sapiens
accagtgggcagaggaaatgtcccgagtgtgggtcattacaagcgaagcctaagagaaagtgctcgcagttcatcaagtgtctaagttgccaatgatggcacgtcctatatgaacctcaacaaggtcaagcctctgcctctccttgagccagatagcccacatcaaatagaatcagggctcacagtagagattcaagctctcaggtgtgtgtaacggaatgcgaaaaccattaaaacaaacctacgggaacaataatctgagagtttaaaagtataaatcaaaagattactaccttattaggacaaactacaggtttatgattatcaagcagtcgtagtgactgaaatttcattaatcagaagtcctgctgctcagattataaattaaaatacatctcactgatttcatttaatgcatgtgttcaca

SEQ ID NO: 529458 - DNA, 988 bp, Homo sapiens
gcctagctctctcggtggtccacccgagaccccttgacgtcaccatgcctagtcgccccgcgcggacccttatgcgctccgaccagatgagagaatcaatcatgaaccgagggaaaaaaaactcgcctaagactgcgggcacgagtgcgcatatggtgtggaaaggagctgatcgccgaaagaagaaggaggttcagtagcaacatgccatcaagcatgattagacaacaaaaacatttccaagatttctccgtattatgacagttgcgtgagtgttaacatataagtctctgtgtactttgcatgaaggtgactatagttgtacacatatccaaggggatacacgtgactcactacctttgaaacaaacgcataataggttcgtgcgcatctctggcagctggccacgtatcgccatgtaccggccatgctgagacgagtcagcatggctagaaatagcttacgccagtgatcttgataacctagtttgagttgccgtggtagtcatcgaagtaagttaaagggagactagcgtctgaagctcgtgcctcgaatctagatcgtgtggattggaaatagcgacacctattgcctacttgtgggaggattggtgatcgattgaaggttccaggatcttgtggagactttttgatgacgttcaccgtaatgagggaaattgtaattgagtcaactgcttgaagatgcaacctgcataaagattacctggggagcgagctactgtgatatgatgagctgctatgtgaccgaagatctactgtggatgggatctgatagcatctaggtctctaatatttagacaggccaggcccttggaacacagagggctatacaggagtgcttatacccgatcatcctgtgggctaataacgcgaagagccgggaatctcaaggttgaaccaggaaaaaagttctggtagaaaaaaaaaaccgggggcaaggatccgaggccttgcaccgctttggcacg

SEQ ID NO: 529459 - DNA, 436 bp, Homo sapiens
  misc_feature (48)..(48): n is a, c, g, or t
  misc_feature (80)..(80): n is a, c, g, or t
ggctgcagtgtaatggcacgatctctgctcactgcaacctctgtctcncaggttcaagccattctcattcctcagccacncaagtagctgggattacaggcatgtgtcaccattcctggctaatttttgtatttttagtagagatggggttttaccatgttggtcaggctggtctcgaactcctgacctcaagtgatccacccaccttgacctcccaaagtgctgggattacatgcgtgagccaccatgcccagcccacctgtgatattttgatacatgcatacaatgtgtagtgatcaaagcagggtaattaggatattaattatctcaagtgttatgatttctttgtgttaggaaaattgcacatcttgtgctatagctgttttcagttatatactggattattgaactatagtgacccttctgtcgtcttctc

SEQ ID NO: 529460 - DNA, 107 bp, Homo sapiens
tccgaaaaaagagtttattcaggaacaggacggggattgcagtcaggatatgcgtgcatacactggaatgcattttggggggggtccgtgataacggcaacacttta

SEQ ID NO: 529461 - DNA, 305 bp, Homo sapiens
ttccaatctctcttaaggcggttctatttatcccatcttgagcttgtgatatatgtccaagtttgattttcttaatggccacaatttggttggtgttcttatctctggcctgtgtaaacggtggcaacttagaaagaaaaatagaaataccttaggtttatgggagtttgtgtgtgcgcctttgcgcatttttcacatttcgcgaagcaaagagcccagagtttgtgagcagactcgcggcggctggaaacgtggcgggtcagtctcggtccagctccaggttacttttcagcaaggagaggccc

SEQ ID NO: 529462 - DNA, 346 bp, Homo sapiens
cttctgggcgttgctgaagatgtactttctgttgatgagacagagaagatataaaaatacaaatcataagtcagggtcatatctcagctctccataatccttatcactggccctgtgaattcactactctcttttcttttccttgtgacttcctttttccatcagggccagctattcccctccttttttaaagtcatagagatgtatctgccaaggacagataattgccctacagaaggaaaacaaggagtgagaattccttataccaaatactcctccttcaggcaggaaagaaaaaaaatcaaccttatgttgaaataacacaaaacatagtaagtaggggatc

SEQ ID NO: 529463 - DNA, 660 bp, Homo sapiens
  misc_feature (81)..(81): n is a, c, g, or t
ggacctcgatgggtcgttctacatgcacagagttgctgcggttgataagctgatgtactcaaggtactgagcctgcaccgnccggctcatgcgcccgaagtagccgttttccaggttgatcgggccgggctcgtattcatagcgctgggcgatggcctgccagtgcggttcgttatcagcattccttggcatggcgaatctcttagtgacggggggcaggtttaccgtgtttggcgcgcagcggttcgagcaattcggacaggccgttgtggtcgatttcctgcaacaaggccagtaagccgcccagttccccgtgggggaaaccttcacgggcgaaccaattcaggtaaggcccaggcaggtcggcaatgatccggcctttgtatttgccaaagggcatttggcgggtgatcagcagttcgagtttttcgggattcatgagcgtcgtagggttgaggccaggctttcgaaaatacaggcattctgcatgaaggccaaatgacagatcatgcaaataaccaacatacagatggttcaataattcttaacctattgaaaataaacacaaaaataatttttctaaacctggcacgggcgctgcaataaccaaggcaaccttctaacccgtacaagagaacgacccacgaggggatctctaga

SEQ ID NO: 529464 - DNA, 103 bp, Homo sapiens
aggatcacgatgtcctgtccatctctcatcccagttcctcgggcttcttagcatcagtgctcagtgtatatgctcagggcttgtcccagttcctcaaggcttg

SEQ ID NO: 529465 - DNA, 806 bp, Homo sapiens
  misc_feature (268)..(268): n is a, c, g, or t
  misc_feature (381)..(381): n is a, c, g, or t
  misc_feature (752)..(752): n is a, c, g, or t
ggggtctggctgctgggggcccggagtcagtgacgctcggtagccgcgtgcgccaaagcggggaatctgggaggcgagcagctctgcggttaatgcacgtattttaaattcccggggctgcggacgctatgtgcaggaagcacctccaggagattccagacctggagatagcgaaacgttgccagcagacttgcacgtggggatgggattcccagctaagactatctagtaacatgctgtcaaggcaatggggggtcttccggtccgnctggagagaagaggagcccgcattcagtggagaacatcccctcaggaacgggctctcgaaatctgggccaaccagggagagcaccgctccaacggcaaacgagtgaaggagcnacagagggagtgatcaacagacatttgtgattgtccggcaggtcctagaggctaacatcgagagagagcttaccagggtgtatcatggcgactcccttccggatgaggctgtctctgtgggagtacttattcctggtgctgtgcgcttccctgagtctggtagaaggtctgctggtgtgggctagagagggtggtatcgcgcgtagacgctctgatgagtctcgtagtggcgagaccgttaggacctacagaggtaaatagatctgcgacccggatgttgagtggtctggcttgctgtctcaaggggcgtgattgccttcccgctgcccacgatcatgtatgggaccaaccattgagtgaacattttgagncccttatcggtgttccagcagatggacctatcgaagctcagtgatagaagtgtc

SEQ ID NO: 529466 - DNA, 126 bp, Homo sapiens
agcacgtgtcgtgaacaccacgctcacggactgctgcgacgattcaccagaccagagcacttgggcgcagcgccagatcagtgcagcggttgcatagctaccaggagtccactaatgcagctcact

SEQ ID NO: 529467 - DNA, 562 bp, Homo sapiens
  misc_feature (42)..(42): n is a, c, g, or t
  misc_feature (52)..(52): n is a, c, g, or t
  misc_feature (96)..(96): n is a, c, g, or t
  misc_feature (107)..(107): n is a, c, g, or t
  misc_feature (143)..(143): n is a, c, g, or t
cacagcctgttcttaagcccaggggcggcacctcaatgtcangacccagctncacctgagagcactcagatccaggtggggaggcccctgcagccntccagtgccgnaggcctgagcatggctgtgtgaaaagcgtggttgcnaggcatgtggctctcctgccgcccctccaacctgagatcttgttgggagacttaatggcagcaggcagccatcactgcctggttgatgctgcactgagctggacaaggggagtccgggcaggggacttcttgggctcgggaccaagcttaactttttggccccacccacaaaaaacgtggggttcaggttccttttgccccttcccagcacatgcagaatgactccagtggttccattgtcccctcctgccctgtggacctgcttgcctttttcaagtgccccacctcccctggggtgggccactcacccacagtggaagtggccgggatttgcccttcctcccctttcacctacctggacccctaacctggccctagactgagctttatttaagaataaaatcgtggtggtggtcaaa

SEQ ID NO: 529468 - DNA, 273 bp, Homo sapiens
cttttcccccccgggttttttaaaaaaaaaaaggttcctttggctataatttaaatcccccctttgcccctaaaggggaaagtttggtttaacctttggaaaaacccggggaaacaaatcccccccccctccccatcaaattttaaaaaggttcccccggtttttcaaattgttgaatgggaaccccttccctagggcccgggggttttttgttttgtttaaacgcctttgtcccgcccccgggataaaaaagggtttcccccctgcttccca

SEQ ID NO: 529469 - DNA, 1220 bp, Homo sapiens
tttgactatgctcttcatcatgctggatcagatgagactcctggagcatgagtatcagggagatctcagaaccatgatccttcggaatgcacacgatacatgagcaccgtggggagcaggactggcgattgcttatgcccttgggtagttgctagtggatatcttggccacagatgagtcccaagcttatagccgaggcacagatcgagctaggacaccctagatcttatcgagacagcatgagaaccttctacatgggaccaagaagaacacaaggagcaagatggtgagtgcgagcattcatgaagcaagtacatccatgtggccaaaatcatcaagcctgtcctgacacaggagtcggccacctacattgcagaagagtattcacgcctgcgcagccaggatagcatgagctcagacaccgccaggacatctccagttacagcccgaacactggaaactctgattcgactgggcacagaccatgcgaagggcccgcatgagcaacgactgtggacctgcaggatgcagaggaagctgtggagtaggtccagtatgcttactttaagacaggttctggagaaggagaagaaacgtaagaagcgaagtgaggatgcaatcagagacagacagcctgcagaggagaaacgccgagaggaccaggagcccgcaagcggcacgagcagggaagaactcgccagcccagaatggccacacatggggaatacatacgaccccctagggactccagagcaccaagaggcaggaaattgcgtcaaaggtacaaacgagccaaagcagggaggaatcacaggaagacaaggatcccggaagaggacatagactgcaccacggcggacgcgactacgaggcgggaccacatgggatggacaccggaacaggcaagtggcagcaacacggcgaaaaagccgacgaagaaaccaaaacgggaaaagggaacaaacccataccacggagcggaacacgggagagcgaacgaacggggaagaacgaaacgagggagaaaggcgagatcaacaagagaacagcacatagagaacgacagacaaagaaaagcgtaacaaccaagcacgaaacgtgacacgaccaacaacaatacggcgacgatgaatgacagcataggcgacgacttgtatcacagagagagatagaacgaacatgcacacatacttcataatctattctacagccctcgaagc

SEQ ID NO: 529470 - DNA, 253 bp, Homo sapiens
  misc_feature (96)..(96): n is a, c, g, or t
  misc_feature (106)..(107): n is a, c, g, or t
  misc_feature (109)..(109): n is a, c, g, or t
  misc_feature (112)..(112): n is a, c, g, or t
tacgcctgtcgcaagtcggtggagagggatgaggatgtggagggacggacgtggcggaagccgcggggacttgcgatggggcgtaggatgtcgcgngtgagtggtnncnagncctgttgggtcagggcggttcgcaggtgctgtcagagctggccggggcacccgggtcgaagaggcgggcgccagtcgcggtcggtggagagggatgaggatgtaggagggacgacgtggcggagccgcgggactgcgccaa

SEQ ID NO: 529471 - DNA, 231 bp, Homo sapiens
tgttgagaagtatcaagcgttgaggaagtataagcgttgagcagtatcaagcgttgagaagtataagcgttgagaagtataagcgttgagaagtataagcgttgaggaagtataagcgttgagaaagttaaagcgttgatgaagtataaagcgttgaggaagtataaagcgttgagaaagtataaagcgttgatgaagtataaagcgttgaggaagtataaagtttttgag

SEQ ID NO: 529472 - DNA, 382 bp, Homo sapiens
ttggcacgaggggtgcacctccatttagagacacagatggcacccacctgattcggatcacagattaatgacgctctccagcccccgagtggcccggatgcagggtggatgctggcagggctggtttaataccgatgatgtgaatagacttaaaacaatgcctggcccacaattgccatggcgtgtggttgcaatggggctcctgtcataacctaatgccccgtgacagccccataccacacagtgagttggtgtggggaccccaaagctcccttcatacaggaatcacatacttcaggagttccccaaatgatacctatgctcaagcagcccctgtgacacgtgcccactgccatcgaagtgcatgttataaggctcagga

SEQ ID NO: 529473 - DNA, 109 bp, Homo sapiens
atctgatgcaccccacctgacccaactaaacacgaacagtcactgacatggcccagctatattaacagactgcgcctcgaaaccatgctgtggcatctgataaacacct

SEQ ID NO: 529474 - DNA, 607 bp, Homo sapiens
  misc_feature (63)..(63): n is a, c, g, or t
  misc_feature (90)..(90): n is a, c, g, or t
  misc_feature (284)..(284): n is a, c, g, or t
  misc_feature (420)..(420): n is a, c, g, or t
  misc_feature (436)..(436): n is a, c, g, or t
  misc_feature (482)..(482): n is a, c, g, or t
  misc_feature (495)..(495): n is a, c, g, or t
  misc_feature (513)..(513): n is a, c, g, or t
  misc_feature (566)..(566): n is a, c, g, or t
  misc_feature (591)..(591): n is a, c, g, or t
tgtaaaaaattcttcatattggttttaatcagagagtagattgtgcatgtgtgagcacccagnctactggggacgggggctctcccacgnacccctcctcctgtgtttgccagagctcccatctgccccacttcggcctttgccccgtcatcgatgattcagggcagagccagattcgttaggtccctgggaggaaggactgactgggaccagagggaccctctgggctcaggagggttgggtccctgggaggccggcagccagggccacagaatccacacgtngaccattgtgggtccctgggaggccggcagccagggcacggaatccacacgttgaccattgtgggtccctttggaggccagcagccagactacggaatccacatgttgaccattggaagtcagtctcttgcgtgtnctagaccttgttggtngcgcccttcataggggagcagggggaacgggtcttatgttcctgtncttgcttagggtnagagcttcccgcaattcntagcttattggattttcttgccttcttttggcattttaaaattaattggcctnggttttaaaaatttcaatggtgccntttaaaatttaaagtc

SEQ ID NO: 529475 - DNA, 425 bp, Homo sapiens
  misc_feature (19)..(19): n is a, c, g, or t
  misc_feature (26)..(26): n is a, c, g, or t
caatggtatcttttcctcnatataanggaaaagctagagacaggcattcccagcacagggtacaaacaaccaacaaaacacttttaaggggacatcaagactttttgaagacacagttttactctgttgctcaggctggagtgcaatggcccaatctcgggctcactgcagcctccacctccccaggttcaagcgattctcctgcctcatctcccaagtagctggaactgcaggtggccactaccacatctggctaatttttgtatttttagtagaggcagggtttcgccatgtggccagactggtctcaaactcctgatctcaagtgatctgcctgccttggcctcccaaagtgctgggattataggtgtgagccaccacacctggccctaggacataaatcttttctttgtgacagagtaaga

SEQ ID NO: 529476 - DNA, 243 bp, Homo sapiens
ttgattcctagaggtaccccgttttgggctcgtgcatgggattatgccgtgtgatcccagtacttagggaggctgaggtgggtggatcacctgaggtcaggagttatgagaccagcctagccaacatggagaatccctagctctactaaaaatacaaaaagtaagctgggcgtggtggcgtgtgcccgtgatcccggctactcgggagactgaggcaggagaataacttgaccccaggaggcg

SEQ ID NO: 529477 - DNA, 1229 bp, Homo sapiens
gtacccatgggattagaagtcccaggcatgtttgataccctccagatgatcctctgcgcgaccgctatgccatctcatgatctctccggcgggcgaatcacacatctcgttgacgtgtggcatcatctgtgctagctgccagaacacgagtctcgtgtccaaaggcgtgcatgttaccccagatgggtgcttcagacttggttatcctctgatggctcgccgttatgatgcgtcgccaggagaacggatgactgagaggtctgcttatattgccggaagggtgtcctaaaatgggctcgttgtaccatggtctgagtagggagacttagtttgtctcccgtgaactgcgttgtgatccgtcacatgcaatacttgaaacgattcaccgaggaagccaaggtagccacggaatttgaggaataccttgaattgcaatcgtaggaagtgtgatttggtagaccatgtaaagacactcaaaatctgaaacgattaatcggctggctgagatcgggcacgactttctaggaggggggtgctcccctttcgtccagtcttggcacaaagcttcggttatggcaacaggactctgcacgaaaaaagtgaaggggaatcccttacccttgtgtgtatctggagtacaaccagtcaggccttccatccttatggtgactgagtctataggcttcttctgggaaaagagtccacttcacatatgggcctagaataccccacggtgcgccctttatccaataaattgggtctagatacccatgtgtagaccgggctctctgtccgattgtttcttgtggtaaacgacattggagttgtgggcgaagttgcacagcgaggaaacgttgcacctttggactccctttccccccaaagggtgccgaggtgctacgagcgatagcacttgaccgctgtgggcagagagagaacggagtttgggggctagtttgggagaacgacttggaatcgcgtttgtaatcccaagccacagggggtttgagaggaattatcggttccaatttggaacggagagggattatattgagttgcgcgaaagattggaatcgagcgaacaggaagaagttgatggagcgagaggactggaaaagacagggagggtagtacttgagaatcccggtagagaccacatagagtgttcaaggccaagtcgacaggaaaatggattttggagttagcgcgtagggatagaacaggtggct

SEQ ID NO: 529478 - DNA, 438 bp, Homo sapiens
gctatccatatggcgggcataacatggtaccatgatcaacctgtttgtatggctcacatgcaggccatgggagcaagtgtaatgatggactataacacattgatgcagtacatacctgatgaatgcactgaagacagacattaatgatccttcatagaatgagaagattatgagattctcaagaattcagcatgatcaaacagcgagagccgctggatcgatcagtcttcaggattgaattagtgctccacagatgaccctaacgtgatctagttgcgacccacaagctaacctgctgccagtgccagtctatgtatgtgatggtgatcctgctggattgagtggcatctgagcttaccatgataacaaggtgttgactgtgatgatcactggcatgtatgatctagaaggtagatgcgatgtagggagtcgactctt

SEQ ID NO: 529479 - DNA, 130 bp, Homo sapiens
ggacgactgcaagctggaactacacacgcgcactcgctcacactacacacacgccactctcacacactctcacacacgcaccctctcgcgcatgctctctcaaagcccaatataaccaaggggaaggaat

SEQ ID NO: 529480 - DNA, 175 bp, Homo sapiens
gcgtttccttactgggctcatggtgctggctttcctttgcccagtgcacagctctcccatctggagagcttttgtgctagctcctcccctctctgtggatgttcctttcagcctcctcacacagatgtgagcgtctcttcgctggccttcaggtttcagctcacagaacacttgt

SEQ ID NO: 529481 - DNA, 263 bp, Homo sapiens
tgcctcggcttcagtggtgggactgcaggcagtgcccacacacctggctaaggtgtgtatattatggtagaaatggcgtatcaccatgttggccagactggtcttgaactcccaagcccgtgatccgccaccttggtctcccaaagttttgggattacaaggatgagctactgtcgccggcctactttaaattcttaatagctatgtgaagtgcatagtgatgtcatgctcttttagtagatcaggaatcttggaggcagaga

SEQ ID NO: 529482 - DNA, 209 bp, Homo sapiens
atcaaacccaactaatttattttattttttattttttgttggtagagacagggttttatcatgttgcccagggtggtctcgaactcctgggctcaagcgatccacctgcctctgcctcctgaagtgcagggattacaggcgtgagccaccgcacccgcccaaaatttttactatttatgtatagaatgtaagcttttcagcatgatttt

SEQ ID NO: 529483 - DNA, 138 bp, Homo sapiens
agcgcgtgcgcaatacctgaagggctcggtgagaactctcaccaggttggcgcctgaatgccttactctcagcagtcagaggctggcttgtctgtgcagatttttaattttacttttttgggccctaaggctgggtgg

SEQ ID NO: 529484 - DNA, 254 bp, Homo sapiens
agttctggtctgcagagcatatccgtcccagggggggaccaggaactagttcctggtcccccactgcgggtactctcctgttccagccttgtgaaggaacgggtttttttttttttttttttttttttttttttttttttttttttttttttttatgggcccccggggggaaaaaacccccaaccaccagggggcgggggggggaacgagagaccccccgcagcgggcagaaaaacagcgggggcaccagagag

SEQ ID NO: 529485 - DNA, 697 bp, Homo sapiens
ggataaccaaggggtgaagctagtgggggccccaaggtagaccccactccatatggacaatcgtttccgcctgctccctaagtgcttcgcgagtggacgtatcgtatgaagagtgggtctacctcttgccgggtcgggcgagcgagttttgcagagggagggtttcggggactatgggggacgagggcgggagcccgaagccgggaattccgcagttaccgagagtttcgaggagatgatgggcgtgaggtgggacagtgggaacaaacaagcctcctgtctccgaggtcgcactgccagcgagacacggagcgagggttcacgagtatgaggaactccccaagcgggccggcagacgggctcaaaacaggcagcgagacccatgagagtgatctggctccttcaacaagaggctcgcacagccacggagggaacactcacccaggtccctctcgctcccgacgcatcaggagccgccagcttcaacaggcccaagcagaatcactgccctggggtgggagaggcttcactcccagaagggtgccatctcggcgtggcagagaggagggaggcccagtaactcagggtagggcaggcaggaggccatacaagacacaacgtactgaggcgtgcacgaggactaccaacagcacatatgaccagcaacgcacaggaggcttgacaggagaacgtggat

SEQ ID NO: 529486 - DNA, 949 bp, Homo sapiens
acgagttcaggagatcgagacctggccagcacggtgaaaccctgtctctactaaaaatacaaaaacattagctgggcgtggtggcaggcgcctgtggtcccagctactcgggaggctgaggcaggagaatggcgtgaacctgggaggtggagcttgcggtgaaccgagatggtgccactgcactccagcctgggctacagagcgagactccgtctcagaaaaaaaaaaagaaaagaaatacccaccgtgacttttgctgtgaggcatgaaaatataaggaggtaggagcctgaggtgcctgtggccacccggctggaggtgggtgggccgtgcttgtcagcttgcttggcggaacgttcctttagttgggagggagtgcctttcctgaagcaatccttgggctggacatgctgatcctgaatgagtcctaagagtacgggtttcccaatacccggagaaaacagcaagcctgtgttcccagccagcgctggtggcagctgggttccaggcaggtggagccgagtggtctggagctggcagcacactctggcacctcctcaggcggttttcaagggtgggttccagccagggagccctatgcaggcgtgcatggtgcacgggaggacggtctcgggtgggtggataaggaccctccttggcctggtcctgacaggccgtgttgcttgcaggccacttttcaattacccggttctcaaaacatcaggtccccttcgctggcccacgtgttcatggggtgtcctgcaggggggacggggctggggacccctgcgctttacccaacccccaccttgggcccggccagggcgttgcggttggacccccccggcgggggtctcccctccggggtttatcgcccactgtacggggggcacctgtgtggggccgccccgcgtttttacagggtgtcgccactgtcttcccccccaga

SEQ ID NO: 529487 - DNA, 219 bp, Homo sapiens
  misc_feature (154)..(155): n is a, c, g, or t
ttattttatcagccccgccccttcctgtgtgcactgtgcactcacacaggcactgtcccatgtcagcatggcaggcacacatgcacaggtcaggcagcgtgtgtgtttgtgtgtggtgtgcgattgctgatccatcccacagggtcaccgcagnnctcgcacattcgtccatccattggtccatcagcttgtattccatgcacgcggcggtctcagatc

SEQ ID NO: 529488 - DNA, 723 bp, Homo sapiens
atcccagctctcagggaggctaagaggcgggaggatagcttgagcccaggagttcgagacctgcctgggcaatatagcgagaccccgttctccagaaaaaggaaaaaaaaaaaacaaaagacaaaaaaaaaaaaaaaaaaaaaaaaaaaaagggggggggggccggggccccgagaaaagacctttcttaaaaccaactgcgcggggggcgggcgggggccccaagagagaggaaagaggagaacaaggggcccaaaagcgggttctcccagagaggagaaaccggggcccaagagaacaagaggggcggggaattctctctcacacaaaattaaaaaaagaccccgggggggacacacaccggagagggttctgtggaacacaaactctccagagagagggagattctcggaggaggccccaaaacgagggggtctctctataacacaagagaggagagcccacaagagagagagacgcccgagaatatactcaaatataagagcccccgggccccgggggggggggaacaacaaaacaaaccgggccaataaactaagaggcgccgcgcaccacacacccagacaaccgacaacaaggaaacacaacaaagaaaagcaaccaacagggagaactacaacacccgacccacacaacgacacaccaacgcacaaccgacaccgtggcgaacgccacacacacgacgagagagccaaaaaacca

SEQ ID NO: 529489 - DNA, 859 bp, Homo sapiens
aggaaaggaggggcgacaagaggcagacctgagccaccccgatgtgagacggtgataacagaaaacaggggcattaagtgaaaggtgcaaggggaaggagttaaaagtgtttggaaaggggaagggcatcaaaaaagggcgtagttcacccgacgagagccctggcatagtcaccaacgtgacacacctaagtgaggccagagacgaataattttggtctgggtttcctcttcaagaatttaggtttgttctgaaatagaggagaaaaggtggtgaaaagacacttccgtagagtggggtcccccccctccagggaataagctggaatcttaactttttggggggtcttttttggtgttttaatgggccccgaactgtgggttaaaatttttatgtaagtatctttgcttttttgtggagctataaattttaaaactggatttgggagcctcaaatactcctccacgggtgatgtattcactgagagttttaaaacatcgtttagttttcacaagtaaactggatatgtggacctctaaagttattgagtttaagctacaaattgtgacgtcacttactggacatgtcagcatcaaccctctccaaatagctgtggtcactttatgaaggggcgttttaaagttgttgtttagcagtgacatttaatatggtcccattgcttttctttttaaacgtgaccaaaagagaataagggaccaacactattgctgccgaaagccataacactgagttgtaccaattgtgattgaggaaatgaaaggtttataattttttaaaaaaaaaaaaccaaaaccaaaaaccaaacttcaaatggaataattattcatgaagcccttta

SEQ ID NO: 529490 - DNA, 451 bp, Homo sapiens
ccagatcgcagtgacagggtatgtaacgtggcagctcttaggtattggactgtccacagtgataaaaaggttctggaataagactagtggtggtggttgcacacgattgtgaattgttggccggggcggtggctcatgcctgtaatcccagcactatgggaggccaaggcgggtggatcacgaggtcaggagatcgagaccatcctagctaacatggtgaaaccctgtctctactaaaaaaatacaaaaaaaattagccgggcgtggtggtgggcgcctctagtcccagctactcgggaggctgaggcaggggaaatgtttgtgaaccccagaggcagagctttgcagtgagccgagattgcgccactgaactccagcctgggtgacagaatgagactccgtctcaaaacaaacagaaaaaaaaaggcagacttgtccatttggaacctat

SEQ ID NO: 529491 - DNA, 489 bp, Homo sapiens
gtgtttttactgttgagttctaagagtttttttatattttagataacaatcttttatctgctatgtcttttgcaagtattttctgccagtcagtggcttaactttttaacggtagtatggcactactagatatccacatgcaaaagattgaggttagacctcttaatcacaccatttataaaaattaacttaaaatgcatccaagacctaaacttaaaagccagaagtataaagctgctagaagaaaacaaggcataaatttttatgatcttgtatcatgcagtaatttcttagatatgataccaaaatcataagtaatcaaacaaaaaacaggtaagttagacataaaattaaaaaccttaattcagcccggcacggtggctcatgcctgtaatcccaacactttgggaggccgaggcaggtggatcacctgaggtcaagagttcgagaccagcctggccaacatggtgaaaccctgtatcaactaaa

SEQ ID NO: 529492 - DNA, 845 bp, Homo sapiens
gtgcctgccggccgtgtggggtgactgtggccttcccccagatgtacctaagtgcccagccagctttggaaggccgtacaagttttcccgaggatactgtaataacgtacaaatgtgaagaaagctttgtgaaaatttccggggcgagaaggactcaggtgatctgccttaagggcggtcaatggtcagatatggaagagttctgcaatcgtagctgcgaggtgccaacaaggttaaattcgtgcatccctcaaacagccttatatcactcagaattatctttccagtcggtcactgtggtggaatatgagtgccgtccaggttccagaagagaaccttctctatccaccaaaactcaactggccttcagcacattttaccacagtgtccacagcagtcgacatcttctgtccaaaagaaatcatgccctaatccggcggagaacctacgaaatgctcagatttgatgtccaggtgggcatattatcgtgtgaaccaatctccttctcaatgtacacaacagggtacaactcattggctcgacttctagtttcgtctaaatttcaggcaggtcctgtccaatgtggagtggaccggtgggcccagagtgcagaggaacatttcttgtccatgcaaccacccacaaatgggagcagtggcataattcacggggaccgtggccatcatggtattgacgcgctgtcacagcatgctgtcaatacagggttcccattgttggagcacctctcttctgcccgcgaacattgcgcaggcatgtgggtggcaccctgtatgggaggaaatttactccagccacaaagttaaactctacaagtccacacaagc

SEQ ID NO: 529493 - DNA, 216 bp, Homo sapiens
ttaacgatgacgtcttgtacgatgacgtcacttagcgatgacgtcactgtagcgatgacgtcatgtagcgatgacgtcactgtcagcgatgaacgtcactgcagcgattgacgtcactgtcagcgattgaccgtcatgtcagcgattgaccgtcactgtcagcgattgaccgtcactgcagcgattgaaccgtcactgtcagcggattgaacctgt

SEQ ID NO: 529494 - DNA, 214 bp, Homo sapiens
gagcagaaatgccgaacaggagcgggagaaagaactggcaaaatgtcactatcaagaacgaagatctcggatgactaataatgactgagatggatatctgtcgagcagcagaagaaggcagggggcgcaaacacagtggacaatgtgatagaggcgctaattgtcctaagcaactgatgcgtgctttctcaaatatacctgtaagaactggctt

SEQ ID NO: 529495 - DNA, 401 bp, Homo sapiens
tatctcaggcgtgcaatatgcggagaaatgtttcatgttacttatacataacattagttcttatatagggtgatagataggtccatcttgggtgtgcatgagttcagatatatgtctgggattttttatgtagtgcgtgtagagcttgaacgctctcttaatagtgttggctgcttattatgcctaccatgggtgttaaattttttactcatctctacaaggtttatccctattgtccaaagagctgttctctctatggactaacagttaaatttacaaggggctttagagggttctgtgggcaaatttaaagttgaactaagattctatcttggacaaccagctatcaccaggctcggtaggttcgtcgcctctacctataaatcttcccactattttgc

SEQ ID NO: 529496 - DNA, 255 bp, Homo sapiens
  misc_feature (29)..(29): n is a, c, g, or t
  misc_feature (66)..(66): n is a, c, g, or t
  misc_feature (99)..(99): n is a, c, g, or t
  misc_feature (121)..(121): n is a, c, g, or t
  misc_feature (227)..(227): n is a, c, g, or t
aaggaagcacgtaaataagtccagcttanagagggattaatatgcttaacatcttaaaggaaaganggcccggttgcatcagaggattaagaaaatgtngcaggaggtgagatctgacccntcagcccccccacattaggtaggtcactggatctttctggcacctgttaaattggaatactagagccgagaggtggtcctgggactgggctttgtggaggtggggngagagagggagatggtagcatgtccagc

SEQ ID NO: 529497 - DNA, 244 bp, Homo sapiens
  misc_feature (31)..(31): n is a, c, g, or t
atcccaaccaacatgaagcacatggcattangttagtcttgtcatttaacatgtagttctctgtgtctggcttctttactagtgttattcatttgagaatcatctgtgcttcaagtctatcagtatttctttttatgacttagcagaattcccttgtatagttataccattcgtttattcattcatcctttgaggcacatttggtttgtttccagtttggggctccatgtgcttcatgttggtt

SEQ ID NO: 529498 - DNA, 313 bp, Homo sapiens
cggtggcttgtgaggctcaagttgaggactccacttaactccccctgtaacctggatggtgaggctgggcgcgtctgaggccgggacacccagcctccctctgactttccgcctctccccacagctcctgggcatggtcctgtccatctgcttgtgccgacatgtccattcccgaagactacacgcaaaggtccccaacgtactgaggcagcatggtatccccatctccctgcctggcccccaatctcagggctcccaggggtcatccctggctccctcctccatgcctgcctcccacttcactgcgaaaacc

SEQ ID NO: 529499 - DNA, 223 bp, Homo sapiens
tactgggtgttaccgtgggcagctgaagagccctcctttcctcagctgtttgtggtgccagccccgtccttgccctgtctattgcccagcagctcccagaagccatctctccgatgtctgggctcccttgagaatgtccaaaccccggcaaggtctgaagtctgatgtgcagaggtagctccatgacgcgagtcacggaataacacttccttttttggtgaag

SEQ ID NO: 529500 - DNA, 113 bp, Homo sapiens
atgtcgaggaaatgtgcattctccccagggaaaacggccatagattggtctctggaacaggttctagacccaaaaacggagatctaaatgctgtgtggcagtgatcttcacac

SEQ ID NO: 529501 - DNA, 115 bp, Homo sapiens
gactgcacaacgccgcgaggatgtctcaggtacagcgcgtgcacagccaggctgcgaatgtgcagcgggcgggagtgcccgttgggggctcagccggctgccagaagctctcggg

SEQ ID NO: 529502 - DNA, 103 bp, Homo sapiens
cttgcgtgtctcatacacagaatgggataggggatacagcatctggatggcctggctcctcattgggcatggttgtggaccacattacttctgctatggtctt

SEQ ID NO: 529503 - DNA, 373 bp, Homo sapiens
aaataattctgtatctctagcttaccaaagggctggagacacagacaatcagtgcatttgtgctaaatattgatgggagggaagacaacgggatgagagtgaaatacagggaaaaagagagaaggagatgaaaataggaaggtgaaaagaaggggagggaaggggaaaggaaagatcggaagtaaagaagagagaagaggcaacgatagagggagggagggacagagagagggtgagggaatgaagaaatggacagaggaaggaaaaggagaaggggaggaaggtagtaggggaggacagaagactcagaaggatggggagaaagacaaagagactttaagacttccaaagtcagtcaccactaagtcgacgc

SEQ ID NO: 529504 - DNA, 420 bp, Homo sapiens
ggggctgtacaactgggacgctgcaaaatggctgccgcaatgaatggtggcaggaggaaaacggaccgatctggcataaacgaagtggtaaccgatgaattcactcattaacatttacatgcgcatacatggaccggtatttacgaatcgtgcaccgtactgactgaaagagattgagaaattttccgtgaactagatggaaacttcggatgtgcacattgacaccaggctcaactaagctgcctggaccaaaggactaaggaatgtgccatacagaatcacgatgcagtatgtaagaaatcgtaatgaggatgaagattcaccaaataagctatttactttggttacgtatgaacctgttatcactttgatctactgactgccaatgtggttgagaactaatcgctgatcgtcagatct

SEQ ID NO: 529505 - DNA, 241 bp, Homo sapiens
acctgcatgattctgataccataaccagacaaagacattggcgggggaaaagaaaaccccaaacaagactccttcatgagcgtagacgttaacgtgctaaacccaactgtggcaaaatctaatctaacagtgtttacaaagggatggtacgacataaccaaagtagggtttatcctgattttgcagggttgatttagtattaatatttgaaaatcagtgtaattcaccatattaagctaaa

SEQ ID NO: 529506 - DNA, 451 bp, Homo sapiens
  misc_feature (22)..(22): n is a, c, g, or t
gaaattcggccattatggccgngggccgtcgacggtggtggtgactgactgaagcccgttgacaggatggttggccacagatgggggttggaattaggagatctgcacatccaacaccggtgcaccagtttgccagttaaattcaaaaaactcctggggccaggaaaaattcagcacattttttgcacaggaaacctttgcaccaaagagagttatgactatctcaggactctggctggggatgttcatattgtgagaggagacttcgatgagaatctgaattatccagaccagaaggttgtgactgttggacagttcaaaattggcctgatccatggccatcaggttattccatggggagatatggccagtttagccctgttgcaaaggcaatttgatgtggacattcttatctcggaacacacacacaaatttgaagcatttgagcatg

SEQ ID NO: 529507 - DNA, 675 bp, Homo sapiens
tcccacaccaatgaaaggactctcccggccagccagggccttttcccttaaacttttaccgccttggatagtgcaagaccggtttgggttccttttcagctggacctctctgtacaataagagtgggggaacacctccccaagggtgtaaaaacagacactacctgacgttagtagtattgtgtttttgcggtgcccattcccaacatgtctgctatatgcaaaaaactagaaatacgtcgtgcatgatcatatcaagatgtattacgctcctccttttctacggttcaaaggtaactgaatagatgtgcgaggtgatcgccctcacctgcacagggtgtgctccgagaccccagcaggtgctaaatccgcgtatagtccagaatcctgtccaggcgctgttttttcgtgtcgccacctgtgatcaagtgtgagatgtgacagcaaaactgccagtacgtcgtgcttccctcttcaaaatgtcacagatgggctctgtgttctccccgcagatattagcaacctcggcatctggctgtttttattataggtcaggagttgcccccttttcccttaaaggaagcgcttggcagcttctctggtgtgtctgagtcgccagcatcaccactgtcgtgttctgggcccattcttgagtcaacagcagcttcttggaccc

SEQ ID NO: 529508 - DNA, 446 bp, Homo sapiens
tggtaaacgctagatacatatcggaacagtgatctgataccaagatggctacgtattagtccgttttcacacgctgtaaagaacgcccaagactgggtactgtagaaagaaaagaggtttaattgactcagttctgcgtggctggggaggcctcaggaaacttacagtcatggcggaagatgaaggggaagcaaagaccttcttcacatgatggcaggaaagagagagctagcaaaagctggaaaaactggcttataaaaccatcagatgttgtgagaactcactatcaggagaacagcatggggcaaacggcccccatgatccagtcatctcccacggggtccctctcttgacacctggggattatgggtattacaattcaaggtgagatctgggtggggacatcgccaaaccatatcagctactaagtgatcgtggggttgtaa

SEQ ID NO: 529509 - DNA, 577 bp, Homo sapiens
cacgcgtcgatcagaggacatgctcagcagatccaagagatatatttggcaactttttctagaaaaggcacattgggtatcattcattacatttttgagtttttttgggttttttttttttttttggaaacagtctgtgctggttttggcccaggctgggatgtgtgggtgggcacaatcacagctcattggcttcctcaatcacccaggcctaagcaatcctcccaccttgtagctgggactacagctcacagcacaccgggctaaaatttttttttggtagagacggattctctatgttggcccagggctgggtctcagggcctccggggctcaagatgggtcctccggcctcagtttccaaagggcacagggccaagttgtacgcttggtcccttgccatcatgcccaacaaggagggttctataccttttaagtgaattggacttctcataaatgggtatatgtgggggggcaagtccttaaagcgggaattggtaaattcctccgtgaaaggtttttccatgcagttaccagtgacctatttactacaataagggagggtctgggggtggtc

SEQ ID NO: 529510 - DNA, 1353 bp, Homo sapiens
ggtgagcgggtccactacagctgttggtgctggatccccggtgctcgttcaccggcgccgattcgcacagatgtataggagcgcccttcagtgtacctgtcatatcatgcagcggacgcgacggatgtgcctctcaggtgtcccttggaggacggaacccacgtctaggtgagcaccacagcctggcagttgccagatggtaacagatatcagtcctataaagaggaaaaaggtgatcgagccatcgtcatagttgatacacatcatccatagacgagaccctgaggtacaaaagcgttccctgcatgcgaaccgtcgatgactaatatgtgggcacacttcgtacagaccctgtctgaaggtccgggtttcatgatcctccatagaaaattagctggcccaagagagggctgtgtgtcttgaaggatatcgactgcctgcacatctgggaacgtcaagtccagatttgacgtggcccggcatgtcagaatcctggcatagccattcacgtgaatcacaagactccagagcaggaactttaccgggggaggcgcaaagtgcttttccttgcctggatttactctgagaccacagaggacctggacgcatgccaactgcgtcatcaagcggaggcgtcgaatcttgcactgcttgtaaagctcgtaacccttacccaatttgcccggcctgcagctaacgatcgagatttacgtcccatccatgcgggctaactgggtgggcaccatttgtggccacttcccaagtggcaaacaagtcaaaacggggaaggcttctagccttcaggatgggcgcttttggacttggtggcgctgagacttcgtgtagagctgtcggcgaggaagtgtaccatggccgacactgccagtgggaaagccaactttcccccggtgtaaaccaccccaaggtcggcacgggacctcggggcgtggaccccggcaacatggcaaacagggaggacaccctgaccagcaaccagtgcgaaaacagaaacgaagcaggctcagcagggcagtaaaaggggcggtgaaagccaacggagggcaattcccgggaggacaagcgagcaggccccgaccccaggcatacccagcgtaattacagtcataaggtatgcgaacacggtgccagcaaggtgacaaggagggccccatgagactaatcaagaacttccgacctgacaccagtctggcaagacggccacgggcgactgctacgaagacaccaatgaaggggcaatgaagtgatccagcaacatgcacagtaacagcgtcagaatagccacagccgctcgccaagtggctcaaacaacacaacctagcagcgaccataagc

SEQ ID NO: 529511 - DNA, 546 bp, Homo sapiens
  misc_feature (510)..(510): n is a, c, g, or t
  misc_feature (516)..(516): n is a, c, g, or t
  misc_feature (522)..(523): n is a, c, g, or t
  misc_feature (540)..(540): n is a, c, g, or t
ataaagtggaaaatggtcgcctgaaagtgcagcaggggattatcgcgggctgttctggcggtaactacgaaaacgtcatcgcggcggcgaatgcactgcgcggtcaatcctgtggcaatgacaccttctcgctggcagtttacccgtcatcacagccggtgtttatggatctcgccaaaaaaggtgtggtagcagatttgattggcgcaggcgcaatcatcagaaccgcgttctgcggcccatgctttggcgcgggcgatacgccaatcaacaacggtttgagtattcgccacaccacgcgtaacttcccgaaccgcgaaggctctaagccagctaatgggcagatgtcagcggtggcgttgatggacgctcgttctatcgctgcgactgcggcaaacggtggctatttaacctctgccagcgaacttgattgctgggacaacgtgccggagtacgccttcgatgtaacgccgtataaaaaccgtgtttatcagggctttgtgaaggggnactcancaaccnntgatttacgggccgacnataaaa

SEQ ID NO: 529512 - DNA, 353 bp, Homo sapiens
tgccacaggatctgttcagtttatcctgggatggctgtataggcttcaaactttgacattaaagtgaaattataaggatttttctccaagccagggttaataataagatcagtcacaacctattcccattcagcaagttatagaaaataatagaatgcctggttcatctgttctacgtcaatcgattttcacattcacgtcctcctgcctctttcgcactcctaccattcaaccacgtttgtcccatcaacacccactctgggaatcaagacctctttcagacagacagcaatgcagataaattatcatttggacattgcttttcgtagttgaaaaaatgctttgtgaaaaaa

SEQ ID NO: 529513 - DNA, 114 bp, Homo sapiens
cctaaatattgtagccttttctgtaattaagctcgggtacaaattggcataccatggaaacttattgaactagcaattattattaaagaaatattacgattatcattgcttctt

SEQ ID NO: 529514 - DNA, 249 bp, Homo sapiens
aggaatctgaggagacgacgaccattgttccctgtggcccatacatcaaaaccggtctgagaagacaccctggtcgagaggatagaacacctttacagtggccgtgtcctcgggcctcaggctggtcatgtgcaaagacgccctgttctgtgagtcatctctgtaggtggcgaatctgcctttcaccgacgcaggatattctgtcgcgtagttcttagacctacttcggacatggccaacccactccag

SEQ ID NO: 529515 - DNA, 1416 bp, Homo sapiens
tcagtgcacctaattggaagcgccaccctagcgaatatcgaaccattgaaccttccctctacacttatcatcttcagcgaatgcgtagagttctagctgactaatccgtagaaatcggcgtgtcgccgttacactccaagacctacgtttgtcacacttctagtaaggccgtctacctgcacgacaacacataatgaacccacctagatcacaatgccgtatcatatatgtcaaaacaccagccctatggaccccataaacacggggcccttcgtcagcgccttctctaactggactcttctcggcgcgtagcacatggtgatttcgagcgtatcctacttcccagtgaacgctcccttcgagtatcgtaagagcgcgtacttaagcgcagaaagcgagcttaatccagtagtatccaagtgatcgcgccgccgagtggtatacaccgacgaaggcgcatcactaccaagggcacacccacggagcaaccaaccgtgtcccaagaacaatgtgccgtgtcgactaaacgggataaatccgtattttagttagcctcagacagtcgctttttctttcgccaggagttttgtctagagcgcttttaccaactccaggccctaggcccctaagcgcgcccgaattaagggaggggcgactgggcccccgagacatggtcgatgcagccccgtcttgaaggcccccttaagaaagcttcccactccgtaaagacagcattcccgtaatttacgtccgcaattcagggagttactcaatgcagccttgaggctcacccaataaggtcgtaataatgaaacgaacaatcggaaaccaagggtacgttcaaagccaactgggtttgacttacccaacttttcacgtggggatacctcaaaataataagcccttgtgcttaaacagggcctccagaaggtgacattgcggagatttccccgtatgaaacaggagccgacaccatcaacgcgtcaacgcaccagccacaaagccacatcacaatagacacagggacgcggcgcacgagagaaatcacacgcgagagggagccacaccacaccgacgtcaacgcaacccaccgtgatagcaaacggtcggcccacactaaggagccgtgattatgcaccaaagacacgcgcggggggtcaaaacaacagatctggatctaaaagactaactatcgtctatattaggagaaacagcacatgctgggctgaaatgacggcaccaaactacagcacagacacgcgcggccgtatcacatacataagaatcgaacgtacgccagcatagtgccgtcgccgctggtatatactacacaaccatacctgtagtgctgctagtgccgaggtctgcttatcagacacacctcatcagctctcaatagccaggctgccacagcgc

SEQ ID NO: 529516 - DNA, 346 bp, Homo sapiens
gtgtgagtggggaaagaaaacaaggtcctctccttgatcttctcatgacagtgacatgggcacgtttgggaaacacaggatttcaagttcagtgatgggggttaagatctgagggggaggcctggacatattttttgcactgactctgatggttgaggcaggtgatttagttctggagtgcagactaatcagctgaccatttgctctcactcctctgaggtttggatgcctaagaagagaggatttgagccaataaatggctatggggtgcttggaacccagtaagccctcacttctggtggaggagaggaagggcctgtggctgcagacagacctcatgtgaccc

SEQ ID NO: 529517 - DNA, 401 bp, Homo sapiens
tgtggcttgcccgtcaatccgtgcatgagcttatgtccttagataatgcactcactacagggctcagggcatctgcgtgttacagggtacatgaggtacatgagcttccgccatccatacgtttaactacatcccatcgggtaattaagtgatttagcttctttcacgtgatagatctgcatggacagccattcaaatactcgtaagcctaagacagcagatggcgtttactatcgacggcaaggtcggtgcactaagatgctgaagttggcactgcccatgtgctttccagtgtctagggtgaaccgcccgtgtatcgacagcgtcttaaaagcgggccagatctaggtacagatgtcaaggtgtctgtctctctctctctctctctctctctctctctc

SEQ ID NO: 529518 - DNA, 338 bp, Homo sapiens
ggtcgacacccgatatatgttctctaggccttttagaacacatggagttgctcctttggccacatatatgcgaatctatcagaaaggtcatattgtagacatcaagggaatgcgtactgttcaaaaacgcctgccccaccagtgtcaccctggccaaactcgcagagtctacaatgttaccccgcacgctgtccgcattgttgtaaacaaccaagttacggcgaagattcctgccaagacgaattcatgtccgtattgagcacattaagcactctaagagccgacgatagcttcctgaaccgtctgaagcaaaatgatcagcaaaacgaaagaagcca

SEQ ID NO: 529519 - DNA, 456 bp, Homo sapiens
agcgttaaatgcctcgttcgttcagtcaggttttccttgttcccgcatgttcagccaatcgtgtttaaggagaaactaacaatgaaaacggactcgttgatggaggaaaagttggaatgcagcctctggtgctgtttgagcgatccctctatcccgggtcgctgctgtgttctggaaaggcgcattgtaccctggatgcagcaggaatcctattcatcttcttcaccgatatggtctgtggactctgatgagccaaatctgacatcagttctggaacgtctagaagatactaaggagaacagttcggtgaggaaagaaaccaagctattttctcttttcctcatgaacattatatttagaaattaaatgttaagtgataatattatataaaaacatgattaacaactgtaatcttagaggaattaaagtctgggtattttaagtcctccaaaaaaa

SEQ ID NO: 529520 - DNA, 878 bp, Homo sapiens
  misc_feature (121)..(121): n is a, c, g, or t
gagcggagggggaaggggcgatcgcggcggcggcggcggcggcgaggagctgtgccttccacctctccagccccggcaggacgggggcggccgccgcgaacccggggcggggacagcacgnagcctcgaggcgcgcacccccgcccggcagcggccccgacacccggggcgagcgggaaagcggcagcggcggcggcggcggcggcggcgggggaaggatgcaggggaagaagccgggcggttcgtcgggcggcggccggagcggcgagctgcagggggacgaggcgcagaggaacaagaaaaagaaaaagaaggtgtcctgcttttccaacatcaagatcttcctggtgtccgagtgcgccctgatgctggcgcagggcacggtgggcgcctacctggtgagcgtcctgaccaccctggagcgtaggttcaacctgcagagcgctgacgtgggtgtgatcgctagcagcttcgagatcgggaacctggcgctcatcctcttcgtgagctacttcggggcacgcgggcaccggccgcgcctgatcggctgcggcggcatcgtcatggcgctgggcgcgctgctgtcggcgctgcccgagttcctgacccaccagtacaagtacgaggcgggcgagatccgctggggcgccgagggccgcgacgtctgcgcagccaacggctcgggcggcgacgaggggcccgaccccgagctcatctgccgcaaccggacgggtaccaacatgatgtacttgctggctcattggggcccaggtgctcctgggcatcggtgctacccctgtgcagcccctgggcgtctcctacatcgacgaccacgtgcggaggaaggactcctcgctctatataggaatcctgtgcac

SEQ ID NO: 529521 - DNA, 685 bp, Homo sapiens
gccatttcgtattggccacaagaagttaattctgcagctgcgagggcaggcagtccaatatgttgacgctatttcgcctaactgaatcaggcccctgcgcgttttcgggatcaatagctggtagtacatctcgtccagcaatccaaaggtcattgaagatggagcgcaagatcacaacactttgtcttgtggtcagcaagtcgctctgagacatcttcgagccctagaatggtcgtgctgtcgattcatcccgccagacggtcactgctgtggtcaatgctgatcgcctcatcgaacactttctcctaaagacagtttccattaaactcgctctgactgtccttcccatatagtgtggcacggtaaagataatcaatccccatgctatgatagagctagcagcctacatacaatagtatttctcgtgccagtcggcggttctcagcacagatatccccatctacagttatcagtcggttcgtatggcagtccagagcttgcttgcatccagaagtagcctaatgcatcgacacacatatgctcagcgttcgcatttgctcagatgctcatgtaattccgtctcatcggcgtgagggctgtgccaacatgcgcatggacccagtgctggacagcgtagtgtcgcagacaatactcgtagctagcaagcccaagctgagccggacac

SEQ ID NO: 529522 - DNA, 398 bp, Homo sapiens
  misc_feature (358)..(358): n is a, c, g, or t
  misc_feature (361)..(361): n is a, c, g, or t
  misc_feature (398)..(398): n is a, c, g, or t
ttgtcaaagcccaaaagaacacttaaccctgttgcctaaaaagtactcatccctcccaccctctccccagcccaaggaaagagcccagtggaggcccctgacccttctccccgggaacacgggccccaggaagtgcggagccagaagtggcaactgcaccccctgaaaaggaaataccttcattggatcaagagaaaaccaaacttgagccctggtcaacatggcaaaaccctgtctctactaaaaatacaaaaattagccggttgtggtggtgcacgcctgtagttgcagctatttaggaggctgaggcaggaggatcactggaacccgagaggcagaagttgcagtgagctgaganttncacggcactccagcttgggcaacagagccagactccn

SEQ ID NO: 529523 - DNA, 587 bp, Homo sapiens
cggcccatcgctgtttttttttgtgtgagcagcaaggctgtttatttcacccgggtgcaggtgggctgagtccgaaaaaggagtcagcaaagggtggtggattatcattagctcttataggttttgggataggcggtggagttaagagcaatgttttgcgggcagagggtggatctcacaaagtacattctcaagggtggggagaattacaaagaaccttcttaagggtgcgggagatttcaaagtacattgatcagttagggtgaggcagaaacaaatcacaatggtggaatgccatcagttaaggctattttcacttcttttgtggatcttcacttacttcaggccatctggatgtgtaggtgcagatcacaggggatatgatggcttagcttgggctcagaggcctgacacctgtagtcccagctactcgggaggctgaggcagaagaatcacttgaaccctggaggcagaggttgctgtgagtcgaggtcagcctgggtgacagagtgagactccatcttagcgttcatcttcctttccttcaatttcattgtttcttctgtcattcatataagagctaatat

SEQ ID NO: 529524 - DNA, 146 bp, Homo sapiens
catcgatactgtccaatacaatatactagaactatttcatctccccatcatgtctgccttctagttgccccaaaattatgtgagatgctagaagttgtatgacctgtgattgttcttgcttccttgtgtccttacgtacgagtaca

SEQ ID NO: 529525 - DNA, 207 bp, Homo sapiens
  misc_feature (82)..(82): n is a, c, g, or t
  misc_feature (140)..(140): n is a, c, g, or t
  misc_feature (203)..(203): n is a, c, g, or t
ggatacaggacgggcagctacaagaacagccagtgtcctgaagtcggactcggtcaatgtgggagcgggcttgctcgcgaantacggtgggtcagttaatacatagggtgactgatagaccgcattcgcgagcaagcccnctcgcacattggatcagtgtcgtctggtcgacctggttccaacaaaaaagccccggctgattnatcg

SEQ ID NO: 529526 - DNA, 564 bp, Homo sapiens
  misc_feature (57)..(59): n is a, c, g, or t
  misc_feature (61)..(61): n is a, c, g, or t
  misc_feature (72)..(72): n is a, c, g, or t
  misc_feature (76)..(77): n is a, c, g, or t
ttggcaaacgtgctgctggcgggcaaggcttccggcgccggacagccctgccactcnnngnccgccttttcnacgnngcgcgcgccggcagccccccgccgccgcccccgccgcctcccgcccgcgacggcgagaacacccagcccaaacagatctgcaccttctgcctcagcaaccagagaaagttgagcaaggaccgcgacagaaagacagcgattcgcagttaggaggtggccggcagcagccaggaggcagacgctgctgggggaggtggacgcccggggtgactgcagacagcccccaccttggacctgagctgggcaaggcccaccgcaagcatgcccccaggccagccctggctgcgagcggggccgagggacagacggacgtacagacaggcgccggcagcgggactctgcgctggccccagcacctgcccgggcccactggaactttctgcgctggcttttcttccggccactgtgtgatggcatcttgtgtttttgatatgataatataaagtctgaaaattttgtataattaaaaacaaaacagtatcttcca

SEQ ID NO: 529527 - DNA, 184 bp, Homo sapiens
tttttagatgtctttccattattttaattaattgaagcacagagaaacagaggcaaaatgattaaaaaatttatgtttttagacagggggttggctttacaccaacgaaaaagaaaaacacgatgaataagcttttgatcttacattttctttcccttaatttctcatctggtatggctggaga

SEQ ID NO: 529528 - DNA, 144 bp, Homo sapiens
ggcggtccgtagccgatcaactgagaaacagcatccaggttatttattcatttatttgagttgagaatctccctctggtcatccaggttagactggattgctcacttggcagcctcaaactcctggcttcaggtgatcctcctc

SEQ ID NO: 529529 - DNA, 665 bp, Homo sapiens
ggagtttatttttctctttcgaaaacgtcctgcacggccatggggttggcttgaacccacctttggggggttcgatccctcccttttggtctaaattaatgtatccgggtcctccaatgtgtggtagggtgggggccactccatatagtcactcccagtgtttatgagagggtccttctacctataaggacctttcccgcttcaaaccgaaggtcttctccaaatcatgaaaatcattaatatcacctgctgtcagagaaaatgaatgaccctcccgatgataggatgtccctgtggcgtatgcatcggggaagccgagtaccgtccggggcatccccggataggccgccaaagtgtgggggacaaagaaaagttaacgattaacccgcccgctgaatagagaccccgcggccccagggactctacggcggtagcgaatacgcgacaacgggatgtaaccccgggcaacaataacggtggcccaccgagcgacaggacacccccgcgtaccgaccgacgacataacaagggccaccacatcagcacgggccatcccgcacacgcggcgcaccacaccaccacaggtcccatgtcccacgccaacggccaagagaaggacgcacaacaacacaccgaagctaaggccacacaacgaggcacacaga

SEQ ID NO: 529530 - DNA, 321 bp, Homo sapiens
  misc_feature (11)..(11): n is a, c, g, or t
acgatcccctnagtggtcccgatgcgggattcaaggctgttttggagatggagacgtctgttgggtgagcagccttcttaatttcaatcgcttctgaaggggtgcccaagcccatggcctccagctccttctgggaggatttctctggcacctgcaagtgtgactcttggttaggggccagtccttctgggacaggatgctggtttttcgcagcagtgttcacaagggcttcagtctcttcaaaacttgaccctgaacacggtgtcggggactctgacatgcggacgggagatgacttgacagggctctcctgaatcatct

SEQ ID NO: 529531 - DNA, 431 bp, Homo sapiens
tggtcagattaacatcacatttagattggtcctatgcaaacaaatgcaattgattgcgtacactgtatactgtaaattattgtatctacgaccgttcctaaaaacagcaattatggtataaaaagaaacattataaagacgtaaattattaaaccaaatgccaaccagtattcttataatattactagctgctacccgtggcttcgcccacgattaaaatgaagattattagtcttatttcgttcatatcattatagtttgtaatataaatgtaaacaaagaatatgacacttcattcaaatcaaaatattcaaaagacagatgattatgttgcaaaagtttctaaaacatatgttgattcagtagctttaattttaaccatatcatatttataggtcgacgcggccgcgaatttagtagtaggcggccgc

SEQ ID NO: 529532 - DNA, 531 bp, Homo sapiens
  misc_feature (5)..(5): n is a, c, g, or t
  misc_feature (7)..(7): n is a, c, g, or t
  misc_feature (9)..(9): n is a, c, g, or t
  misc_feature (398)..(398): n is a, c, g, or t
  misc_feature (404)..(404): n is a, c, g, or t
  misc_feature (409)..(410): n is a, c, g, or t
  misc_feature (418)..(418): n is a, c, g, or t
  misc_feature (431)..(431): n is a, c, g, or t
tccgngntngcggccatcttagcggctgctgttggttgggggccgtcccgctcctaaggcaggaagatggtggccgcaaagaagacgaaaaagtcgctggagtcgatcaactctaggctcccactcgttatgaaaagtgggaagtacgtcctggggtaccagcagactctgaagatgatcagaccaggccaagcgaaattggtcattctcgctaacaactgcccagctttgaggaaatctgaaatagagtactatgctatgttggctaaaactggtgtccatcactacagtggcataatattgaactgggcacagcatgcggaaaatactacagagtgtcacactggctatcattgatccaggtgactctgacatcattagaagcatgccagaacagnctggtngaaanntaaacctnttcacctacaaantttcacctggaaaccttaaacctgcaaaatgttcctttaattaaaaatttgccttgtttttaggacctcgcaaaaaaaaacacatcaacaaaacaaacac

SEQ ID NO: 529533 - DNA, 231 bp, Homo sapiens
  misc_feature (70)..(70): n is a, c, g, or t
agaacctgccggtgggccagcgggccaaggtgttttccctgcgctacaccctgaccaatgtcggctacgncaccggcccgatgctcggcgtggtgattgccgggcagatgcccctggcaccgttcctgatcgccagcgcgattgcctttggcagcctgttcctgatgatcggcatcccgccgacccaacgcgacgacagcaacaaacccttaagttttctcagcaccactg

SEQ ID NO: 529534 - DNA, 291 bp, Homo sapiens
  misc_feature (5)..(5): n is a, c, g, or t
  misc_feature (7)..(7): n is a, c, g, or t
  misc_feature (9)..(9): n is a, c, g, or t
  misc_feature (289)..(289): n is a, c, g, or t
tccgngntngcggccatcttagcggctgctgttggttgggggccgtcccgctcctaaggcaggaagatggtggccgcaaagaagacgaaaaagtcgctggagtcgatcaactctaggctcccactcgttatgaaaagtgggaagtacgtcctggggtaccagcagactctgaagatgatcagaccaggccaagcgaaattggtcattctcgctaacaactgcccagctttgaggaaatctgaaatagagtactatgctataatggcgttatcacgggatcctctgacancc

SEQ ID NO: 529535 - DNA, 834 bp, Homo sapiens
  misc_feature (45)..(45): n is a, c, g, or t
  misc_feature (85)..(85): n is a, c, g, or t
  misc_feature (99)..(99): n is a, c, g, or t
  misc_feature (108)..(108): n is a, c, g, or t
  misc_feature (139)..(140): n is a, c, g, or t
  misc_feature (143)..(143): n is a, c, g, or t
  misc_feature (146)..(146): n is a, c, g, or t
  misc_feature (195)..(195): n is a, c, g, or t
  misc_feature (225)..(225): n is a, c, g, or t
  misc_feature (245)..(245): n is a, c, g, or t
  misc_feature (265)..(265): n is a, c, g, or t
  misc_feature (268)..(268): n is a, c, g, or t
  misc_feature (270)..(270): n is a, c, g, or t
  misc_feature (290)..(290): n is a, c, g, or t
  misc_feature (292)..(292): n is a, c, g, or t
  misc_feature (376)..(377): n is a, c, g, or t
  misc_feature (382)..(382): n is a, c, g, or t
  misc_feature (417)..(418): n is a, c, g, or t
  misc_feature (442)..(442): n is a, c, g, or t
  misc_feature (447)..(447): n is a, c, g, or t
  misc_feature (450)..(450): n is a, c, g, or t
  misc_feature (485)..(485): n is a, c, g, or t
  misc_feature (493)..(493): n is a, c, g, or t
  misc_feature (497)..(500): n is a, c, g, or t
  misc_feature (532)..(532): n is a, c, g, or t
  misc_feature (577)..(577): n is a, c, g, or t
  misc_feature (581)..(581): n is a, c, g, or t
  misc_feature (589)..(589): n is a, c, g, or t
  misc_feature (636)..(636): n is a, c, g, or t
  misc_feature (678)..(678): n is a, c, g, or t
  misc_feature (702)..(702): n is a, c, g, or t
  misc_feature (707)..(708): n is a, c, g, or t
  misc_feature (717)..(717): n is a, c, g, or t
  misc_feature (746)..(746): n is a, c, g, or t
  misc_feature (793)..(793): n is a, c, g, or t
tcttcacttcgtacaaatacttctttaagctgcctgaagcttcangtattttgcaacattcttggcctcaatatctaccccctantttttcacccccgncaaatttgnttgtatcacggtaatttggtgcaagagagtnncanccntatgtatttaatccaagctttgagcgccacattaagatttaaggattanacaaacttggctgtatttccactgcaaccngctaaaacggcttttgcacntcattctgccagtagcaatnaancnacgactaaatttactaaatnangcattgagtttgatgtctattcgtgtatactgtgtgtgttcttgtgcatgaaataggcctgccttctcatcttttctttaaaannaatanatgtttacatatatacattctccctcagattttannattcatgcggagtgatccacagtnataanatntggctactatgccacctggcccacagcgaaacatncaccatanaacnnnngttccaggtgtcacagccccttacattcaagngctgcactttcgtttagacacacacgtagtacatttcattacatnatcncgcgtggnaaggactgggttttctgtagatgtcgaattgctcattccaaaacgcnaaaatgctttgcatcatgggagttaggaataatggcacccangaatcttgtcaagaagctcttttntgttnnaaactttcncaagtttgcattgacctccagggtaatanattttcaatgggttttcattggacagttgggtatgtttttaagcttnttataagggacagatccagctcaaccagggggtgacacatt

SEQ ID NO: 529536 - DNA, 224 bp, Homo sapiens
  misc_feature (5)..(5): n is a, c, g, or t
  misc_feature (7)..(7): n is a, c, g, or t
  misc_feature (9)..(9): n is a, c, g, or t
tccgngntngcggccatcttagcggctgctgttggttgggggccgtcccgctcctaaggcaggaagatggtggccgcaaagaagacgaaaaagtcgctggagtcgatcaactctaggctcccactcgttatgaaaagtgggaagtacgtcccggggtaaaaacaagactctttaagagttattcaaacaaggcaaaacccaaatttggtgcatattctctaaaa

SEQ ID NO: 529537 - DNA, 701 bp, Homo sapiens
ggaactgcaaagcttggctgaggccggggattagaggatactcacaaaccctgcggaacacagtgtctgttcagcaaactaaccagcattccctacagcctagggcagactagatagtataggaagtctggaaagagaaactaaaagacagaatttgagaatccttggaccactcctgtcgctgtagctcagtcatcaagagcgaagagagtctgggttagctctattaagatggggaaaatgtgacactatcgcagaaccactcaggtccacctgtatggagcccgcgagtgctggaagggagagaaggctgttcttctgtggttcaatgcgtagaggctacaggggttagcctggactaagaggcgatccgtggcttcggagcgtattacacactgaggagaaaaggatctaagggaagatcactgtagttcatgttctgtttggctgtgtacactaccgctatggaaatgtctgctggtattgctaattcacacaggtgatgagagtgcctgattgataatatataaagaagaatagacaacttgcatgtcttgctatgtaatcgtgtgtcatggatcggatctgtacatgacggtacataagggtggatggttcctcagggctgaggggcccaatgtatgtgtggtgtgggtgtgggtgggaatgaggtggtgggtaaagaagggagagagaggtca

SEQ ID NO: 529538 - DNA, 299 bp, Homo sapiens
  misc_feature (5)..(5): n is a, c, g, or t
  misc_feature (7)..(7): n is a, c, g, or t
  misc_feature (9)..(9): n is a, c, g, or t
  misc_feature (267)..(267): n is a, c, g, or t
  misc_feature (280)..(280): n is a, c, g, or t
  misc_feature (290)..(290): n is a, c, g, or t
tccgngntngcggccatcttagcggctgctgttggttgggggccgtcccgctcctaaggcaggaagatggtggccgcaaagaagacgaaaaagtcgctggagtcgatcaactctaggctcccactcgttatgaaaagtgggaagtacgtcctggggtaccagcagactctgaagatgatcagaccaggccaagcgaaattggtcattctcgctaacaactgcccagctttgaggaaatctgaaatagagtactatgctatgttggcntatcgagggtacnaactcgagtngtatactgc

SEQ ID NO: 529539 - DNA, 886 bp, Homo sapiens
ggctgagaacatatttaacagacaaatggtggcccggagtttgttcgataccttgagggaagtctgcgcatgatgatccgagattgtcttgctgttttggaaagacattacgcagattggccgatgattcacgaaccaacatgatgagcagcggagcatgatggaacaggtgcctcacatcgcaactgtttcggtcactaagaaccggtcttcaataccatagtgctgtgtctctcaaaagttcttacgtaccgtattgtggctctagatacgcttgcgaagatcagaactaatcaggctgaggaaaacaagtcagcgcagactttgcctgactctcttggaagcaggagctcattgaacgatttgatgtggagaccctgtcttgaccaacaagaaaccatcatcacagcacacatctagactagtgctttgactacaaactgtgataccatggcctagcgcgagacattgacacacaaaatagagcatcacagttcccaagggctacaaagtacttactatctgagcctttaacaaaaagcaggatcgccagccactgaagaggaaccaaactggtacccatcgcccatgactagaagcatcaacgacgtcatggcatcatccgtgatgtgcaagacaactttctttggcaggcttggctatcttatcccactaccgcccatccagcatgctagggtacagacaagtgcggattataaagaatctccattcttgctgaaagggcttttaaagacatgggacttgacgtacctggatagcctgcctgggacacccacgcttgtgaggaatggggtcactccagaccattcagaatccaactgcaccactgcgctaaggcctcaaagactcggagatctggatcaac

SEQ ID NO: 529540 - DNA, 431 bp, Homo sapiens
accgggccgcattgagagtgccacgttttgccttccggcggctgtgcttcgcacacatgcctctgcccgtgcttcggagtatgcgtctacttgtgtgtacgttgtgtttatgtatgtgtcgtctctgtccccaccagacttctgctttagctgccaagtttctgttacttgtattttttaaaaacatgctactccgataggtatttctgttacttctaagtcacagaatgacactgataaatcatacatcaaaatagactattaaatctttaatgttcaaatacaatttttctagaaaagtaaaacgcagaaggctggaaggtgtgaccggcactccactctggccttgctccttaactgcaaagtcacacctgctgactgggcgcttaccctaccccgacaccaggaggatgccagtctacgcctcgaaa

SEQ ID NO: 529541 - DNA, 228 bp, Homo sapiens
ggctggagaggccggccgagtgtgcccgtaccaccctgctctgtctgagaggatggcctgggttccagctgtcacggtcgccagctagagactgctcgtcacagatgaaatgatgacaggacgtcaactcgccctatgcagtcggaagcggggtacacacaaacactctagaagccacacttagcagggatttccagccttgcgggcgaggagagggtgccaccagct

SEQ ID NO: 529542 - DNA, 326 bp, Homo sapiens
  misc_feature (5)..(5): n is a, c, g, or t
  misc_feature (7)..(7): n is a, c, g, or t
  misc_feature (9)..(9): n is a, c, g, or t
tccgngntngcggccatcttagcggctgctgttggttgggggccgtcccgctcctaaggcaggaagatggtggccgcaaagaagacgaaaaagtcgctggagtcgatcaactctaggctcccactcgttatgaaaagtgggaagtacgtcctggggtaccagcagactctgaagatgatcagaccaggccaagcgaaattggtcattctcgctaacaactgcccagctttgaggaaatctgaaatagagtactatgctattgaaacttctaaaactagggctattgaaacttcgaaaactagtgctattgagacttctaaaactag

SEQ ID NO: 529543 - DNA, 371 bp, Homo sapiens
gtcgctgcggtgtcttcggccggcatgtcccccagccagaaggggatgctttcaagacagcatcagctgcagtagtatcaagaagatgtaagcttgccctagggttgcctgcataagtatttgggtttctcaggcagtgggcagggccatagagttcccaagagattatgtcttttctctcagaaagaccatcaggtgaaggcagggttaggcatgtctgagagcagactctctttgggttgggcttgttgtggccactgtggcggatgggggtgtggctctcaggccaatggagttatgtttccagggggattacagctatctctgctgcatcatacaggtcaccagggaagtgggggaaagccagcaat

SEQ ID NO: 529544 - DNA, 113 bp, Homo sapiens
gcgaggtatagtaagttataccgaccgagagcttccccgattatagcagcgatcgttactgccgtgactggctaacctgtgccttgcatcagaaagtggtcgatcacgtagcc

SEQ ID NO: 529545 - DNA, 684 bp, Homo sapiens
cattggtaaaacaggattacctagcttgcctgaactttgggcatggaagaaagactgggaactagttggagaaccacatacttatggaaaagagaagtccgcccttttatgctgttaaccagaagtcagagtgattctccccccgaaaaagtttaactatgttgtaacgccagcccactgtaaatagtctattttgaaattccctatgctaagggtgcccttaggatccattgtggtcgtctgtttatcccagctttacattttttgctcccaccatttgaatgccaaagaatcttgtgaagtctaccaggagagaagatgggatataattttcccttctgacaccataatttggggcccaaaaagaaagtcttaagagtttatcttttctctgctgatacggttgcttgataaagacatctccaaatgtgttacccatgttttaagaagctttgtgtgatattcttcccaatgtagttacccaatataatatggtagaaaaggctaaatcatacttaatgagccaattgaagtaagcttttaaagtatatttttcttttggtgaaaggcccatggagaccttgtgaatttaagtgaacctttgcctcacagatgttaactataaacaccctgcataccatttttttttggataaccaatgaatgcttattgctgcatgatgta

SEQ ID NO: 529546 - DNA, 772 bp, Homo sapiens
cgcgctacgcgcccgtggggcccccgctcggttctccttggatttgggcggggggaactctgcggccgccccctctctaattgtgttggtctggtttgccgccgacccgcgtcgtttatacgacaagggtttccgccgctcttcgccggcgtcatctctcgcgcgacactcattgtacccccgcgcgcgagattttcgggggcccctctctgtcgcgccgcgcgcgagttaaactcacgctgcgcaggtaccatcgctccccccacagagattctcgttagacagaaaaataggcggttctacacgacaccttggtaggtaggctataatatgtcactacaacagtatgtatgtaatggccgtacataaaccgtagacttataggtgcaaaagacatttgtgcgaggccgatcttcgtccgcgcataggattgtctagcaaagcccgtccccgtgtagaggattgcttccatttacccgccatgtagagatatcattgcgagtggagagcggcaaggccctcgcccggttctattcgccgcggtggataatcgaaacgtgtctcgtagcacccactccgcgcatgacgtccgtggtaaacaccacaccggagcagtcttgttgacaatagtgctcccgccacgcagctttgcgccgcagctctctgtagtattgcttttgtaatctacctaatgtacaccttctccttcgcgggcactcgctgtggccaccatagaacccgccagttattcacacacaagcaaacaaaacac

SEQ ID NO: 529547 - DNA, 374 bp, Homo sapiens
gtcgcagcagctcagcagggatcaatacggcttaacttcgcgctgacctttgggtctctctctcatccgttctcttggctaaccttcattttggtgccaaaacccaggaaggggataggctctggctgggcgtccttagaggattctttctctctctctcctatcatcccttacccagccaacctccccttcccgaacctgctaaagaccctaaggttctcccaaagttttcccattgttggccacctcatccaccatcaaagcctctggagagggttttttacagggccgtgttagagccttcacccatggtacagtacaagatatgatgctactccgagaataccgacagctccagggaccagagagtccct

SEQ ID NO: 529548 - DNA, 284 bp, Homo sapiens
tgaggggtgactctagcaggatccttacatacgataaaacctaagaatccaatgtcattatgggtcatactatgcctatatatccaaatggttcttttttacctgaatagtaggttacaatgggggagattattccgaaccctggtaggatgagaatatatacttctcgggtgtcccgaaaaatcagaacaagtgttgataacaggatagggtctccaccacctgtctggatcaaacaaaggttgtgttcacggttgcggtactgtcagatagtatatgtaatt

SEQ ID NO: 529549 - DNA, 536 bp, Homo sapiens
ggtcttcccctcgtgtggccctgagcgggactgcagccagaccccctggggcgccagctttggagcgcccccgacagctgctctcgggagcctgcatcccgacaccctgagcccctgctggagcctcccgctcccgtgtccccggcatccagggctccctccgacatccccacgacgcagtcgagcacggcgacggaagagagcgccgaataaacaggggaacgagacgccatgagaacatgacagggaaaagagcagaagagaggatgcctgaaaggtaggcaagtacaacatgagacagagacgggagaaagaggagtatcaaaacagagcagtgccaccacagcacgctaggctagagaaaacacaacaaacaccagaatacgggaccctacagtcggcatacaggcaaaccgtcactgcgggacggcagggagcgccacatgtgacagacatagacgctggccacgcatagcaacgttgcgctggagcaaacagtgagagcatgcctgcccctgacaggcccatgcagaacc

SEQ ID NO: 529550 - DNA, 175 bp, Homo sapiens
tcagcttactaatccgacaaccaaaccggggtgctgatccaggtgtacgaagggcgaagaagggccatggacgaaagacaacaaatctagttggaggcgcttcgaagctagaagcgggcatcaccttccggaccacccaaggggacgttggcccccaggaatcgacgggtgaacc

SEQ ID NO: 529551 - DNA, 436 bp, Homo sapiens
acgctagagtgatctccggcttcctgcttctgccgaatacagaccgttaaagctgggcctcacaattcttcttaccttcttgggttgttaacgcagcgaggttgtcccaaatagttaccacagggatcactggccttgtggcggccaagcgttcatagcgactcttgctttttgatccttcgatttcggctcttcctatcattgtgaaccagaattcaccaaacgttggattgttcacctactactagggacacgtcgctgtgtttcagacattcttgattggagtaacttttcgcgctactgatgatgtgttgttgccatggtaatcctgctcagtacgagaggaaccgcaggttcagacatttggtgtatgtgcttggctgaggagccaatggggcgaagctaccatctgtgggattatgactgaacgcctcta

SEQ ID NO: 529552 - DNA, 392 bp, Homo sapiens
gtccagcctgtggcctctcttgcacaaaggcttcgttctgattaatggcactcatgtcttggaggcatggattgtattagaccttgtttaaaagtgctcgctatacattcacttcccctggaagtgcaccaaactaggacgagaggaaaaaagggagcaagagaaaggccctgcatttggaaagagtagacagaaaagctttttttcataaatgctttctgtaactttctgtgctcttcaaggcattatctctgcagagctcctatgggagagcatggggaaaaagtgaagacagacgtcttgggaaagaaaatgggtttccctgccaaaactgggagatggtgctggctctcttggctttttagaaactccaagaaatctgctgacatttt

SEQ ID NO: 529553 - DNA, 110 bp, Homo sapiens
gaaggtaaacaacccgtactggtttctgtcagataatctgtacttgtatattttgaatacttaagtaccactgaatggttgccatgtctttgagcacttgatgttactga

SEQ ID NO: 529554 - DNA, 203 bp, Homo sapiens
taagcatgctggtgtgttcgtgggatctgatcgcgggttattgaatcttggccgccagttccggaatgaggggattgttttgacgcacaatcctgagttcaccacctgtgagttctacatggcctatgccgactcatcacgatctcatggatattcacggagaatgattgtttcagggattcgtagatgcatagtacaggctg

SEQ ID NO: 529555 - DNA, 748 bp, Homo sapiens
gaccctgtggaaccctggctgtgaccatgcatgtattgccacccacgtggtggtggagaacgaagctatgagctgtgagcagtgactgagccggcgtcagctgggccgcgaggcctttctacatggaagtctgtaagtgtgaacagagtgataaaggtgacctggatataccacacagttgaacgaatgcttgtgagctccgttgagactgggatctgagcctgtttcaccatggaccctaaactctcagcagctgtgacagaggcctttgtcctggcttcacgaggaaggcatcatctatcgcagtacccgccttgttaactggtcctgcaccctcaactcctggcatctctgacattgaggtgtgataacgaatggatgcttgacaggtctgcaaccctgctctccgtgcctggcatacactggagaagggtgagagttcggagtcctcgtgtcctttgcctataagtgtccacaggcctcaggaatagccgacgacggaaggtggctgcgtggcacagtaatctcacgcgatccgaggaacatattcgctgcgaagaatgtgcttgtactgtagtgtagacccccacatgattccaccagtacatgcgacctgaacaccgtgacgaagcgctgatccacccaactcctgccaacggagaccgatttccactagccgtacgacttacttcagtcgaacttggacatttcctgcatgtctcgctgatcactaccccgattactaaca

SEQ ID NO: 529556 - DNA, 1297 bp, Homo sapiens
gcggccgcctactactactaaattcgcggccgcgtcgacaccagcagcagcaggagggccccgagggccttatgagaaaacctgtgtggacatcccttggtgtacactaagacagagcagagcccagcgctcccaagccttcctccttccagcttctacctccatgctagcattgctggtgttagagaggaattaacttcctggtctgtgcccttctctagaagaatataagatgctcctcctcctcaccccttctcagcctcctcccaagtcttcctcttctgcaccacccccgagtccaaacccacctcttgccccagcattcaggctggaaaacactgatgtggactcagtatgacaactgagatgggggaagccagacatgtgaggacgctgtcctccgagaggtgtccccggctgttagccagctgtgctgtggtgctgtgggtctgtcataccctcccttgcttctgttcacactgggaggcccactcctggctcacctctccctctcagggacccacgtgggagcctggatccctggactgtcctgggcataggtttcaggggcctcctttgttgtcatcagaacccagaggaattcttctcctaaaaaatacgtatggcataccaatctgtgcggggcagtgtcctaagcacttagactacatcagggaagaacacagaccacatccctgtcctcatgcggcttatgttttctggaggaaagtggagacacaagtccttggctttagggctcccccggctgggggctgtgcagtccggtcagggcgggaggggaaatgcaccgctgcatgtgaaccttaccagcccaggcggatgccccttccccttagcactaccctgggcctcctgcatcccctcgcctcagtgtcctcccaccttcaaagaatgaagagccccaggggcccagcccctgtgcccggggaaccaggcagccttccagacctcgggggcggaggcagactatgagggcaggcttgagttgggtgacacggcccattccctctcaggccagatcaggtcacccgggcctctgacccaggcctgtcacttggagaggggcaaaagggagaggggcttttcctagagaaagagaacaaggagcttgccaggtttcatgtagccgacacacgtctcaggatctcaagtccagatgggcctcacactagtagggccaatgcccaaaatagggagtcccagtggggggccaaatgaggagggacacagattctgggctgggatctcgtgtgctagcggccaatgacaatccagt

SEQ ID NO: 529557 - DNA, 358 bp, Homo sapiens
tttgaagatctggtggaaaggcagccacatccagggacggcacatagtcctcaaaagcggggatcggctcctccagcatatcggtcccaactttatcatcttcaactacacacggtattggaagttcctaaattcggtatcccaggggaactagttaagatgagccccagactaagccggcggctggaatggcttctggacgcactcctctaattccgccatatctgtctcatcatcccagggtttcacatctagtaagagggaagactgggcaccaggtgcaggttttggggcttccttggatccaggtggggcaagaggttctccccttagcctctgggcttcttcatttccctcc

SEQ ID NO: 529558 - DNA, 185 bp, Homo sapiens
gggggcccccccccggggggggggggcccccccccccccccccccccggggttttgggggggggggggggttttttttggggggccctttttttttttggggccccccgggggggggttttgggtttttttttttttttttgccccccccccccgtttttttttttttaaaacccctttttttga

SEQ ID NO: 529559 - DNA, 755 bp, Homo sapiens
  misc_feature (7)..(7): n is a, c, g, or t
  misc_feature (453)..(453): n is a, c, g, or t
  misc_feature (480)..(480): n is a, c, g, or t
gaacacnatggatctggtgctaaaaagatgccttcattcatttggctgtgataggtgctttgctggctgtgggggctacaaaagtacccagaaaccaggactggcttggtgtctcaaggcaactcagaaccaaagcctggaacaggcagctgtatccagagtggacagaagcccagagacttgactgctggagaggtggtcaagtgtccctcaaggtcagtaatgatgggcctacactgattggtgcaaatgcctccttctctattgccttgaacttccctggaagccaaaaggtattgccagatgggcaggttatctgggtcaacaataccatcatcaatgggagccaggtgtggggaggacagccagtgtatccccaggaaactgacgatgcctgcatcttccctgatggtggaccttgcccatctggctcttggtctcagaagagaagcntgtgtatatgtctggaagacctggggncaatactggcaagtctagggggccagtgtctgggctgagcattgggacaggcagggcaatgctgggacacacaccatggaacgtgactgtctaccatcgcggatcccggagctatgtgctctgtcatccagctcagcttcacatatgacaggtgcttctcggacggtccagtggggctggatgaggaacagcattctgaaatcagcctgacttgccctcagtcatgacctagggtattgctaagtgacctctacacggaatgggacagagggaac

SEQ ID NO: 529560 - DNA, 149 bp, Homo sapiens
tgaggccacaatcatggctgaaggcaaggagagcagtcacatcttacatggatgacagcaggcaaaaagagagagtatgtgcaggggaactcctcttgttaaaccatcagatctcgtgagacttattcgctatcatgagaacagcatga

SEQ ID NO: 529561 - DNA, 171 bp, Homo sapiens
agatacgatcgagctcggtaccgcttatgtgattttgagagagaggagagtcgaaatctcattgatgaagattccactattacagagcagttgttgctgttattaacttagcgttgagacaatatttttcagagcacgaagtcaattcattcacttaatctaatactcatg

SEQ ID NO: 529562 - DNA, 888 bp, Homo sapiens
gttcagcccggacgccagcagccccggggagccaggcggcggcgccctgtgcccgggcgcgtgggtccgttgccgtgggcggcggagacgtgcgttttgccggggttctgggctccgggactgcggcggggctgcggcgctcggccgcccggggaacggcggcccatggcgcgcgggtgctgggctgccccacacccggtagcagatcgctcggatttctgcagccctgcgacatgacggggcaggtcagagccctggcatgccaccatgtcccttgacagccctgggcaagcagctgcgcgctgcagcgacccctggatgtgcccactggcgcatacacgtcatggtcgcccattctggaaacaacctacctggaaatcatgggggcacgcaacaagccatgtgacccccacagcgcacacatcggcaggtgcccgcgcagccaggatggcacaggatgacagcctccagcacggcctggcacatgcacttcccacttggcgcgctctacgagacctcccggcggcaccaaccaggactccctgctgatcaggggacatggcccagccacctcactctccgaatccacaaacctacttccgccgaaccaacgatcctgctctcctgtcacccacggatgcctacccctgactgaccaggcacactgccgccgcatgcaagcgagaaccgcgtgagttcccgcaccggccccggagacacggaccctgacaccatcgcacagagcgaatacccagcaactgagcatcgtagaacgcgcaaccactcgcacaaccccaactccaacacagacgcccagtagtcgaatacgcgcacaccgccagcggtacgcagcgcccagccaccaaaccaacaacccccgcagcccca

SEQ ID NO: 529563 - DNA, 1818 bp, Homo sapiens
  misc_feature (180)..(180): n is a, c, g, or t
  misc_feature (346)..(346): n is a, c, g, or t
  misc_feature (348)..(348): n is a, c, g, or t
  misc_feature (466)..(466): n is a, c, g, or t
  misc_feature (484)..(484): n is a, c, g, or t
ataacggagctaggatccatcccaccttgaactgtgtcacactactgtatctataatagctgctgtgctgtgactccagacaattagtaaccctttagaaaacattatgaagcaacgcgaaggctatgcttagtcaatggtgatcaagagtgctcctgtctcatagtctaatgccgtgangatcatatgtgtcatgatatcatgtaaaatacatggatggctgttaagcgtgtgggatagatctatccctattgtgtaatattcttctctatcgatctgccgaatctgtatctgaaggtacctcaatgacacacgcatatcttattgtttgcatctataaatcgantncgtatgtgttctctcacatgtgtactatctaggaaacgagaacttgtggttaatttccactaaaacatcaagtgtgaactctacccatgtcggtgaccatatcctatcgagtgcgatnggagcgatcgaatagccntagctcgcggtgtagcttttggttgtcgcatgcgcataggagctaaagatatagcgtatcgaacgcatatgtcagacaccgaccatagagatcacttcctcgcagaaaattgtaacgttgtgtgcctatgggaatcccccagaacgtatgtctaatagactccttgtctttgtgtgcatattatccacctagaccttggtgtagcttgtcgtagcgattacaacttaaaaacgataagaaattagtgaggtttcacggtggcgccggtaacgatagcaaacaacagtatctcgtgtcgggtatgcgctatccgtttccatgactcaatgtgctcttttacggatgtctcccaggagaaattggaagcatttgtttggacgggggagagcacttcggttgtgcttgcgtggaccccgttccaattcctatctttgcaacgggttctcacacccggcttcccacattttagcgttctacatcctataagctctcccccgattatcacccacgctttagtgcggatttccagggggtggcccccccttttgttggcatttgggtgttttgggatccactttgtggtttgtaaattggaaaccaattgttgctttgccgcacgttccccttctcgagtttttgggcttccggatcgcattgtgacgcctttgttgaagttctctttctcaaacagcggcgtattatggggtcgagaaagggttctagcaccgcctgtttaccatttgccagttggggcatagtgcttccaggttgtgggacacccccacttttccctggcggttttgagggaggtcttcctagtgggacttgggccatttttcgtttatcccaatctccttatcttgctggctgccaacacttcggtgtcctttttgggcgtccctttgtgcggcgcttttgttcctttttctcccggcgtgaacgttggttctcttctcacacccaagtgttgctgctgggggtaccatctccgggtggtgcccccatgctgatcccccttgctgtgtgggcgggaggcgttggtgcacgcatgggcgtggttcctccccaagccctgcttttttttgttgtgtgtcccccccgctcttgctgtcccccagggcagcacgcgtttccaactgcggcggcgggaaacgctgtggtcgtcgagtgtccccacggcacaggctttggtgtgtggagacgccatcccccttgggcgcaaccacatctgctcgttgccacgctgcgccacacggcgtgcctgctgtccacgcccgtgtgtcggtctgccggccgcacccccccgtcgtgttcctgccacgcctcgccccttt

SEQ ID NO: 529564 - DNA, 485 bp, Homo sapiens
gctcagcttcccgagcagctgggattgcgggcatgtgccaccgcacctggctaatttttgtttgtttgtagagatgggattttgccacattgctcaggctggtctctaactcctgggctcaggtggtccatccacctcagcctccaaaagtgctgggattagaggtgtgagccactgcacctggctcataaagtaaactttaaaaaattaaattagccaggtgtggccaggtgcagtagctcacacctgtaattaatcccagcactttgagaggctgaggctggtggatcacctgaggccaggagttcgacatcagcctggccaacgtggtgaaaccccacctctacaaaaaatacaaaaaaattagctgggcgtggcgacatgtatctgcaatcccagctgctcaggaggctgaggcacgagaatcacttgaaccggaaaaggttgcagggagccgagatggtgccactgcactctagcctggt

SEQ ID NO: 529565 - DNA, 116 bp, Homo sapiens
  misc_feature (9)..(9): n is a, c, g, or t
gatcgctantcccacttggttgccggagccagtgataccggcgccgcttcatgagctatttgcagttacactccagtcatctacaagcacaatctgcccatcagattggactttct

SEQ ID NO: 529566 - DNA, 363 bp, Homo sapiens
  misc_feature (15)..(15): n is a, c, g, or t
  misc_feature (28)..(28): n is a, c, g, or t
  misc_feature (55)..(55): n is a, c, g, or t
  misc_feature (74)..(74): n is a, c, g, or t
  misc_feature (78)..(78): n is a, c, g, or t
  misc_feature (91)..(91): n is a, c, g, or t
  misc_feature (174)..(174): n is a, c, g, or t
  misc_feature (180)..(180): n is a, c, g, or t
  misc_feature (201)..(201): n is a, c, g, or t
  misc_feature (219)..(219): n is a, c, g, or t
  misc_feature (223)..(223): n is a, c, g, or t
  misc_feature (237)..(237): n is a, c, g, or t
  misc_feature (272)..(272): n is a, c, g, or t
  misc_feature (287)..(288): n is a, c, g, or t
  misc_feature (299)..(299): n is a, c, g, or t
  misc_feature (302)..(302): n is a, c, g, or t
  misc_feature (345)..(345): n is a, c, g, or t
  misc_feature (348)..(348): n is a, c, g, or t
  misc_feature (356)..(359): n is a, c, g, or t
ggaaactcgctgggntctccctgaaggnagagagtgagaaacccctgattgaacntggaagcaggaagtggccngggntcaaacccaccgnagtcaccatccaaaacaagattcttctccagccaacatcatcgatttccaccaccaaaaccaccctgggccacctggcggccntggaancccgagatgctgtgtacctgnaatatttagcatcatttnaggnggagctaaagaggntccgggatgactgtacatctcagataaagggggcncaggcgctggaaggnncagctggaagnagnccctgcacactatccaaggcctgtatgtgtgaccctccgcccnacnatgaattnnnnctaa

SEQ ID NO: 529567 - DNA, 1088 bp, Homo sapiens
gaggagcgcgcgggcacagggtgccgctgaccgaggcgtgcaaaggctccagaataggagggcatgatgaagactctgactggctgtgttggtgggggctgactggcatgaccgtggtgatgagctgggcaggtcctgggggaccatgacgggtctcagtaccatgagctccaggaaattgtgcaggtcagggaagtaagtacgtcacataaggaaattccaaaactgctgtcacacggggggtgaacacgagataaacgactcgtcagtacgcaaaaagacaaccgaagagcgcaagacactgctcagcaacctagaagaagcccggaggaagacagaggatgccctaaagtgagacgcagggagatcagagacaacagctgaaggagctcccgggagtgtgcaatgagaccatgatggccctctgggaacgagtgtaagcgccggactgaaacagaccggcatgagagttctacgcacgcgtctgcagaagtggctcaggcctggtcggtcgccagcttgaggagttcctgaaccagagctcgcccttctacttctggatgaatggggagcgcatcgacgtccgctgaatgggagaacgatcggacagcagacggcacatgctggaatgtcatggcaggaccacttcagccgcgcgttccgcatcatagacgagctcttcaaggacaggtgcttacacccgggaagcccagggatactagcaataactgggcttcagcgtggccccacggaggctccattttacttaccaagtccaggttggcagtagcttgatgccctttacagggagaagccttgaaatcccacgccagggtccaaccctccatggaagagaacggaagagcacaagcgcggggacacagtcaagacagcgacaagccgccgaaagagataaaaaagaggaaaacagcaggggcgaagacacaagacacagggagtgggaaaaagaaaaaacaggagagacaagagacaagaccaaccagcagaaggggcacatcagagcggacaaaggcacgagaacccgaggaacaagaaaacaaagaaacacaccagacggtaatagacgc

SEQ ID NO: 529568 - DNA, 195 bp, Homo sapiens
gagatcacaccactgcactccagcctgggagacagagtgagactgtccaaaaagaaaaaaaaaaggaaaaagaaaggaggggaaattccacacctgaaaaatacggtatctgaagtaacttcacgggatcgggtatatataaggtaaaaaagcagggtgcagaacggtgtgtatgtgtgtgtagtgtccatggtg

SEQ ID NO: 529569 - DNA, 568 bp, Homo sapiens
ccaacacaaagaaatgatcaatgtatgaggtgattaatatcctaaagaccctgatttgatcattacacattgcatgcatgtaccagaatctcacatggaccccataaatgtgtacaattattctctatcaaaaacatttttttaagaaacatgcaggaatacactctacctcttccttgctgtgtctggatattgtcacatgaggacttgacatgcggattgtggcagcctctgtgaccaagagcggaagacaacagcagcatagaaacctcaaatgaaaaatctaacatctcaagctactaatttagccaaccttggcatcagctatctctggtcttagtatatgaggcgataagcccccactgttcaagttgggtgtctatcaattgctgcagaatagaagttaatgaggcttcctcctcctggatcccctactagaccctgacatgcccattcagtcacaggcagaaagggaagcacagggtaaggagacctggctgactgtgccagacgcagatcttacctgtcctgcttagaacactcaaagctcaattggttaaacaaaaaa

SEQ ID NO: 529570 - DNA, 229 bp, Homo sapiens
  misc_feature (222)..(222): n is a, c, g, or t
  misc_feature (226)..(226): n is a, c, g, or t
ggctaacattacggcaggcagtacgtcagtgcacctaatgggaagcgccaccgtagcaatatcaagcattaaccttccctctacacttatcatgcttcacaattctaattctactgactatcctagcaaatcgctgtcgcctttaatccaagacctatcgttttcacaacttctagataagccgtctaccgtgcgacgacattgtgcactggggatccgtcntagnagc

SEQ ID NO: 529571 - DNA, 141 bp, Homo sapiens
tcatcggccggccgcgtttgctgacatgacagaaggcacgagatctcgagtcttgagcctctcattctttcaccacgccattacccgcctgcatccttctccagaattcttgtaccataaaataaatccccaatccccggt

SEQ ID NO: 529572 - DNA, 890 bp, Homo sapiens
tttcctggtttcggatcccagcggcggatggtgaaatcctccctgcagcgtgatcctcaatagctcagctgttcgcacagagataaatcggaaggggataatacctcagcgccaccatccaacgccagccagcaccatgcacgctcctaagcctgcagcagccgcggcgagtgcatgagtgagagttccagtgtctccctccactgctgtgttagaccccgtgtgtcccgtgggcctcggtggtagctcctgagtgccccatcacctctcccctaggaaaaatcccgaaggttgtggcggaggggaatagttccgagggatcatcaatcgttgcagcataatcgttattctacatccgatgatctgtcgtgaatgtaacgagaggaattaatgtccaacgataagacgagggattctcaacgtccagtccaggctcacagaagccgaaacagctgttaactggcgaactagtgctgatgtgcgcggcagcctctacggatcgagatctcgcgggcgggcgctggccctgaggggagcaatggacagtttagcagttctcctggagtttggctgaggagcatgtggagccgacccatgttgtcgtttggctccgataagaagcgggtgaggacagagcgggctgtgctgcgaaccttcatgcattatagggcttgagatgttgagacgggggccatccccggtttgtccccaagagacccgaagcgttgtgacaagggcctacctgttcgccagagagtctcggcaagaggagaggagtccgggcgctcggggctgggattcggcctggggcaaccctgttgcgggtgggggaacgggaaggcaatccccgggtgggccggggtgctgggaaaaaaccccccggaaagaga

SEQ ID NO: 529573 - DNA, 557 bp, Homo sapiens
aactgctgtacaacatccacccataccgggcttcccggtgctgtgctggacaccgtaccctggtatcttgcggatgtatgttcactacccgtcatgcatcaccttccaatggtgcaaggagaacaaaccaagttacatccactaccagcctgcccaggaccggctgcaatcccacctcgtggagatgctgattacagctgccgcgccacatctcagtcaccaaggtttccatccagtttgagcgggcgctgctgaagtggaccgagtacacaccagattcctaaccatggcttctatttcagtccatctgtcctcagcgcccttgtgcccagcacggtagcagtcaagccagtggactgggaatagagtcccctcttcaatcagcctgttcccagtctctgatggctctaactactttgtgcggctctacatcggagccgctgctgtgtgaacctgccgacaccggacttcagcatgccctataacgtgatctgcctcacgtgcactgtgttggccgtgtgctacggctccttctacaatctccactcccttaccat

SEQ ID NO: 529574 - DNA, 232 bp, Homo sapiens
tatgtgcagtactgaagagcaacttcagctattgagttatacctcaatgcaacctcctggcaggccagccttaagcccagcagggggggggtgcatctaagctgagttctcatcagagccaacttcaattataaacaactgagatgatgccagaggccataaaccctgagaacccaatttgctgtcatcaccatggctgaaacaaggcgcttggcatctaaaaaagctgatc

SEQ ID NO: 529575 - DNA, 686 bp, Homo sapiens
  misc_feature (397)..(397): n is a, c, g, or t
ggaattcagtttactataatactatgatagtttgttgaggacttttgcatctgtgttggtcagggatattggcctgttgtttcctttttttgttatgtctttgtctagttttggtatcagtgtaatgctggtcttgtagaatgagtttgaaagtatttcctcctctttggagcttgcagtgagctgagattgtgccactgcactccagcctaagtgacagagtgagattccatctaaaaaaaaaaaaaggaaaggaaaagaaaaaaagaaagtttttcctcagggtttaaacattactttgagtagacccgggtttttggtttacctggttgggtgggaattcagcagtgaatccctcagctgtggggcttttcttcgctaggagactttattactngtttaatctcattacttgttatggccctattaaagtcttctgtttcttcatggtacaatcctggtagattggtgtccagaatttttcccatttgtgtctaaatttccacttgtgttagcatttagcttgtccataatagtcctctaatgagtgtacttcgtggggccccagtccttatgtctccttttcattggtgacttcatccattcgagtcttctctttttggtagtctagctaaggtttggtcatttttttccttttttttttggggcacagatgtccccctggt

SEQ ID NO: 529576 - DNA, 910 bp, Homo sapiens
agcgaccctttttcgctgcatgtgctccttaggcactgtacagtgcccttaggaaacctgtaccgccaatttgtttaaagcggtttgcgcgtagtattttcgccggctttaaatcacttcccgtgttggtctcttccggacactccggaagagcggtttacgaaatctcggaagttcgcttggaacaaagaagagatttgggcagccacaggggccgatgtcggaaacgcggcccgccgaccttggcgttaccagagattttggcagaaacttctggcactggacgatcattcacagaacatgcggtccccggacagatgcccccggtgtcacagtaaacaaacagggggggaccccaaaaacgatagaaacccatttggcttggaccccccgccgaaaaacatttgtactgtctgtaagctcgccgcactcttgtgcgttcaaattgtgcttctttgacggaagcactaacgcggccgccttctggtgtagaccctcttttctaactctgggttcagtctgcagcacacgaggttttaacgccccgttagagcaaaggcagctgtttagtatagattcggggagcagaagaacaccagaaataatcttatcccgaggggggggcaccccaccctgtagcatgacttccccacgtggcggagaaaccaggcaggccccagatccgctgtggttcctcgaggcgaggcacacagcgctatcctttttagacccccccctggcttttaagagccgcggaatcccggccgcccccctgcaaaacagtgtcgaatcgggcctttcatttcccataatagcaggctcgattgtggcgaacggtagcagatataggggtccacgatacgcctgtatgttgggcgcagtgaaacccccttttacaaaaaacatgaca

SEQ ID NO: 529577 - DNA, 198 bp, Homo sapiens
tgttgatgatggaggaaacaggggaacatgggaaaatccgtacctaccattcaattttgctaaaactactctaaaaaataaaattaaagaaaaaaaaaagctcccctccttccccagttttacgatttatttatgctttgtgaaatggagtctcactcttgactccctaggcgacagagcaggaccctgtctcaaaaa

SEQ ID NO: 529578 - DNA, 782 bp, Homo sapiens
  misc_feature (249)..(249): n is a, c, g, or t
  misc_feature (256)..(256): n is a, c, g, or t
gaaggccgcggtagctcgagggaggcaaggtcgcggataaggagctgcatgcactgtggccaagcttgaggcctggcttggatctaggggccttgaatcgagtgataagtcccttgcaaggagatcttagtctcgttcgtcgcctgactcactgaagggaaccttgtgatgagtcagttgatttatcgtgtcactgggaggtcgtctcgtcgatatcgcactgagggtcttggcaaaggatgtatgagncaagacngccatcgcacacgcggaggatcctgtgtgcccgagaccaatgggactacgcaatgtattgcaatggcctattggggttagagctcagtctgcggtggatgttactacattggtgcacagctggtctgtggtcgttgtcagctggtgtgcaagttgcttccgctatatgagcataggtgagtgaccatgctggacaattccaggctagggcgcgactccgattcgaatgcgctttgtggcgcgaagacagacttacatctccgattcggttcacctccggtatggggccgccacggtaggagctttatcgtgggcgggaggaaaggggaagaacttcggtggaccaaaggtaacgcaaagcgataattgtctcccgccgtctgggtcagaaggggttgtgaaccgatgggggcgtgggtattggccaggtgcggatcccttggttggctgttgggtttactctggtctctttccaggttactcccgcttggagaataggctccaatggcgcggggtcgaaccattgg

SEQ ID NO: 529579 - DNA, 805 bp, Homo sapiens
gttgttagtctaattccagataacaggagaggcttcgccctcgtccaacgcagcgacctgtgccattggatcgccaagcttcatttaagcattctccacgtttgagatccaaagttgggcagcaacgtaaagtggccttcttctcacgctctggatcccttaggggcgtgtttattctgggcacaggaaaagcggcttgccgatcaaacagttacaactcgcagctaggaagaggcagcctgtgatggtcggatgcccgagttaccgttgacgcgctagtcggggcacccagacacagtttaccttctgcctccggctacgggcggtccctatgaaactctgtgagcttgttcccccttcccacaggaatctcttctctgagcgctgggactgacgggacatgtccacatgtactccatgctgcaggccacactcccttgacttcgctgcagctctccctcaagtatactgtttgctgtgcgctggtccccagtgcggacccttaggtttttgcagctgcctactgggaaaggatgacgtggacagctgtattgatctccagaaaagctcccagaaacccacagtttgatcaagcaaacccaggagtgaaaggcctgtatactgtctggagttcaacagccagcagactcagctctggcgcgggcgagcccagggcacagtgaaggtgggcagctgagcacagagattcacggaacagggcccgccgggaagcagaggacgtggactgcctggcagcagaggtggcggcctgaggtcccgggatacggcgaggccttcgtgtgcc

SEQ ID NO: 529580 - DNA, 353 bp, Homo sapiens
cctagacataataagaaggacattaattttttgtgtgaaactcctgagtcttgacggttgagtaccagcatccaaaatgaccaaaagagggaaaacagcatttactatatatatcagatttctttggttggggttctccccatgtggtattaatatttcttgttccaatatatattttaccaaaacagtaaaaaccaggaaaaaaaatagaaaactagcggtatgctgaaactggagaggctaatctctagtcttccgtgcaggaattccccaggtactcagctatggtggaaaaatttgttgaacatttcactatttggtaagatgtttcttaaagaataacagtaaacatt

SEQ ID NO: 529581 - DNA, 1309 bp, Homo sapiens
  misc_feature (174)..(174): n is a, c, g, or t
  misc_feature (194)..(194): n is a, c, g, or t
  misc_feature (248)..(248): n is a, c, g, or t
ataattacaagtcaacagctatcgaaagttagcacagcttgtctgtggtcgctgttctcttattccaccactgcacgtggtacttatgctgttttcactgtcttaggagaaccaaagaaggttttccatgctgaatatccaatgtgtgaaagaatgactacagttaatttgtancatctcatgtcatctcatgntaagatccctccatatctgcccatctatactccctcagatcctgtcaccacatnttatggtctggagcactcaaaattctatgtgcagttctactgactcagatgatactttattatgcctcaggttgggacggttcttacacttaatattttctttctaatttcatggccccttggtaaacacattaaacaaggaattggggcgaattccttatgcgttaaccaatttttttacaaccggggaaatttcataatttattccctatccattaaacctttccaaggagaaaaagaacacccatctatgacaccaaccacaatttccagggggacaagtattataaatatcacccatattaccacgtgaggaccatctgagcacaaaacaacaccatcattataaaagcacaaactaaccctaagaggcatccaccatatatcatacaaaatcataacaggcgcgccttattaatatgtgggtactgacccacctatatatacctatccaagccacggcatatattgacacaaaagtggcgagataccccacccaaaagaacatgcagagatgctcaacacatattcaccaaccgataactgtttccatcccaccgtatggaaacaacagggcggcgggcgcgtaccccacgcaaccacacatgaaaagggatactatgcaagaatcgcttactacaacacaagcaaaacacacccatattattaacccgacatgaatagataccgcgagcacaacaggtctttcaccacaccgatcttcacacgaatttctccggggacggaaacctcaaaggagtaacgcccagatatacggctgtatcgtccaaaacatgctttgggcgacaatgttaccagtagacaaacgggggaaaggcggcccaattaaacctacttcacaacagtgatcaaaagtcacaccccaaacggtgtccgccacaaaatcgcaaccagattcacaaacacacgaccgggaaaaatattttcgcgatcgtgataaagaccccccttatttataagaccaccgcgttgctaccaaacattctcattactatgtcaccgccaccactatatttccgaaaatttatacacctttagag

SEQ ID NO: 529582 - DNA, 246 bp, Homo sapiens
ggcaaactgttgttcgagttaaatataaatctcaggctctttaaaggtaaaaggtttaaggataatccattttgaagaagaaaagagttaggcttaaagtaaagccacatgacaagcatattaaaaaaaatgcaggttatacaaatatgaaagagggccctcagtgtttgtttatttaagaatctctaatgcagagttactgtatggattaaaaacagctcaacactgtctgtaaaattatgtgta

SEQ ID NO: 529583 - DNA, 417 bp, Homo sapiens
aagtacacgttccgtcagccattgaccgatgatcgacggccatcagtcttggatgacctgcgaccggctgcatccaggccgtaagcggcggccgcatccatcgactctaacgtcatatggttcctatcggacagcgcctccaaccgaatgtcggggaggatgatcagcttgtgaggggtcggggttccggatcggttcaacttgccgatcttggtctccccggagattcccacgtacagagagtctacgaccttgatcgggtcaccgtggctgatcatggcgatgaactgccaatgacccctgccaccggtgggctccttcttggacttcggtggctgaggtatgtcaccgaacaggtcgaaatcttcgggtcccatcatctcacctcagaactcatatccatcgggcaccgagttg

SEQ ID NO: 529584 - DNA, 1589 bp, Homo sapiens
ggttgctgtgggtgtgtgcgtggttggttctgacgccctccgacggcgtctggtcgtgtttgtcggttcttctcacttatgatgtgctcttgtgcttgggctggtgctgcttgctcctcctctcgtcgcggtgtttgttgtgggtgcggtggtggtatgagatctttcctgttctctcgcctgtggttgtgggagttaggtgttgtgtggtccgtgcagtgtgcgctcccagggagctttttgtgtgccctgccctgtgtggctgtctgtccgtcgctggggggttgtgtcgttcctagagtgggtgttagtctccttctttttcgccctgtttggtgggtctgcgcctatagtggcctcatgtgtggggccgcgttttcccctggttttctccgtgggcgccaaggggggcctctgctccgactagtctgtgtcagtatctatattgcgggggttcatattggggatattacgtctcaaggcgccccttcttcaggaagacgcgcttgccgcgtggggagttgtaccttctggtctttttaatggttaaaggcccaaggccgtggacgacagtgttgtaaaggactttggactccccctcggttgggggcaacttttttgggggaaccgcgtgtgttgtggcccaatttgttgggagcatctgtaaagaaggtgggccgttgtcttcccgggagaatgttttaggaattgtgtagaatgttggttaccgacgggccacagcatctttggggcgtcgtataaaactcctcccggcgtgttctcccctctccacaaagggggttgatgaccttccaccaccaagtccgtttgcgccccccagtggcgacacgcctatgagtggggatttatatacacccgggatgtctttagtaccagaaaatttcttgtggaaaagagccccctcgggagagtttcccctaaagggagaccccctttttgggagcacacccacagccctagagagagtgatgtcctcatttcgccaagagagtgtctcctctaaaagagagagggacccccccctttgggaataactttttggaggagattctatttggttggagaggcgtgtatacacctcatgatctgcgcaagagagccccattgccgccacggtcaccacccacatgtctttctacgccacaaggcaccaaggagattctcaccacaagcgttcccgggttgtgtattaagagcccagactgcttgtctcagaccaacgggccactttaccaagccccaatatccagatatgtagaaagagcggcgcgttgccagagcccaagaatagacctgttgtgttagagttaagagaaagagtgaaagaaaggctgtctgttggtgttatagaagcacgaagaagccttctggtgggagaaaaaggcacgcacgctatcccagagaaccacgcccctgaaaagaatgcctgcacagagaagaaacctatctaccacgaaggagaatgaagcctgctgcattaactttttaatttgtattattccctaaagagtccaaatcattttggacaacttcttttgaattaagacctgattattaccaggcccatg

SEQ ID NO: 529585 - DNA, 371 bp, Homo sapiens
atcacgagcagcaggaattttacctcatctagatgaagaaaacactcgagggggcatatgaacgaaactgtatatttttcttgaacaaagaaaaatcaggccaagacacagatggctacatgcctgtaatcccagcactttgggaggctgacgtgagcggttcacttaaggtcaggagtatgagaccagcccaggcaacatggtgaaggggcgtctccacaaaagtacaaaaattagccaggcgtggtggtgcacttataatcccagctactcgggaggctgaggcaggagaattgcttgaacccgggagatagaggttgcagtgagccgagatggtgccactgcactccagcctgagcagcagggaaaga

SEQ ID NO: 529586 - DNA, 1228 bp, Homo sapiens
ggaaagacagaatggagtgtgctgccggcactcggcacatggggtccaagggtagccacaggatggctgcacgccttcctcatgatcagttgtctcaacagcaagtttgaggcacttgcaagatggcagaacctcaacaactcttgcgacccagcacgctacgacacgactacattccacatcactccttaccaacaacctggcacaccctgacgcgccactcctacatacttgaacggaccgtaacctatcacaccaacctaccaagcgaccgcaatccgaacgacctgacccgcctctgggcttctctctctgggacacggacgttggcttcaacttacgaggcctgtcctaaaccaccgacgcttacagccttacgcactcgccacgacctttgcccccttggacgataaccccactggcgggccccaaaccagctcgtcccccattcctggctacccactcattgccacacgcctcgggggcaaggggacccttggctctcatacgccccggtcccctggacagcagttgcaacgttccctaggtcaccccacacttgcgacgtaccaaccctttcccacacgacaacgacggtccgtcctgcacccaacttgggctatcgtccagccaagcaaccgggctacgcttggtggatatcttccacggccaacgaaacctcttggtggacacaggcacacacggctcccgattgcccgcgctccttcggccctggaacttcctgtgaccgcacacggcaagtgacaaagggtacagcacagaacgtgggcacctaagcggcccacgacacttcccacacgaatcctccacgtaacacgactgaaatcggaattacggccctacccctttcacccctggcaacacacctccactcccgttaaacccacacaggcacatacttggacgcccagcaaggggcaccatttgtgaacacatttgacagccaccgtgccacaccccacagtcgtgatcacttgccactaacaccaccaacggtataccgtcggccagggaaccctttggacaccacccgatcacccaggccccgcacaatggcccacgaccactcagccaaatctcagacaggcgccaccccctggcaaataccagggcgatcacagcgcccacgggacacagtgcacacacagggccgtccatcgaacggcgtgatgaggcgcccatcggatcacggggacaagacagcaca

SEQ ID NO: 529587 - DNA, 920 bp, Homo sapiens
ctcagggtagggcgaggtgagcggccttatgcgcaatgtgccacgatgtgagccttgaacgcctggacctggacctcacagctgacagccagccacccgtcttcaattgtcttcccaggcagtaacactgaggactacaaccttattgttattgaacgtggcgctgccgctgtagctaccggccagccaggactgcgcctgctaggaacccctggtgccgcacaccctggctggcatggctccattgtcaaggaggaggacgacggaggctggcaattggagccccttcctattgtcactgagggccctgatatcaaacctgtgcttatggctcttgcggatgtgtcctggtgctgagggtccccgcctggcctcacctattgtcagcaccagctcagggctggaggtggtggctcctgagggtacctcagcctcccaggtgtgtggcccgggaaccctggcatgacagtgccaccatttgccgtgttctgccagaagccaggctgatctggttgatgtgcaaccgagtgtgacgtcctgtttaccatcctggactgtcagctgcccgacctgcaggatgtaccagggcgcagggaccgtggagctgtatcaagtctgccatgttgctcccctgtacctgaatggaggtagggatggcatggcgtcagaccctggagtggtggcatgaacaagcacttggcggtggttggtccgaaagggtctcacccaattccaaccaggcggcaaattgttgacgcgttgatctgggtggcgcttagtcttgtggacagaaccctgtgcgggcccctggataagttggggcatcgcgggagtccaccatctccgtgtaaaaaacccggttggaccctgtgatatttacccttatactgctgcccgcccctccggaaaatgtggcgcct

SEQ ID NO: 529588 - DNA, 429 bp, Homo sapiens
  misc_feature (340)..(340): n is a, c, g, or t
  misc_feature (375)..(375): n is a, c, g, or t
ttatggccgggttaatgaattcaatcccatggtggacacgttggcctctgcaatgggttaccacattctcatctggagccaggaggaagccaggacacggaagtgagagacactaaagaaggtgtgggccagacaaggccttggagcccacacatgggatcaagtcctgcaagcagaggtggcgatttgttaaagggccaaaagtatccaaggttagggttggagcaggggtgctgggacctggggcactgcgggactgggacacttttatgttaatgctctggacttgcctccagagactgctccagagttggtgacacagttgtcccaagggcacccnttgtgggggttaaaaattttccccccttttttaanttggaactaaatgacttttctcctctcagtgggtggtaggcacaggcatcaagc

SEQ ID NO: 529589 - DNA, 322 bp, Homo sapiens
  misc_feature (144)..(144): n is a, c, g, or t
  misc_feature (149)..(149): n is a, c, g, or t
  misc_feature (224)..(224): n is a, c, g, or t
  misc_feature (241)..(241): n is a, c, g, or t
  misc_feature (266)..(266): n is a, c, g, or t
  misc_feature (298)..(298): n is a, c, g, or t
catgctgtgcaggtcatccagcaatggagaatatagaaaacttccagagatagagaagcccttctgcttccagccccctgataaggtataagagagacagatttttaataatgtatatccaaataggagagaaaaagattctgnaactntaaccttgagacgactctaaccctacatatgatatatgaccagcagccacatgttttccatcattttaaaatagncttttatgtattttagnaatgttttccataagcatgtatttnttcaacaatcacaaaacattaaatttataatnaaacgaatatgaagatgaaaaaaa

SEQ ID NO: 529590 - DNA, 115 bp, Homo sapiens
cagaatgtaccccaatgatggacactggtataccaaactgtggactccattattacagtctttgattggtctttttgaggttacccgaagatgattaccattcctgatgaggaca

SEQ ID NO: 529591 - DNA, 154 bp, Homo sapiens
gactatctctacaaaccacaaagacattggatcaccatacctattattctgcgcatgagctgtagtcctaggcacagctctatgcctccttattcgacccgatctgggccagccaggcgaccttctaggtaacgaccacatctacaacgttatc

SEQ ID NO: 529592 - DNA, 115 bp, Homo sapiens
  misc_feature (1)..(1): n is a, c, g, or t
nactggttgcacgggggcagagcctcctagggagaggagggtggatggaattaagggtgttacgtcatgttagcttgtttcaggtgcgagatagtagcagagttcttggtgtggg

SEQ ID NO: 529593 - DNA, 705 bp, Homo sapiens
  misc_feature (551)..(551): n is a, c, g, or t
atgatttagaaaataatactattaaattctaatgaaacaatggtctcagtctggggccagcatccctgtcagggagatcagtaattattaggaagtcactagtgaataccaggtcaatgaaaaaaagagataactctttggagaaatgctctgactgaagacctgaaaagagaataatttgatgactgcataatcccatgtgattttatgttctatcagagtgactgtactaccaagataatagagtatcaccaaaaagtgtatttagtaccacgtgcgtagattactgtataagctcacaaatactagcaaggatggcttgcaactgacgtgttacccacactgactggaatgtgagcccagtgttgccagaaatctcctatttaaacactggcaataaatgcaaattttcatgttcaatacagaccaaacacagacatctgtacctagcctgtgggtagcctgctggaagcccgcttgtactgagtcacttttcttcttctagtctggactcttcaaacacatgtgtcatgagatatagaataacaggngcgggaagggagcatttctaggttagaggagacttaaattacaccattgacaccaaatgaaaatccgttaggtcttaaatgtggttgataggttcttgaaaactgtgactttaagccaaatgtttttggtctccaattaacaacattttcctcg

SEQ ID NO: 529594 - DNA, 815 bp, Homo sapiens
ggagcaccgtaaagggcgagctggccgagtacggcctgggattctgctttcacctgtgcaggcgacgactcgtgcttcgacgagaccttgaagacccatcatgacatccagagcatgttccggaacgaccgattggcatgcaaatttgcgtctttagcgatcaacagacttactgcggtctcaggaggaattggccgaattatctggccgaaatgcgaatttgaaaccatccccacttttggcatgctagtgcatctgaagcgagatacgacgacatcattaagcagcagcgttgcattgcaagtttagcatgccgaattgattgcagtcgtgcactcccttttgggaacgcaatccgtggcgtcaaactatccccaagtttgcaagcctctgtcttttggcgaaacatgattgcatcaatggggggtgtactttatcataccgatgcgtggagaatagcatagtcttgtaaccattttgcagtgcttgcagtacacatgcattatcccaaggacgccctttacatcacactgaacgtgcaaatgccggcttgtggcctatactccaatctgacacactctcttcgcatgggaaaccaaggattatatacatgactcaccggataggaccgcatattttaattccagggtaatattcccaaaggcacattgttggcaattgaatggcataagcacattcggggattgggaggaacaggaccgagcaaggaggaataacgagtagatatgatggaaagacagacaaaaaaggacattcaaatcactgggctaacacataaataaaatggaaactgg

SEQ ID NO: 529595 - DNA, 545 bp, Homo sapiens
  misc_feature (332)..(332): n is a, c, g, or t
  misc_feature (386)..(387): n is a, c, g, or t
  misc_feature (396)..(396): n is a, c, g, or t
  misc_feature (429)..(429): n is a, c, g, or t
  misc_feature (441)..(441): n is a, c, g, or t
  misc_feature (454)..(454): n is a, c, g, or t
  misc_feature (466)..(466): n is a, c, g, or t
  misc_feature (473)..(474): n is a, c, g, or t
  misc_feature (476)..(476): n is a, c, g, or t
  misc_feature (489)..(489): n is a, c, g, or t
  misc_feature (496)..(496): n is a, c, g, or t
agaatgacattttattgtgaagatgggtgtggtccctcttcccttgaaatcttgtagtttctttttatattagctcctcactgctacagcctagaaggtgagaagcagattttaaccccatctggcagccattcaaggaaaacccagccctggctgtttactcaggctctcttagaatgagagtggagggtgtaggatatgagggttaggcctttgccacattatacaaaagtttataatttgccacatctggacaagtaactttcttcttttgttcataggcaagacttctttaatggatagtatcattcactgaacctactgggcatggncctcatggagttttgggtcaactggaactctgtgccaacccaggatccaaactnncatccagangccatggatacaaattccatacttccgggctgntttaacagttgntttcagcagacgngtttaacctttnaactggnntnccaattatttccnaaattcntttctggaaagactccctggcgtaaaaggaagtttttatttaccaaggt

SEQ ID NO: 529596 - DNA, 611 bp, Homo sapiens
ggccaggcatcctgtcccacgaggagggtcaaggacatacaactttcccccagttccgaggcccgagggccctttttgaggccacgcaccccgatctttataagcgacggggccgacctcctcacccaagctggttgcacgtttgagggtcgaaaatcggagtctccccaagagggagtgccctgaacatccactttgtgtcctcacgtctgggggagagcggaaatccaccacaaacttcctgacactacttccataatttgcacctaaaggagagttcaggtacacaaaggagggccacgccttcggttgtcgtcgaatgcctgaactcacggcaaggccacgctttccgcgtggtggacaccgaggttttaagccaccatgaccgagggccccatgctaggcacagcggctggaggggagtgccacacccctcacagggcagccccccacatacattttttcctgcttaatttttgcctacctgcctgagccatgtttacctgcccacttgtcccctgctgcctgccccaacaccccaccattggcctgtcaacccacccattggcctttttgtctgggtgcttaccaagcttttatcactcccttta

SEQ ID NO: 529597 - DNA, 102 bp, Homo sapiens
ggtaggtgaaggatgagtgtgatggagcgaatagatgaggtcaccgaagaaggggaatgaagctgtagcttccagagacctgatgtgaaaacacacgaccag

SEQ ID NO: 529598 - DNA, 187 bp, Homo sapiens
atacaaccaccaatctcaccagaaaaggctttatgtacatattaggaggctatcaaattcccactggtagactgaaatcttccaaaattttaattttcacttaaaagctcaacttttaacattggaacaaatactgttagttttccttgaaatgccattctcacattgttcatctttttttctcttt

SEQ ID NO: 529599 - DNA, 955 bp, Homo sapiens
cggcgacgaggaccatcatgctggctgctggctgacacccagtggaatggctggcgcgtgcctggtgtcccgtaaactcctgtgctgtttccatcagatgccctcgtgacactcccatgccctggtgctgatgcactgcatctgtctgctccccgtgctggatacaatgggggctccgccatccgctccctgtcagttcggcctccatctcctgggacccgcgccggcagccaggccaggcctctgagtggccccagagcccaggctggactcgtccacggcaggcagcgatctgcccagagggtctcgagaggccatcccttacagaagtcaggccctgtgctcgccaccgtcacctgctggttggattccggaaacccactgtctgaagaccacagaggggtgtcgctgaccaacccaaatcggatacgtccagacctcaagctcccttcccctctctggctgccctctgcatcttatatcatctcttctctcaaccttaaaggggatttctgtgtcctgacacaacctccccatccaacaccaaagtagccggggtgagccccaaaccttactgggtgtgcatccacctgtgcctccaaaccagcgaatctgacagcttcgacccaattctgcacacacccaggaagttctgcctttacttaactaacaggtgtctcctgtacttcccaaaatatctcctcctcctgtgccctatacagaacccatcctaggagggccagagaacctgaaagggagaggaacaactaaatacaaacattggaaaaccaggaaccgaataccaagaaacaaaagcagagaagaccatgttaagaggacagagaaaccaaagtacccacaaaacataataccaagaagcgcgacacacaacaaagacaagaaagacagagaaacgagagaacctaaaaacaaagaaagcaccagaaaagaccgg

SEQ ID NO: 529600 - DNA, 1077 bp, Homo sapiens
agcggattgtgagccccggcgacagcgggggaggggaagccccgggcgaccgcacccccgcctcacagcatgggatcggacttctcctcgactcgctcacgaatgtggcgccgccagcgcagtgcacacgatgcgcccgtgacatcccaagccgcggagtcccgacgtgggtccagcaaggctcgggacccggtgctgtccaggaactttctgcaccagtatcctgagatgatcccccgatggtccaaaccccggcagcccgtaggcttggacggaacttgatgccgattccatggtgccgcaagcagccactcgctcctgggatgcagaacagtggatgcccatggcacgtgtcgactcgcctgcagatgacccctgtgaaggcctgaagcgagccccacagtaagtccccggttgtcgagagaactacaggatcctaggtgacctgctagactcgcactccgggtggcatccagtatcgcctaatagacccctggcggtaagggagagaacttgtgacgcatcgccggcacttctataagcgcccacaaagccatgttgatcggcgcttgctaactggcactagtcgcatttcgcttgcgtggacctcaaaggcgacgttttcggcgaccccactcctttaggttgcatcccacacactcgtcggacggaggcagtctcaatctctcataagctccatcgtgaccgaatttcagcgtggcacacatcacatgataaatgcacaagtctccccctaaactccctactgggccccattatccattacgcaaacgtaccgcttgatgcggacaggtagtcgcgcggtttccaccaccgaagcccgaacaacgggcgccaattccattgtagtgaacatcgcctaacaagcctcccacaatggctatccgcttaagcccaatctcccccttaacgtctttggaaacacaacctgtatggcataacgtttgccgaacacttgtcagataggactcaccgtgggttcgctcccgtccactaggaacccctcacgcgatttgccgtagtgtccctctgaaaggccctggtattaaggcgccg

SEQ ID NO: 529601 - DNA, 178 bp, Homo sapiens
gttccccttctgtccgagccgcttcgagccctgcggcctgacgcagctctcccgcctgaaatacggctcgctgccgcctagtgcgccgcaccgtgcgggctggctgtgacacagtgtgttcactgcgccgctgtcacaacctggtccgacggcaccgccagcgtgcttcgtcgttcga

SEQ ID NO: 529602 - DNA, 837 bp, Homo sapiens
cgcgtgccgagactctgaggccttgtcacccccagtgatcccgatacgatggccgtcaagaagatcggcgtatcttctgtgcgcctactgtgctcagactcgggctcactcactcctggcgcaggctggtgcaagcaggttacgaagtgacagtgctggtgcggagactcctcctgtgtctgcctgtctcgtagtgggccccggtcctggctccatcgtgggtaagtgtggatgatgttctgccggcagccgatgttgcacaagaccgtggctgtgcaggacgctgtcttcgtgctgttgggcacccgcaatgatctcagtcccgcgactagtgttgtctcgagggcgcccggtacattgttgtgcctagacttgactggctcatggtgtggacctggtcgtgggctgcacctcggctttcctgctctgggaccctaccacggtgtgcccccatgatctggaggcttgtgactgagtagactacgatcgcggatgcacaaggtggtgcgtgaagtcaggcctgaagtacgtggctggtgatgccggcatacttgggagtaccagccactaactggggcgtactacaggtgaccctgggatggacggagggccctcgacatggtcatctccgtatatgacctgggccatatcatgctgcgctgcgtctccgaccgatgagtacgacggacacgggcacctacccctctcctagcagtaccagtatcactctgtccccatctgggagggtggcattctgggacatgaggagcaaaggaagggggcaataaatgttgagccaagagcttcatattaaagaaagcaaaaataacaacaagg

SEQ ID NO: 529603 - DNA, 113 bp, Homo sapiens
gtcggtaccgactgtatcaacgccgccagtgactgcatcaacgccgcatgctggaagctcaagtgtgagggagataaatctgcaggacatcaaggagcggcgttggatggagt

SEQ ID NO: 529604 - DNA, 789 bp, Homo sapiens
gccggagatcgagtcgagttagcagcgaggtactagcatctgtctgccgctggagcctacagttatctggcccacgtccgaggctaagccgctgttgtcgcgatgtgggatctggctttgtctcgcatgtaaactaggcatcgaggccccagatactgtgcggagattatatagatcggacctgcaatacttgaagttgataggcagatatatgcaagactagaggacccaagtaccagaaggtactctctcattgctaattgcttgaaggcgaggatgtacaccaagaagataggaagaccgacattttcacttgtgtcactagtacggggtcttcgagcgcttcgggggttgcgacgagtagggagtcccctctggcactatgatcaaggaaatgctctgtgcgtatcgatcgtcaaccgagggaaagacttgccgtagaaaaagccttatggtctgccgaaacctatactgagctaagttccttttggttcgctaaacccccaatttgcaaaagcgcgtccacaattttccccatgaacaccatgaactcagaggcgtgggggcactgtcgcaagtaggccagataaaagcactgtcgcttgcgtggtgagttgccacccaatgtgatatttagtcacattcttaaggttcccatgggttgagatggtctttcgggatacttcccaaattttttgcgcaaagttttaaacatttctttgggcggtgtaacaatttaaccgataggggattacgggggaaaattggcaggggggggaacagaaacag

SEQ ID NO: 529605 - DNA, 93 bp, Homo sapiens
  misc_feature (92)..(92): n is a, c, g, or t
ggctggtccgatggtagtgggttatcagaacttattaacattagtgtcactaaagttggtatacaaccccccactgctaaatttgactggcnt

SEQ ID NO: 529606 - DNA, 311 bp, Homo sapiens
tcctgtgcctgagttcccacgcttcgactgtacttctagctactcagaaggctgaagtgggagaattgcttgagcccaggaattccaggctacagtgatcatgctactgcagtcattccaatgctgggtgacagagtaagactgtctccaaaaaaaaaccaaaaaaaaaaaaggaggggaaattgtaaatttcaccaaaacattaaataagggaggccccaaatcccagtccccacacagacgtattgggtaaccaggtgggacctttgctggacccacttttggtcagagctcgggaacacagtcgaagg

SEQ ID NO: 529607 - DNA, 406 bp, Homo sapiens
  misc_feature (139)..(139): n is a, c, g, or t
gctcgaccagaaatcttgctgggatgaggagctgcaaacatgtgtggtcgactttttggccttctgcctcttctactctcagggatgggggattacaactaaagaagttgtcttttggccgggcgtggtggctcacgcntgtaatcccagcactttgggaggccgaggcgggtggatcacaaggtcaggagatcaagaccatcctggctaacacgatgaaaccccgtctctactaaaaaattcaaaaacattggccgggcgaggtggcgggcacctgtggtcccagctactcgggaggctgaggcagaagaattgtgtgaacccgggaggcggagcttgcagtgagcccagatcgcgccactgcactccagcctgggcgacagaggaaggctccgtctcaaaaaaa

SEQ ID NO: 529608 - DNA, 164 bp, Homo sapiens
cacgagggtgggtgaacgtgcacccgtacccatacacgtcgcccaaccgccagatgcgtccggtagacgccaacctcgggtacggctcctgtatcgagggttaggtttccaagaactggttccggaacctgctctccttctcgaccatcccctaccagtcgttg

SEQ ID NO: 529609 - DNA, 177 bp, Homo sapiens
aggggtggggggaaaaaagggataaaaattccccccccctcctccgggtttgaaaaaaggagctgaaaagctttttttgttcctgggctaggcaaagaataaaccccaatggtttttttttgggttccaaataaaaacctaatttccataaaatggggccagaaggtcccctttcca

SEQ ID NO: 529610 - DNA, 211 bp, Homo sapiens
  misc_feature (20)..(20): n is a, c, g, or t
  misc_feature (94)..(94): n is a, c, g, or t
  misc_feature (125)..(125): n is a, c, g, or t
  misc_feature (127)..(127): n is a, c, g, or t
  misc_feature (134)..(134): n is a, c, g, or t
ggtgtctgactttggcctgnccgcgtgctggaggacgaccccgaggccacctacaccaccagtggcggcaagatcccatccgctggaccgcccngagccatttcctaccgaagttcacctctgcnancgacgtntgacctttggaattgtcatgtgggaaggtgatgacctatggcgacggccctactggaagttgtcaaccacgaggtga

SEQ ID NO: 529611 - DNA, 535 bp, Homo sapiens
  misc_feature (67)..(67): n is a, c, g, or t
ctactactactaaattcgcggcaggtcagacatgaagccaaacagagggttccacagaagtctccantcttcaaatcttcagtgtatgaaagcacagattcctgaaagaatggcctcaaatgaccaggagtaggagctctctatatccctgctcctgaaaaacaagctaactggagtctccatcacctgccaccagctatacacactaccaactacccaactgaactccatgactgatttgccagctaatcatgcccctgacccagcccacatggacatgggaaggacatcagtgaactgtgaaaagaggcagaggtgaggagacacctgtcctgtgccacacatctatgtagttcagcaatttccagccccttagtactccaggggctctaagccacccctttgtaagtcaggatggaagtagatgacaccacatttctatctgctgtagacattcttcccagtgtctcaaaatgttttggcatctttcagtaaaaatcttcaagtttaaaaaaaagtcgacgcggccgcgaat

SEQ ID NO: 529612 - DNA, 234 bp, Homo sapiens
gcggccgcctactactactaaattcgcggccgcgtcgacatatcatctaacctccagccagatcaagaaatagaacatggctggatgcggtggctcatgcctgtaatctcatcactttgggaggccgaagtgggcagaaggtcgggatttcaagagcagcctggccaaaatggtaaaaccccgtctctacttagaatgcaaaaattagccgggcgtggttgcaggcacctatag

SEQ ID NO: 529613 - DNA, 108 bp, Homo sapiens
  misc_feature (39)..(39): n is a, c, g, or t
gaccgatgatactcacctacgcttatcttgggaatccanatatgcagtcaactctgataaacaggagtttctgtgcccatttcaccaaatttcttgtgcccatttcaa

SEQ ID NO: 529614 - DNA, 670 bp, Homo sapiens
  misc_feature (67)..(67): n is a, c, g, or t
ctactactactaaattcgcggcaggtcagacatgaagccaaacagagggttccacagaagtctccantcttcaaatcttcagtgtatgaaagcacagattcctgaaagaatggcctcaaatgaccaggagtaggagctctctatatccctgctcctgaaaaacaagctaactggagtctccatcacctgccaccagctatacacactaccaactacccaactgaactccatgactgatttgccagctaatcatgcccctgacccagcccacatggacatgggaaggacatcagtgaactgtgaaaagaggcagaggctcactcccgtttgtattattaaaacacacgccaataggacataaaaagaagcaagagtactgggctttaccatgagttcaaatctcatttctgccaattcctatgtctaaaaaaaaaagcttcctaatctctttgagcctcacattctctatctagagaatcacttgaccagaatgttcaatgcagataaaaatactagaaggtattttaattcattccaagattccttaaaattctgtaattctatgtcctcttgattctgtctatagaaaaacttggaatacataggcagcagagtttgaaaaaaataatagaacaaaagaaacaccaagaaaaacagagaagaaagtttt

SEQ ID NO: 529615 - DNA, 1864 bp, Homo sapiens
  misc_feature (920)..(920): n is a, c, g, or t
tttttttttcagtgacttattttcatacaaattcagaattacttagaaaatgactaggctaaattagtagaatgtctgagttattgagcatttgtggaaagctgctggcttattactttcactcacatgtagtatccatttgcttgccaacaaaatactggtgctactgctcttaaatatatattgcatttgcgattaatatattcattcttgggatggtaatgtatattgctatagtccttgaaaacagctttttcctcctagctaacttaaacctttttacacattcttaaccgcttctctctcccattcacccaaccttgtcaccaacttgtgattttatttgtgttattagtcgtctcttggtatccatgggggattggttccgggatgccctgcggatgctgaagttctttataaaaacatgtacatgctctcatatcttaaatgatctctagattacttgtgatactgaatatatataagcgctatgtaaatagcatgtcataatgtattggttttttatttgattattcttatggtattgtagtattattttttatattttcaaattttacaaccagaggttgattgcagattcgaaatccacaaatatagaggtccaactaatttttaaatctatatttaataaacatttgtttaacccttgttaattgtcatgaaatttaaattagtggattcgagttgaaagaaattttaatgtggttccaaagttcacttaaaagggtgaaaactactcacctttgacaacagacagtttatatcatattttattccatccccataataacctgtcaaataaagagtaatacaggcagtaaatagtacctttagtaaataagtaagcattaaaaattactgtttagtgcaggtgtgctacgtggtaggcatggtacaanacttttatataattctcacttacttttcatatcgactctaagatgtaggttttattattttttcatttgcagagaaggaaactcagggtcatttaatgatttgtcacacaactaactatacagcaagttagtattacagaaagaaaatctagagattctctcctactaagactgctggatatatttggaatgagtactttacagcatcattgtacaacatcctgatttcagggttgtgaccaaatctgacactcgtccttccttaaaagccttgaaatagagggagctgagagctatgggacatcctggaaaaatggctctgtaactttggctttgatgttccaaacatatagcaatgattgataaaatataaagatagaaaaacaaatggacttagtcaagtccaaaacagttcttcgtctttgagatccagaaaccaaataagaaaaccacatggttattaaggctaaagccaggggtctgctgaacattttccagcaatagaaagtggtaattagggtttaatccctatccaacaaatccagatccactatttgaagcagggcctgggaggaaatttcttgttcacagcaagagactgggaaaaagtaattctgttgaccactaccaggaactaggatttttacctggaggattgaaggagtaggaaggaagacacggttttgtgacataaaactgaattacccatgtgttgcctctgtgatttaccttgcaatgtctctctatccctgcagcacagcagataggcagcaaatgcccctctgagacccagctctggtacagtagcctgggatgccctagtagaaccaatggcgaaactactagaaagggagaaatgagcacatagaaaaaaaaaaaatcactacaaatgggctttcaaccaagattccaaagtatgtgaatgaatcaaacactagtaaagc

SEQ ID NO: 529616 - DNA, 105 bp, Homo sapiens
ttacggggaagacggagactacgagccacagcttaaaactcaaaggacctggcggtgcttcatatccctctagaggagcctgtttcataaccatgaatcccggaa

SEQ ID NO: 529617 - DNA, 111 bp, Homo sapiens
ctactgatgtaaatgttaaatgtacctgggcaactagagcaaaactcatctcagaaaaagaaaaaaagaacagattgtgggctgattctcaaaattcaccttagagttgtt

SEQ ID NO: 529618 - DNA, 926 bp, Homo sapiens
ttacgaatttattaccccacgccaattttggggcaagaacagtgtgaaattaattttagagcgcatgctctttattcctccgcgccttctcaatcgtcttttcctcccagcattagtagccgcactctacttgtttggggctcccataatcgaaggtccacaacatatatttttatagcgtaaagcggtgcttcttacaaacctcccttctggtgtatcctcgcaccctccgctctcgcctccagtgatttacacgtcttccccacgcctcttgttacacctaacagtatgaagattcgccctctctagtataaacttttttcttaactgtagtgcttgttggccctcactacagaccagtgaatacccctaggtccttcatccgcaagacgctcctcttagccgtactccaaagacaaattttgtattactcctttggcaaaacaccgctggggataaaccccctccctcctccctacgcgctctcccgaattagaaatttctcgaatctcggtgcataaacacaaatttctcccacaaacttctgctcacctatacgacgacatatattaaagagggactccttgacccggcatctatcttcgggccctcctcctctttattcggcacccgcatttcaatcccctactctctccgttatctcccccaaccccccacgacctagtatgttttacgcccccctgagcgccctcctccctgttttgtacactcgtcttatgcgaatacgtccctcctgtttgaatacgcgagtactccgagggcaccccccaaatgaagtccaccccttaccatccatcattgcgaaaatgcatgccctgggattagctatgtcctccaccatattgttttgtctttaaataacacacctaatttcccctttacccaaatacctcatgggcccatca

SEQ ID NO: 529619 - DNA, 397 bp, Homo sapiens
  misc_feature (321)..(321): n is a, c, g, or t
tgctctagaggatccatccccggctctgggtacaaaaaaacctcttagaatgaacagacctactacttgatagaacaacagggtgactatagtcaataatactaaaagagtctcattggattgtttgtaacacaaaggacaaatgcttgaggggatggctacctcattctccaagatgtgattattatgcactgcatatctgtgtcaaaatatctcatgtaccccgccacacgttgtggctcatgcctgtaatcccagcactgtggaaggccgaggtaagcagatcacttgaggccaggggttcgagacccgcctggggcnacatggcaaaaccctgtctctactaaaaaaatacaagaattagctgggcatggtgacacgtgcctacagtcccagc

SEQ ID NO: 529620 - DNA, 356 bp, Homo sapiens
atacgagcgccaactgggaaaactgcgaatgtcgctgatcatgcctcccctaaaacagggaagaacgtgcatgtggcacatccgatgaacacgcaatactccgcaggaactcaggcaacaatcaaatgcctggggcaactatactttccaaatcctgaatattaaaaaggttttcacatggtactcatcttaatatttactgtttcattagataaaagtaagctcttgttgcccaggctggcgtgcactggtgcaatcttcgctcacctcaacctccgcctcccgggttcaagcgattctcctgcctcggactcccgggtagctgggattacaggaatgtgccatcaccatctgag

SEQ ID NO: 529621 - DNA, 653 bp, Homo sapiens
  misc_feature (29)..(29): n is a, c, g, or t
  misc_feature (107)..(107): n is a, c, g, or t
ccatggcggccatgagctgctgcagcggnttcggtctccgcgctgacagcgtggtcttgccgccgcgctggtcctagactcggagtcggaagttttctcacgcggantttccgaagactgtcgctcctgtgcggcacagtggggacatggcaagagactgtttgtcgtcaagccttctttatactatgacgctcgcttcttgaggttaatgaaattctaccttatgttgactgggatcccagttataattggcataacactggtgaacatatttattggtgaagccgagcttgcagaaatcccagaaggctacatccctgaacactgggagtattacaagcatccgatatcaagatggatcgcccggaatttctatgatggccctgaaaagaactacgagaaaaccctggctatcctccagattgaatctgaaaaggctgagttacggttaaaggagcaggaagttcgaaggctgatgcgtgcccgaggtgatggaccctggtatcaatttccaacccctgaaaaggagttcattgatcattctccaaaggcaactcctgacaactgatgattcatttgtctgtccaagaacagtgtgtccctctagtgggaagaaatgaataaatactctgtatttttgctctgatgtacac

SEQ ID NO: 529622 - DNA, 180 bp, Homo sapiens
gtcaaacaccgcagaacgcaaggcactcaggttagaaaatatatatgttcagaggccaaaaggccatccacatacagtgcctattacacagtgaagagtacacagggatggccgggaggacattcaagagccatgtgcttgttcactagaatagcataactgctgtcagaacctatctcc

SEQ ID NO: 529623 - DNA, 109 bp, Homo sapiens
cacacttcaattaccaccattagaagtaaaatgcagtgactgggttgcgatggctcacacctgtaatcccagcactttggcaggccgaggcgggtggatcacaaaggtc

SEQ ID NO: 529624 - DNA, 1026 bp, Homo sapiens
gcagcttcctcctgctgcagcagtctggtgacgcatgggcagctcgggctgaggtggaccagtgctggtggcccagatcgtgcgagacgctgcacgctggacgctggcgcaggacagccctgtgcctcgcctgtgctgctgcccccgtggggtgccgctgcgtgtgcccctggggcccccatggcctgccggactggtgcccggcgtgaccacattgccctgtgaacccgcgcgctgtggatgcctgcgtgcctgcattgccggcccggctatcgcgctgacgacaggtaggggcccctggctgcccatctgcggtgcccatgccgcttgcgcccataagcgccgaaccggcagagaacaggcggtgcagcagcagacccacaagccagcaggacacatacaaagcagaaagggcgggagaagagatcgacccgacacggagacacccacgcacggacacagagacacagaaggcacacccagaaggccccagagccggaaaggggaaacatgcgcgcacacacccggaacaacgcacagcaggaaccaacaccaatacccacgacccagacacaggcccagcaaaccacagacacccacaaggaggaagcccacagaggcgcccagacgcaacacacacggccgaccaccagcgaccgagacggaacggcgaaaaccccaggcacactctcggggacatccacaaaacccaagccaaaccgccaaatcggccaggacgaacatagacgcgccagaaaacgcgaccaaacccaagtacccgcggggggaacacaccccccgcccgcccgccccccgcgacacgacaacacaaaccacgaatgaaccaagcgacagaccacgaacaggggcatacagagcagaccacacacacggacgagccacacaaaggaaacaaaagcgacgggcagcaaccacgtaggcaacacacgacgagacaagacaaaaagaccacacagcaaacgcaccgcggcaaccaccactgaacaccacgcagcgcaattcgac

SEQ ID NO: 529625 - DNA, 830 bp, Homo sapiens
  misc_feature (183)..(183): n is a, c, g, or t
cccggggccaagttaattggcgcaccagttgttttaataagaaagggtttatgggtgttgaaaagagaaaaggtgggaaaggaatccacgtgttgtgaccccgcagccccacggtttaccagagggggtaatctttctcccccggttgggggtttacccgctccaccctccagaggacctccnccaagagaagtgattcacccaacaacacataagggtggaatagattgtggtctctggacacgaaagtgtgtgtaccccgcaggtggtgtctcccgaggagacaacctataagtgcggtctcttggccacttttctctgggtcgcacccgcgggggggtttctctgccgcgggtattaattgttggtggatggggtctcttatgttggtgttggtggagacctttttggtgttttgttgtttttaataagagaaaacaacaccacaacaacctataagggtgggggacaataatgagtatgttagagaaggtggtgcctccgcgtaaccccaaaaaggagttattttctccgaatcgcctaaatgttctgattgtcccattcaagtgctttttaaacatctttctctgctggatagccaagaaacattttattttcccacatttcctatattctctaaaaagtgtggcaccaatgcgtttccagttggactgtattgccatacattttttgctggaagacctttttcctgtaaaaccaccattgccttgttcagttttgttgtaaactgacttaccctaagaagccctgttgattatgctttttgaagggtgtttgataagagggattaaattaaagctttaaaatta

SEQ ID NO: 529626 - DNA, 176 bp, Homo sapiens
ttaaagaattcctgtccaagttatctttggccctttggtaggtgcttctttccattattctcatagttgttgctctaggaattgcaatttcaaccttgcttgttctagtctacttggaactagcattataccactttatacaatcatgtagaccatgcgggtaaacgcttgggtac

SEQ ID NO: 529627 - DNA, 881 bp, Homo sapiens
gaactgcactgatactggaactcaggcgcctcttcttattctgatgatactagttgattctctgtagtttgttccatgtgttgatgtgcggtatttaccctatgttggtgccttgtctaactggtctgacactactgatttaggctcgtcatgttcactcttcagtgtttcctgcttatttcactgaacggcatccgtgtccccgtatatgccatcattatctatgggacttgcacataagacatgtgctcgatgctatggctaatatccaagctaaattgtccctggattgatgcgcatcagtgtgaatgaaaacgccctatgtattgcgtaggagttcatctttaataggggatattcctctgattatacggggggagggtccgcgccagaacggacccttgacgtcgcccgtgcaggtgtgcatcagatccgtcgtgacgatctttatctttacgccattgcgcgtgttgtggaggaatactgcacctgtcttgatgccatgtgttcatcatcttaatgtatttgtacacgctgcttatgtatggatcctatgcgtcaatcatatctttttgctatctgagggcactggtggacatacctaacctgtctcttttgactttcgcttgcagactagtcttgtccggcatcttggaagcttgcagagatgttgggagctcgcatgaaagtaaaacgaagcccttttactcatgagcgccgggggcgtccctcctcatttggtgcgcgtcttccgaatgacagtttgttgcccccatctcccgtatacctcgttagaatctggtttcgccatgtaacgggtgtgggcctacgggcgcataacggcgaacgccattatttttgtattttgccacacctcttca

SEQ ID NO: 529628 - DNA, 103 bp, Homo sapiens
aatggaccctagcaatgtaatgtccagtgagtgaggttctgtaccacttcatcaaaatcatggatctggctgggtgcggtgcctcatgcctgtaatcctagca

SEQ ID NO: 529629 - DNA, 129 bp, Homo sapiens
ggaggtcgatgagcagatgcttaacgtgcagaacaagaccagcagctactttgtggaatggatcccaacaatgtcaagacagccgcttgtgacatccacctcgtggcctaaggtggcgtcacctattgg

SEQ ID NO: 529630 - DNA, 533 bp, Homo sapiens
gggtgactctaagatcccaaaaccggatctagtatgatgtgattattctaacctcccttttttcttatatgtaaactcctattccaacagagagaaatctgtgctcctaacatactggcatccttttatatatatgtgcacttttagtataaatttgtgagtggctttagaaatgatactccatattccttggaatgggctttaacaactcaagtacggcgctatacattggtactattcctttaatcttatattctccattgtcaaattgattttaaaatttacactgacattcacaggacctagaacagaaatagtaaaacaagaataataacattggagaatttactacttgctttaatgtcttaattaaaagttacaataatcaacctactgtgatatggtagaagggtagaataatggattaatagaatacagtaggttacctagaagtggacctataaaagtttcttgagattgcggagttttcaggcgagagtggtcttcaggcatggttggatccaggtgtcaat

SEQ ID NO: 529631 - DNA, 836 bp, Homo sapiens
ggacaactgagagctcctaggttccatctgccccgtggcgctggttatagttgaagcccgagaactgcccatcgcaggcgatgctgaaggccgcttctggggtggttgctgacggctgcagctgcctccctttcgcaccaaggtacccctaacccttcagtcgacgcatccgcgcgtcccgcccaggctgggaggcactgtagggatccgacgcttcagcgtggccaaagagcgagtttctctgtattccagggccctggcggggtcaatggctccaggtacgcgaacactcggcggaggccgaatgtctgtggggcaggacaggagttcctcgtgccgtcggaagggccgagggacggatagtgagggcgctaattcactccccactgggctggcggaaacgccgaatcccgcagtgaccgcggaggggccaaggtgcatggctgctccatggatgccacacggtggcagcggggataaaagaacgtgattcggtccctggcgagggttgctgccaaccagcgcactgttggcgtgactcagtgccaggcaggcttgatggtcaggcaacgtctaacccaggaggtgggacacatcctcggagtcaccagtgagatgtggcgagctgggagacaagtcgggttccgtgcatttgtcgaccttctggctcagccatggtagtaaaacaccgcggcagtcctgaccatcccggatcctcgggtctcactgcgaggtctccagacgggggcgcgcagccggaggcgcaaggaactgtcccagattaaggaaaccgaaatttttttggctgggtggggctggggagcatgatgctatag

SEQ ID NO: 529632 - DNA, 134 bp, Homo sapiens
ctataccaggcatcaacattcgagacagtctctggggaaaggaatggtggcacagaccatgttccctggttccgacgctgcccttgccaggcttcctatattccattactcatgggaagcaggtcatatcccta

SEQ ID NO: 529633 - DNA, 1125 bp, Homo sapiens
  misc_feature (1008)..(1008): n is a, c, g, or t
  misc_feature (1125)..(1125): n is a, c, g, or t
ggcggccacagtccaccgcgcggaggagggtcatgcttccccagtgagcaagacctctgagacccgcctaagtcgcggccgcagcggccctcggcagcagatggcactgaaggactacgcgctagagaaggaacaggttgacgaatgttcattagcaagagttaataccagtgatgatgatactctgggaagaagctaggtgcaagtagtggagaagccaggttggttcgagtctggcgtacaatcgagtgacacagagtgtgctctgatatgtgtgatcgctggatggatggtatgcgcgaggagtgagccacgagttgggctggacttcaatttcgtgaggaatgcacaggaggtactgcgaagactctttgctgatgctcgctacaatgagtgatgctgccatcagtatcaaggaacgagggaaggtggctaaataaagaatggttctggcgaatgctagtgacatatggcagcaatcaatgcataagctgtaatggaaggcaaggtcatatcgagcagatctatgggcgcaatgggtacagaaaaagcagaaagcaaatgcaggtatgattctgaagtgtacaccgtcaatgggaacaagagaggtaacgagttatgatgtagccaccacgtgtgcgcattgacgccaaagggaaggtatgtggactagtcatgctaggaatgcaaggggatatacgttggctgcgacattgaattattcctcggagggagcggagatgaaagggaatagaaagaggactcaacggtagtgggtacgccgaggcacaggggagggcgcattgtaataaaaagagcaatgagaacatggacaaagaaatgaaagcgcgttaggtgccccaacagtcttaaagagaatctagttgaaagaaaggtgtttggttagtcagttagtcatgatcgttcgacaaggaaaagtcaacagagcttgaagatagagaagggtcactatgaacagggtcttttggcactatggaaagatcaccnacgagaatacattgggagtgtaccccatgaggagtagaaaacagaagttatgggataggaatagagaagactctcggagaaagaggggggaccagtggatttggaaggtggaaactn

SEQ ID NO: 529634 - DNA, 305 bp, Homo sapiens
ccatggtctttcccccctttttgggtttttttttttcccctttctttcaattgcagatgccaaaaaaaatgcccccagcccctccattcccctaatgggtgctccccagaccctttttaaaggttgtttttaattttttggttgttgttgtccaagctttccctttttttttttttttagggtttgggccccgattttaaaatgcctttttttatgggtatgggttgcccaagctggctttttgtcaaataaaatgaatacgaccttaaaaaataaaagcgggttttttaaaaggtaaaagagta

SEQ ID NO: 529635 - DNA, 1422 bp, Homo sapiens
gtggcgggcatctgtagtcccagctactgggagcgctgaggcatggagaatggcgtgaacccgggaggtggagcttgcagtgacccgagatcacgccattgcactccagcctggcgcgacagagcgagactccgtctcacaacaaacacaagaaaaagaaatgaacaggaaaacaaaacactatcccacgtgccgatgaatcagtgctagcgcactaacacagataaacttgcactccacacaggaccacactgcaacagggccaatgctgccacgcagcatcatgagcacgagcacatcatccgtggctgggccaacaacaggacattggcacacacagctgcctgcggggcacccagcgatcctcgaggcacagcacagcatctgagaatcgcaacgttgggatctccccagaacctttgcacctaaggaacctggaccagaccagaagaggtacaggggcacagcctggaggggaaacactagcagcagccgtccgcatccaacgatgagaccgccgacgcaccacgtcctggctcacacccacggcgcaacgcgaccccactgtgcagcaacgccacacggccacccaaaagcaagcggtgacaacacacccgcgtgccacaacaacatgccagaaccaacagcgcaccacccacacgcaggcacccccgcccagctggacagcccctggccaaaaacccaagggcccaaaaccctacaagcgccaaaagcgagccacgagcacaaaaatagccacatcaaaccgcgcgcgcaccccaaccgacagagcagcgactagacacccacaccaaacgcgagccgacgcacacgccggacgcaagacacgccaatacagacagacactacaatgccgcgccacggcgcaccacaatgacaagagcaaaccaaccgcccgcgaacgacctacaacgaaccaccgacacagcctacacaaaccaacacaactccaaggaaggtggacacagagcagacccgcaccgacacaccaggacaccggcagcatcacacgctaaggagattagcgcgcgctagccagacgagttcaagccacgcacgagcctctccacaccaacaatcacgcacatcagagagccagcccgaaagagacgaccagatgagcaaagtgagaaggcggccaagcaggccggaggccgtagagtagaaagtataccaagcagtcaaactgacactggcaactaacgaacagcctcacagcgcgctgatgcagctgatacaagcatgcgaagcaagagcagctagagagagtagaaccaccgaagccacgaagagacagagagaacagcaagacacgagcaggacgagagatacagatggcagcagacaaacacgttgacgaaaacagcagagacaaagacacggcacgggcagacacaacaa

SEQ ID NO: 529636 - DNA, 527 bp, Homo sapiens
ttgttctctctcatgtttcatgatctgtgtcatagatatttcttcattacgagcacttcgcggtgtggcttttcaatgtctgaagtggattaagtggcccacagtcagttctgtgacttgagtttcaaaagtaaaattaccatcaacaatgtgattcaattttattttctatactagctaaaagcaaggaactatattattaacaatcttggctttactgtagtttaaggcaggtgatgatgatgcttattagtccacctgaaagagtccttccaggtttttggaagctttattcctgcttattaccttgcccttgagaagtccttcatggaaagtggaaacactgggttgacttcttttccccatatcctagttgaaagggacagcttatatgtatgttagactgtccaaaagtgtttgtagaacctcattttaaaaaatcaactgtattgtactttttaaaaaatgggatcttaaactctttattaaaaataataaatggaaatgtgttaagcaaaaacattaaa

SEQ ID NO: 529637 - DNA, 1706 bp, Homo sapiens
  misc_feature (1706)..(1706): n is a, c, g, or t
gcgctataaaaacttttataaaccccccggagcccgagcagtgtgaagaagaggcgagaacgacccccggaccgaccaaagcccgtcgccgccgccaccatgcccaagagaaaggctgaaggggatgctaagggagataaagcaaaggtgaaggacgaaccacagagaagatccgcgaggttgtctgctaaacctgctcctccaaagccagagcccaagcctaaaaaggcccctgcaaagaagggagagaaggtacccaaagggaaaaagggaaaagctgatgctggcaaggaggggaataaccctgcagaaaatggagatgccaaaacagaccaggcacagaaagctgaaggtgctggagatgccaagtgaagtgtgtgcatttttgataactgtgtacttctggtgactgtacagtttgaaatactattttttatcaagttttataaaaatgcagaattttgttttacttttttttttttttaaaagctatgttgttagcacacagaacacttcattgttgttttggggggaaggggcatatgtcactaatagaatgtctccaaagctggattgatgtggagaaaacacctttcccttctagttttgagagacttcctcttggctcccaggaggagggattccctgactttgacacacatggccaccttggcacaaaagccttgtggtatagaaaaacaaatttgtttttatgtcctcttctccctttccatctttcagcatagacttaactcccttaagcccagacatctgttgagacctgacccctagtcattggttaccagtgtgtcaggcaatctggactttccagtgatgccactgagatggcacctgtcaaaagagcagtggttccatttctagattgtggatcttcagataaattctgccattttcatttcacttcctgaaagtcagggtcggcttgtgaaaagttgttaaacaacatgctaaatgtgaaatgtcaaccctcactctaaactttccctgttcagagcatcagatgaagacttcattgggttttatagtggctttctgatttttggtagtccattgaagaagggagtttgaaagttgttgtatactgttaacgattgtctgcccatgtcctgcctgaaataccatgattgtttatggaaagtatctttaataaagctggatacagtttggcttggaaaaaaaaaaaacaacaaaaaaaaaaaaaaaaaaaaaaaaagggggggggggaaaaaaaatcccccgagggggccaaatttacggttcccgggtttgctgtacaagggggccctagagagagggcaaatataacacagcaaaaggcgcggatataaacgggcggaggcggaaaagtggagcggagacctcggagaggaccctactcgggcgggggacatgtgggacctaccaagaaattaaggccaaggggaaacttacccgctcaagagggataccgcggtgaacccacggagagatcggtgggggcagacattgggccggggtgttattaagaatacaggcgaggtgtatattataataaaagagggggagatggttgagagatgaaggagagagcatcagaacagggagagagaagaataaagtcaaaaagggacgaggggaagaagaagagaaatgagaaaaaaagacagaataagacagtaaagagatgaagagtaaaacatatgtan

SEQ ID NO: 529638 - DNA, 401 bp, Homo sapiens
gcccttgagtgcttgttagagagaaagagaactactaaggaaaataatattatttaaacctcgtgccgaattcggcacgagcttggctttactgtagtttaaggcaggtgatgatgatgcttattagtccacctgaaagagtccttccaggtttttggaagctttattcctgcttattaccttgcccttgagaagtccttcatggaaagtggaaacactgggttgacttcttttccccatatcctagttgaaagggacagcttatatgtatgttagactgtccaaaagtgtttgtagaacctcattttaaaaaatcaactgtattgtactttttaaaaaatgggatcttaaactctttattaaaaataataaatggaaatgtgttaagcaaaaacattaaa

SEQ ID NO: 529639 - DNA, 1707 bp, Homo sapiens
  misc_feature (1707)..(1707): n is a, c, g, or t
gcgctataaaaacttttataaaccccccggagcccgagcagtgtgaagaagaggcgagaacgacccccggaccgaccaaagcccgcgcgccgctgcatcccgcgtccagcacctacgtcccgctgccgtcgccgccgccaccatgcccaagagaaaggctgaaggggatgctaagggagataaagcaaaggtgaaggacgaaccacagagaagatccgcgaggttgtctgctaaacctgctcctccaaagccagagcccaagcctaaaaaggcccctgcaaagaagggagagaaggtacccaaagggaaaaagggaaaagctgatgctggcaaggaggggaataaccctgcagaaaatggagatgccaagtgaagtgtgtgcatttttgataactgtgtacttctggtgactgtacagtttgaaatactattttttatcaagttttataaaaatgcagaattttgttttacttttttttttttttaaaagctatgttgttagcacacagaacacttcattgttgttttggggggaaggggcatatgtcactaatagaatgtctccaaagctggattgatgtggagaaaacacctttcccttctagttttgagagacttcctcttggctcccaggaggagggattccctgactttgacacacatggccaccttggcacaaaagccttgtggtatagaaaaacaaatttgtttttatgtcctcttctccctttccatctttcagcatagacttaactcccttaagcccagacatctgttgagacctgacccctagtcattggttaccagtgtgtcaggcaatctggactttccagtgatgccactgagatggcacctgtcaaaagagcagtggttccatttctagattgtggatcttcagataaattctgccattttcatttcacttcctgaaagtcagggtcggcttgtgaaaagttgttaaacaacatgctaaatgtgaaatgtcaaccctcactctaaactttccctgttcagagcatcagatgaagacttcattgggttttatagtggctttctgatttttggtagtccattgaagaagggagtttgaaagttgttgtatactgttaacgattgtctgcccatgtcctgcctgaaataccatgattgtttatggaaagtatctttaataaagctggatacagtttggcttggaaaaaaaaaaaacaacaaaaaaaaaaaaaaaaaaaaaaaaagggggggggggaaaaaaaatcccccgagggggccaaatttacggttcccgggtttgctgtacaagggggccctagagagagggcaaatataacacagcaaaaggcgcggatataaacgggcggaggcggaaaagtggagcggagacctcggagaggaccctactcgggcgggggacatgtgggacctaccaagaaattaaggccaaggggaaacttacccgctcaagagggataccgcggtgaacccacggagagatcggtgggggcagacattgggccggggtgttattaagaatacaggcgaggtgtatattataataaaagagggggagatggttgagagatgaaggagagagcatcagaacagggagagagaagaataaagtcaaaaagggacgaggggaagaagaagagaaatgagaaaaaaagacagaataagacagtaaagagatgaagagtaaaacatatgtan

SEQ ID NO: 529640 - DNA, 898 bp, Homo sapiens
ggtggtagcggttattcggcggcccgcggcgtgaccatggccctggccctggcccggcgttcgctgggctttcctcacggcgtcccgagcatcgtcgcagagcgggccgacttccgggaaggaactgaccagcgactgagcggaggcctggcgcgcgttagcgccctgaacatgcggccagtccctgtcgggcgacccccgggctccgtgacagtgcggcggctggaggctggcggctcggcgagggaacggaggcggcgtgcgcccggcggagtgtggcggcggagacggcccggctgcccgtgtcgcgggagccccttatgggaaggcagtctcacacgcgctggccctcgggccttcgttcgaagaaaggattgcttgtctccccgcaaaggaaaacccaacaaacgaaggtgtccacagcccggcccgaggtgcagggcgaaagtaccgtgaagaacggcagacgtctcgcctcctgcttccggaatgccgttcgagatgtgcgtcatgttttgcaaaacattgcgggtgtctctcgcacttgtgctgcaaggttgtgccggaactcctggggccagaattcctttagttccttgcttgccggatgcagaccttgagaacgatccttatgcctttcattcatccggcatggtccaacaattccaagacgaactgatatctgtcttccagattcaagcccttaatgcctttttcaacttctggattcccgatattcattattttcagcaccaatttttctggattggtcacgaaaaaagcggccacttggagattcgtgcccattcacggactacagatattatgaattcaaccatgatctcttccaaagagttgccccggactcagggcaggcattgttcaggtattgcgagcg

SEQ ID NO: 529641 - DNA, 131 bp, Homo sapiens
tagcctgtctgtactatacccagtactccttgtttgggtgctctgtcaagctgctagggtggccctgcctgtcctagatgcttcttcctctacctcctccctcgtgctctgcttctgcccagaaggagcta

SEQ ID NO: 529642 - DNA, 411 bp, Homo sapiens
ggctgccccagccagcagtggcaacccgcttgggtcccctcccacactgtaaaagctttgttctttcgctctttgcaataaatcttgctactgctcactctttgggtccacgctgcttttatgagctgtaacactcaccgccaaggtctgcagcttcactcctgagccagcgagaccacgaacccaccagaaggaagaaactccaaacacatccgaacatcagaaggaacaaactccagacgcgccatcttaagagctgtaacactcaccgcgagggtccacggcttcattcttgaagtcagtgagaccaagaacccaccaattccggacacactttggctattacctgtaaagagtgaaaggcccttgcttttcttggaatcatgtgacattaaaagaaatttccctcta

SEQ ID NO: 529643 - DNA, 1747 bp, Homo sapiens
  misc_feature (1747)..(1747): n is a, c, g, or t
aaagaaaagacgaaagtaggcaggagaggcgggtggtggaagaggcgagaacgacccccggaccgaccaaagcccgcgcgccgctgcatcccgcgtccagcacctacgtcccgctgccgtcgccgccgccaccatgcccaagagaaaggctgaaggggatgctaagggagataaagcaaaggtgaaggacgaaccacagagaagatccgcgaggttgtctgctaaacctgctcctccaaagccagagcccaagcctaaaaaggcccctgcaaagaagggagagaaggtacccaaagggaaaaagggaaaagctgatgctggcaaggaggggaataaccctgcagaaaatggagatgccaaaacagaccaggcacagaaagctgaaggtgctggagatgccaagtgaagtgtgtgcatttttgataactgtgtacttctggtgactgtacagtttgaaatactattttttatcaagttttataaaaatgcagaattttgttttactttatagtttttattttaaaaagctatgtggtatagcaccacaggaacacttcatggtggtcatggggggaaggggcatatgtcactaatagaatgtctccaaagctggattgatgtggagaaaacacctttcccttctagttttgagagacttcctcttggctcccaggaggagggattccctgactttgacacacatggccaccttggcacaaaagccttgtggtatagaaaaacaaatttgtttttatgtcctcttctccctttccatctttcagcatagacttaactcccttaagcccagacatctgttgagacctgacccctagtcattggttaccagtgtgtcaggcaatctggactttccagtgatgccactgagatggcacctgtcaaaagagcagtggttccatttctagattgtggatcttcagataaattctgccattttcatttcacttcctgaaagtcagggtcggcttgtgaaaagttgttaaacaacatgctaaatgtgaaatgtcaaccctcactctaaactttccctgttcagagcatcagatgaagacttcattgggttttatagtggctttctgatttttggtagtccattgaagaagggagtttgaaagttgttgtatactgttaacgattgtctgcccatgtcctgcctgaaataccatgattgtttatggaaagtatctttaataaagctggatacagtttggcttggaaaaaaaaaaaacaacaaaaaaaaaaaaaaaaaaaaaaaaagggggggggggaaaaaaaatcccccgagggggccaaatttacggttcccgggtttgctgtacaagggggccctagagagagggcaaatataacacagcaaaaggcgcggatataaacgggcggaggcggaaaagtggagcggagacctcggagaggaccctactcgggcgggggacatgtgggacctaccaagaaattaaggccaaggggaaacttacccgctcaagagggataccgcggtgaacccacggagagatcggtgggggcagacattgggccggggtgttattaagaatacaggcgaggtgtatattataataaaagagggggagatggttgagagatgaaggagagagcatcagaacagggagagagaagaataaagtcaaaaagggacgaggggaagaagaagagaaatgagaaaaaaagacagaataagacagtaaagagatgaagagtaaaacatatgtan

SEQ ID NO: 529644 - DNA, 1484 bp, Homo sapiens
taaaaaaccaacatctttttaaaggagaaaaacaccttctgtgccacaaaatattgtcgcgcccaaaatatttgagagagaccccattaaaaaactttaaatagaaaaaaaaaaaaaaagggggggcgcgccgcctacaaaaatcatctcccccagggggcgcgccacaattcttcccctcgtccccccctcgttattgtgtgtgtgtaaagagagagggcgcccccttttagtaggaggagagcgctctttattataaaaccagagagagacagggggcgcgcgcgcgtttttatacaacacatcgccgcggagagagagtggaaaaaaagcgcgcgcaccaccgaggggagaaatcatcttggagagagagagagcaacactctcaataaatagagagagagagagaggggcgccacactcatatactggcgagagaacaaaacaaatcaccctctaacaagagaaaacaaaacaacacaccctactaaaaaagagagaacacatattaaacaacctactagcccagcgcgtgtgactctctagagagtgttgagttccaacaaacacatagcgtcgcgcgatcattgtgtagtcggtcagcgcgacgacgaggacgaagaagtcgtatcgagctctaccacaagcgagagataatatatcgctacttaagaagaaaaaaactattcatctacaccccgagggggaccaacacggcatcgaatcctcacacacaccaggcggcgacgagagagagaggaatgtacgaaagaagatgaggtaagaagagaatagacacgacaagagagagaaagacggatagagaacagggacgagagcaggacggaggaggacaacaatcataaacaggagagaagagaaacggacgatgaaacacacaaaagagagggaagagaagagacaaaagcgaggactggacgaaggatgcagaaacaaagagaaagcaaaaagcagacagaactacacgcaacaccacaaaagaggacacaacaaaagagaccaagacgaaacaatagacaagaaaacagcgaggggagagagaagagcaagaggacacccagaggaagagaagaacggcgaagaaacgaaaaaaataagaaagaaacagagaaggagaacaaaagagaacaactcgacaagaagaatagcaacgagcacaaaacgaaaagcaaaacagacaggaagagaagaagaaaagaagaaaaaaagaaaaagaacgacaaataacaaatcaaaaataaaaccaaaaaaagcatacaataaaaaaaagactacaaacaaaccaaaaaaaaataaaataacataacataaaaaaaaaacaaaatcacataaatactaaacagaatacaaacagaaacgcaaaaacaaaacaaaataaaaatcaatataataataccaacacacagcacgcaacagaaaaataaaaaaacaaagaaacaataacaaaaagacgtagaaaaaaa

SEQ ID NO: 529645 - DNA, 1897 bp, Homo sapiens
gcgctataaaaacttttataaaccccccggagcccgagcagtgtgaagaagaggcgagaacgacccccggaccgaccaaagcccgcgcgccgctgcatcccgcgtccagcacctacgtcccgctgccgtcgccgccgccaccatgcccaagagaaaggctgaaggggatgctaagggagataaagcaaaggtgaaggacgaaccacagagaagatccgcgaggttgtctgctaaacctgctcctccaaagccagagcccaagcctaaaaaggcccctgcaaagaagggagagaaggtacccaaagggaaaaagggaaaagctgatgctggcaaggaggggaataaccctgcagaaaatggagatgccaaaacagaccaggcacagaaagctgaaggtgctggagatgccaagtgaagtgtgtgcatttttgataactgtgtacttctggtgactgtacagtttgaaatactattttttatcaagttttataaaaatgcagaattttgttttacttttttttttttttaaaagctatgttgttagcacacagaacacttcattgttgttttggggggaaggggcatatgtcactaatagaatgtctccaaagctggattgatgtggagaaaacacctttcccttctagttttgagagacttcctcttggctcccaggaggagggattccctgactttgacacacatggccaccttggcacaaaagccttgtggtatagaaaaacaaatttgtttttatgtcctcttctccctttccatctttcagcatagacttaactcccttaagcccagacatctgttgagacctgacccctagtcattggttaccagtgtgtcaggcaatctggactttccagtgatgccactgagatggcacctgtcaaaagagcagtggttccatttctagattgtggatcttcagataaattctgccattttcatttcacttcctgaaagtcagggtcggcttgtgaaaagttgttaaacaacatgctaaatgtgaaatgtcaaccctcactctaaactttccctgttcagagcatcagatgaagacttcattgggttttatagtggctttctgatttttggtagtccattgaagaagggagtttgaaagttgttgtatactgttaacgattgtctgcccatgtcctgcctgaaataccatgattgtttatggaaagtatctttaataaagctggatacagtttggaaaaaaaaaaaagactaaaaaaaaaagggggggggggtataagaaagaattcccgccgagggggggccacatcatgaatggccagcaaccgcggtatttctgagcgaagaaggggccccaaacaaaaggggggcagtcacaatagataagacaatggcaccgggcccagctcttgtaaacccggtccggcagcggggaacaccgggattccgtggggactaccctggggaaggcacaccagcaccccgcgggcgggtgcgacgcagatggccggagacacctccccaacaagggaattacagccctcaacggcaacatatacacgcacgtgtatacgtggtggacccccaccggagatgattcgtcgccggggacgaacatgcgcgcccggggctgtgctttgagaacaatattaccaggagcgcgcgagaaacaaacggcgttcacaagtagcgactcacctagggcaagagactaacgtcgacaatatgtgaggacaagactacgcacaagtgcaagacagacaaagatcagctctacagctaaggggggacaacagggggcacgcacgagaagaaaaccacaccaagaaggacaagtcagagcaatccgaggcaacaacacagatacagagagacgacagatgaacacgacgccaacaaaggg

SEQ ID NO: 529646 - DNA, 733 bp, Homo sapiens
gcttcggagacgggagtgttcgttgtgccatgtgactaaagaggagaattaagataatgggtgatgtctgatgcaaatgggcaaggaagatgatgatcatcgaagtgtgcccaagtgccagaccgttgaaaaggggaggctaagctaggctaaagtacatgggcctaaatctccatggtcatctttgggcggaatgacgaggtcaggcccctgtgatacgtcttacacagcctgccaaatcaagaaacaatgggctatctatccatggggagaggatacactgtatggagtatctggatgaatctacaagaagatacatcccgtggaacaaaaatgagtctgcgtcgggcattaagtgaagaaggatcgaacgggcagagcttaagtagcttatctcaagaaagctatctgaatgagtaactaacttggcccacctgccgtatatggattacacaaacagaacatgtctcatgatcttattctaatgtgtagcaatccttgaatagcatctcagtacaccaggaattcagatcatgagattgactgactgaatatggtggttgggcatggcctgatgttacattctaagactgggcttgcgggttaccttgaatatgtacaaggttaatgaacttttggaagataactccacatgtcagtaaatgggtatcactgtttaacccgttttcaagattgtgattagacttccggagttattgtccaggttttaaca

SEQ ID NO: 529647 - DNA, 1273 bp, Homo sapiens
gcgctataaaaacttttataaaccccccggagcccgagcagtgtgaagaagaggcgagaacgacccccggaccgaccaaagcccgcgcgccgctgcatcccgcgtccagcacctacgtcccgctgccgtcgccgccgccaccatgcccaagagaaaggctgaaggggatgctaagggagataaagcaaaggtgaaggacgaaccacagagaagatccgcgaggttgtctgctaaacctgctcctccaaagccagagcccaagcctaaaaaggcccctgcaaagaagggagagaaggtacccaaagggaaaaagggaaaagctgatgctggcaaggaggggaataaccctgcagaaaatggagatgccaaaacagaccaggcacagaaagctgaaggtgctggagatgccaagtgaagtgtgtgcatttttgataactgtgtacttctggtgactgtacagtttgaaatactattttttatcaagttttataaaaatgcagaattttgttttacttttttttttttttaaaagctatgttgttagcacacagaacacttcattgttgttttggggggaaggggcatatgtcactaatagaatgtctccaaagctggattgatgtggagaaaacacctttcccttctagttttgagagacttcctcttggctcccaggaggagggattccctgactttgacacacatggccaccttggcacaaaagccttgtggtatagaaaaacaaatttgtttttatgtcctcttctccctttccatctttcagcatagacttaactcccttaagcccagacatctgttgagacctgacccctagtcattggttaccagtgtgtcaggcaatctggactttccagtgatgccactgagatggcacctgtcaaaagagcagtggttccatttctagattgtggatcttcagataaattctgccattttcatttcacttcctgaaagtcagggtcggcttgtgaaaagttgttaaacaacatgctaaatgtgaaatgtcaaccctcactctaaactttccctgttcagagcatcagatgaagacttcattgggttttatagtggctttctgatttttggtagtccattgaagaagggagtttgaaagttgttgtatactgttaacgattgtctgcccatgtcctgcctgaaataccatgattgtttatggaaagtatctttaataaagctgatacgtgcgggtggggtggggcggggggggtgggtgggggggtggggtggggtc

SEQ ID NO: 529648 - DNA, 1879 bp, Homo sapiens
  misc_feature (95)..(95): n is a, c, g, or t
  misc_feature (616)..(616): n is a, c, g, or t
atgcttcggtgggcgcggcagacatgaataaagttttgttggggagcgacacatacgtgtgattgattagcagagggggctggtttatattgagntggtggtcgtattgttttatggaggatggggggctcttttcagcgatcattgatgctacaacgaagctgcgccgcgggatattggagggttggcggtcatgagatcacgcctgtctgggagatagtaggctgtcttctctggctcgcgctgtgatagatgagtttgttgtcgacgatatgtaatgccggggggtgctgatgggcgcacaccacccgcacgaagtgtggcgccgcttgtgtttttgttacatgtgtggcgcggctccaggaaagtgaaggggtgcctcctcctcttgctttttgggggagagttcgccatgtggtgttgtacatcgctgggagggcgtgacatcatgttgtggggcgctccgtaagagagaatgatctttgtgggcatcgatttggggggcgcctcgtcgcgataagaaggggggcgttgttgtgagggcgtctggcatacgtgggtggtaccgcgtgtgtgtggtgagagtcatcaccatagaggtgtttgttgttgtggngccgaacgaggggtgattgggataggaggtttgtatttgtccgggacgcgtgtgttaatatgacgcgggggggggggagacccaaccagaagggggcgcgctaagtaaagggggggtaatcagacaacaaacgaggagggggggtactacacaccccacaaagagtgttggttgtgtggggcggcaccgacgccggctacgacaaggagaagtagcgttgttccgcctcccctcgcgacgaatagtagccgctgctcctgcatggaagaaggccgcttggtgtcgtcgccgaacaagagggtggccgcgcggctgtgtgatattgtatggggggggcgactagtggggcgagaatacactcttcgtggtttttgcggtggttatcaggccgcgttgttttgttgttttgtggtggggggcacaacacgcgcgcgtggtgggggcgaacgaggagaagagaggtgccgtactgcgtcgacgggtgttctcctcgctgcaccgctgttgagaggatgatgctctacgacacagcagaggagaggaggatgttgtattatagtagagaagattgtggcggcacacaaggggggcgtaatacgctctggattgcacagagagagcgggggcaacacaagagtggtgagtagtcacagagggaacactaatatgcgctcgtccccacctgtgaggcttgtatatgagcgctctattgtctgttgacacacaagtggagagcgactgtcacgatccactctctctgctgcggttgggagcgtcttgtgtgtcgcacactatattatgtgtgtgagaaagtgtgggcgcacactaggagtatttttgtgtcacatgggctgtgagaaaaaggtctctgtgtgtgtggtgtgggggagactacgcacacaggagagaagccggggtgtggtgtatcacacactctctcctctgtcacatattgtctcttttgtgctgtggtgtgtcactagagctgagatagtcgcggggggggctctctgtgagagaaagagattgagcccttataaggtttactttgagcacccaccctctcacaagtttgtgccacatggcgcgctgttcacgagccacatggagagagagagagaagaaaagcacatttatatgggagccacctgagaagaaaagagccgagacattgcacaagagaaaaagagaggttaaagcccagggacacaggattttgcagattggtggggtttccaaaaaaagagtatttttccactgtga

SEQ ID NO: 529649 - DNA, 358 bp, Homo sapiens
gagtgacctagaggatccccctaggtatatgtcgtgcatagaattctagctgctttctctattgagcgcagagtatactatgtctctatgtgaatatggacagttagcatttaccaacatctccttgtctactgtgtcttttttttttggaaatggattctcgctctttcgcccaggtgggagtgcagtgccgtgatctcggctcacggcaagctcggcctccggggtttcatgccatttctccgtgcctacagcctcccaagttagcggagaacatacgaggtgccgtgccaccagcgccgcggctaatttttttttataattttttgtttttaatttttattgaagggggcgagaa

SEQ ID NO: 529650 - DNA, 371 bp, Homo sapiens
  misc_feature (53)..(53): n is a, c, g, or t
  misc_feature (83)..(83): n is a, c, g, or t
  misc_feature (160)..(160): n is a, c, g, or t
  misc_feature (164)..(164): n is a, c, g, or t
  misc_feature (189)..(189): n is a, c, g, or t
  misc_feature (237)..(237): n is a, c, g, or t
  misc_feature (281)..(281): n is a, c, g, or t
  misc_feature (287)..(288): n is a, c, g, or t
  misc_feature (290)..(290): n is a, c, g, or t
  misc_feature (358)..(358): n is a, c, g, or t
aaaacaaattggtagaatcagaacatcgcctctgagcaggagaaaggagagantaaccagaaagaggcaggaaggaactggcnagcatgagggaaatgtgctgtatctggactgggatatagtgacgtgagcgtttgcaaaacttgtgaaactgtatgcntaanatctgtgcatgtgtatatgagaatnatacccccatttaaaaaacagattatagaaaacatacagatttgggcntgccctgtgtgcgcgggatacttaaattggctctttcttttttnttttcnntnttgagagagggtctcgctgtgacccagactggggtgaaactcatctcaaaaactaaaaaaaaataacntataattatttca

SEQ ID NO: 529651 - DNA, 1715 bp, Homo sapiens
gcgctataaaaacttttataaaccccccggagcccgagcagtgtgaagaagaggcgagaacgacccccggaccgaccaaagcccgcgcgccgctgcatcccgcgtccagcacctacgtcccgctgccgtcgccgccgccaccatgcccaagagaaaggctgaaggggatgctaagggagataaagcaaaggtgaaggacgaaccacagagaagatccgcgaggttgtctgctaaacctgctcctccaaagccagagcccaagcctaaaaaggcccctgcaaagaagggagagaaggtacccaaagggaaaaagggaaaagctgatgctggcaaggaggggaataaccctgcagaaaatggagatgccaaaacagaccaggcacagaaagctgaaggtgctggagatgccaagtgaagtgtgtgcatttttgataactgtgtacttctggtgactgtacagtttgaaatactattttttatcaagttttataaaaatgcagaattttgttttacttttttttttttttaaaagctatgttgttagcacacagaacacttcattgttgttttggggggaaggggcatatgtcactaatagaatgtctccaaagctggattgatgtggagaaaacacctttcccttctagttttgagagacttcctcttggctcccaggaggagggattccctgactttgacacacatggccaccttggcacaaaagccttgtggtatagaaaaacaaatttgtttttatgtcctcttctccctttccatctttcagcatagacttaactcccttaagcccagacatctgttgagacctgacccctagtcattggttaccagtgtgtcaggcaatctggactttccagtgatgccactgagatggcacctgtcaaaagagcagtggttccatttctagattgtggatcttcagataaattctgccattttcatttcacttcctgaaagtcagggtcggcttgtgaaaagttgttaaacaacatgctaaatgtgaaatgtcaaccctcactctaaactttccctgttcagagcatcagatgaagacttcattgggttttatagtggctttctgatttttggtagtccattgaagaagggagtttgaaagttgttgtatactgttaacgattgtctgcccatgtcctgcctgaaataccatgattgtttatggaaagtatctttaataaagctgaaaaaaaaaaaaaaaaaaaaaaaaaaaaaaaaaaaaaaaaaaaaaaaaaaaaaaaaaaaaaaaaaaaaaaaaaaaaaaaaaaaaaaaaaaacaacaaaggagaggggcgaggccccgaaagaagcgcaaccatccgagcgacagagggcaaagaaagatcacaaggacagcacgaagactgaacgcaaacagagacagcagcaccagtggaagtcggggaacgcacactccacaagcaagagcgcgcgcgcggccggcgacacaaaccaaacgacgggcgggaggagcaaaaggacgccagcagacgagtcgagacgcatggaggaacacacccaccctggcccggcgccacacccgacgtcgggagcccaccaagccgaaacgaacgaaccgcgagcgagagaaggaacgatagcaacgcgtgcaggggagcaaccgacacaaactcggcgggggcgaaaaagaagaaccgcacaagagacaagaagaaaaaaag

SEQ ID NO: 529652 - DNA, 449 bp, Homo sapiens
  misc_feature (2)..(2): n is a, c, g, or t
  misc_feature (12)..(12): n is a, c, g, or t
  misc_feature (36)..(36): n is a, c, g, or t
  misc_feature (210)..(210): n is a, c, g, or t
  misc_feature (223)..(223): n is a, c, g, or t
  misc_feature (251)..(251): n is a, c, g, or t
  misc_feature (253)..(253): n is a, c, g, or t
  misc_feature (403)..(403): n is a, c, g, or t
anaaaaaaaacncccctgggaaatcctggagtttgnaaaaacaatgcctcctatgttaaatccctgccttccccagtcctcctaagtaaacaagggccatttaaaaagccatagtctccttaaaggtcccactatagtggttcctttatttaaggaaataactcagctgggtgccaagttgtcacgccctgttatccccagcactttganaggctgaggcaancagatcacttgaggcccaggagttcganantctggcccaacatggtggaaacccatctctacaaaaaatacaaaaattagcccaggtgtggtggcgtgcacctatggtcccagctatttgggaggctgaggcaggagaattgcttgaacctgggaggtggaggttgcagtgagccaagantttgccgctgcactccagcctgggtgacagagtgggactctgtctc

SEQ ID NO: 529653 - DNA, 166 bp, Homo sapiens
cgacatgaacgagtctgaagacgtattcagccttatcgaaacccatgaggcaccgccagtgaagctgcttggctacaacacagacactgataactgctgagaagcgattatcacaccaaactctgcgtgtcgcggggaaggcagccaacgctgtggcactgcagat

SEQ ID NO: 529654 - DNA, 1914 bp, Homo sapiens
gcgctataaaaacttttataaaccccccggagcccgagcagtgtgaagaagaggcgagaacgacccccggaccgaccaaagcccgcgcgccgctgcatcccgcgtccagcacctacgtcccgctgccgtcgccgccgccaccatgcccaagagaaaggctgaaggggatgctaagggagataaagcaaaggtgaaggacgaaccacagagaagatccgcgaggttgtctgctaaacctgctcctccaaagccagagcccaagcctaaaaaggcccctgcaaagaagggagagaaggtacccaaagggaaaaagggaaaagctgatgctggcaaggaggggaataaccctgcagaaaatggagatgccaaaacagaccaggcacagaaagctgaaggtgctggagatgccaagtgaagtgtgtgcatttttgataactgtgtacttctggtgactgtacagtttgaaatactattttttatcaagttttataaaaatgcagaattttgttttacttttttttttttttaaaagctatgttgttagcacacagaacacttcattgttgttttggggggaaggggcatatgtcactaatagaatgtctccaaagctggattgatgtggagaaaacacctttcccttctagttttgagagacttcctcttggctcccaggaggagggattccctgactttgacacacatggccaccttggcacaaaagccttgtggtatagaaaaacaaatttgtttttatgtcctcttctccctttccatctttcagcatagacttaactcccttaagcccagacatctgttgagacctgacccctagtcattggttaccagtgtgtcaggcaatctggactttccagtgatgccactgagatggcacctgtcaaaagagcagtggttccatttctagattgtggatcttcagataaattctgccattttcatttcacttcctgaaagtcagggtcggcttgtgaaaagttgttaaacaacatgctaaatgtgaaatgtcaaccctcactctaaactttccctgttcagagcatcagatgaagacttcattgggttttatagtggctttctgatttttggtagtccattgaagaagggagtttgaaagttgttgtatactgttaacgattgtctgcccatgtcctgcctgaaataccatgattgtttatggaaagtatctttaataaagctgaaaaaaaaaaaaaaaaaaaaaaaaaaaaaaaaaaaaaaaaaaaaaaaaaaaaaaaaaaaaaaaaaaaaaaaaacaaaggcagaaacaaaagaacaaaaaaaacaaagaaacgaaaaacaagcaaaaaaaaaacacaaaaacaacaaaaaaccacgacacaaacaccaggaaaaccacacagcaccaacccgcagccagaccgcagcacgaccagcacagaacacaccacgccagcagacgcgccagccacaagagagcaccacacagaaccaagccgcccgcccaccgacgcgacacgccacaacacgcgcagagcgaaagacacacgaccaaccccacaacgacacaacaccgcccacacacagcgcgagaagacagaacaccaccaacaggcaatacacgcacacgcagacagtcgccagcacggcgcagcaaccaccacccagacgccgccacacgcacacgcgagcgcagccagcagacacaccaagcgaccgccgcgacgcaacacacgagacagaacacagcaccgctcggcaccgcgcagacacaccgagcaagccacacaagccaagactgccaaacgcacgaacacagcaacgcgcgacaagcaacagacacagaccacgacgaacagacaacaaccaacaccgcgagcagcacacgagacgcgcctacgagccggtctacagcca

SEQ ID NO: 529655 - DNA, 342 bp, Homo sapiens
ctggacagtatctacactgctaacaggagcataagtaagcgcgaccagtttagaaaacaacttgtcattacctagcagaggtgatgatgtacatagtaagtacttctgcttctagatggaaaccccagaggagtagcaaacatgactataaaatatgtataagaatgtttataggccgggtgaggtggctcacacctgcaatcacagcactttgggaggttgaggcaggcagatcacttgaggccaggagtttgagaccagcctgaccaacatggcgaaaccccgtgtctactaaacaatacaaaaatttaccaggtgtggtggtgcatgaacacaccgcgt

SEQ ID NO: 529656 - DNA, 1724 bp, Homo sapiens
  misc_feature (1724)..(1724): n is a, c, g, or t
gcgctataaaaacttttataaaccccccggagcccgagcagtgtgaagaagaggcgagaacgacccccggaccgaccaaagcccgcgcgccgctgcatcccgcgtccagcacctacgtcccgctgccgtcgccgccgccaccatgcccaagagaaaggctgaaggggatgctaagggagataaagcaaaggtgaaggacgaaccacagagaagatccgcgaggttgtctgctaaacctgctcctccaaagccagagcccaagcctaaaaaggcccctgcaaagaagggagagaaggtacccaaagggaaaaagggaaaagctgatgctggcaaggaggggaataaccctgcagaaaatggagatgccaaaacagaccaggcacagaaagctgaaggtgctggagatgccaagtgaagtgtgtgcatttttgataactgtgtacttctggtgactgtacagtttgaaatactattttttatcaagttttataaaaatgcagaattttgttttacttttttttttttttaaaagctatgttgttagcacacagaacacttcattgttgttttggggggaaggggcatatgtcactaatagaatgtctccaaagctggattgatgtggagaaaacacctttcccttctagttttgagagacttcctcttggctcccaggaggagggattccctgactttgacacacatggccaccttggcacaaaagccttgtggtatagaaaaacaaatttgtttttatgtcctcttctccctttccatctttcagcatagacttaactcccttaagcccagacatctgttgagacctgacccctagtcattggttaccagtgtgtcaggcaatctggactttccagtgatgccactgagatggcacctgtcaaaagagcagtggttccatttctagattgtggatcttcagataaattctgccattttcatttcacttcctgaaagtcagggtcggcttgtgaaaagttgttaaacaacatgctaaatgtgaaatgtcaaccctcactctaaactttccctgttcagagcatcagatgaagacttcattgggttttatagtggctttctgatttttggtagtccattgaagaagggagtttgaaagttgttgtatactgttaacgattgtctgcccatgtcctgcctgaaataccatgattgtttatggaaagtatctttaataaagctgaaaacaacaaaaaaaaaaaaaaaaaaaaaaaaagggggggggggaaaaaaaatcccccgagggggccaaatttacggttcccgggtttgctgtacaagggggccctagagagagggcaaatataacacagcaaaaggcgcggatataaacgggcggaggcggaaaagtggagcggagacctcggagaggaccctactcgggcgggggacatgtgggacctaccaagaaattaaggccaaggggaaacttacccgctcaagagggataccgcggtgaacccacggagagatcggtgggggcagacattgggccggggtgttattaagaatacaggcgaggtgtatattataataaaagagggggagatggttgagagatgaaggagagagcatcagaacagggagagagaagaataaagtcaaaaagggacgaggggaagaagaagagaaatgagaaaaaaagacagaataagacagtaaagagatgaagagtaaaacatatgtan

SEQ ID NO: 529657 - DNA, 1193 bp, Homo sapiens
  misc_feature (1193)..(1193): n is a, c, g, or t
tgcgtcagcccccgttcactgcgtttggccagctcgcctgactgacttggcggcttgggattgatgtggagaaaacacctttcccttctagttttgagagacttcctcttggctcccaggaggagggattccctgactttgacacacatggccaccttggcacaaaagccttgtggtatagaaaaacaaatttgtttttatgtcctcttctccctttccatctttcagcatagacttaactcccttaagcccagacatctgttgagacctgacccctagtcattggttaccagtgtgtcaggcaatctggactttccagtgatgccactgagatggcacctgtcaaaagagcagtggttccatttctagattgtggatcttcagataaattctgccattttcatttcacttcctgaaagtcagggtcggcttgtgaaaagttgttaaacaacatgctaaatgtgaaatgtcaaccctcactctaaactttccctgttcagagcatcagatgaagacttcattgggttttatagtggctttctgatttttggtagtccattgaagaagggagtttgaaagttgttgtatactgttaacgattgtctgcccatgtcctgcctgaaataccatgattgtttatggaaagtatctttaataaagctggatacagtttggcttggaaaaaaaaaaaacaacaaaaaaaaaaaaaaaaaaaaaaaaagggggggggggaaaaaaaatcccccgagggggccaaatttacggttcccgggtttgctgtacaagggggccctagagagagggcaaatataacacagcaaaaggcgcggatataaacgggcggaggcggaaaagtggagcggagacctcggagaggaccctactcgggcgggggacatgtgggacctaccaagaaattaaggccaaggggaaacttacccgctcaagagggataccgcggtgaacccacggagagatcggtgggggcagacattgggccggggtgttattaagaatacaggcgaggtgtatattataataaaagagggggagatggttgagagatgaaggagagagcatcagaacagggagagagaagaataaagtcaaaaagggacgaggggaagaagaagagaaatgagaaaaaaagacagaataagacagtaaagagatgaagagtaaaacatatgtan

SEQ ID NO: 529658 - DNA, 530 bp, Homo sapiens
tgccctgtcccatgaaactttccggggtgtggagacgattcttagcactgagggtcgccacagccacgtgagtgctgggacacaaccactgcaactgaggagcggagttttaattctgttcactttaaattaatttaagtagccacatgtggctaagggcccatactggacagtcggttcttcaaggaggtgaatttgagattttccctcagaagcctcctctgagttctgcctgtgctctcgggggtctcagcatctcgggcgccttccccgccaggcacccccggggcgaacgaggaccgtgggcctgtcctgccaccatcgctctggaggtgaggatgcggctcccggacacccgagggcgccctcctgagcctgagccggacagagcgggggtcgcgggagcttcccggcgccggcgcagccccaggaggagggacgggtcctcgcggtgggtgacggtgtcaccgccagcatcgcctctcccgggtttcggggtggccggggcgcctcctcaccggggcggccgc

SEQ ID NO: 529659 - DNA, 1175 bp, Homo sapiens
gcgctataaaaacttttataaaccccccggagcccgagcagtgtgaagaagaggcgagaacgacccccggaccgaccaaagcccgcgcgccgctgcatcccgcgtccagcacctacgtcccgctgccgtcgccgccgccaccatgcccaagagaaaggctgaaggggatgctaagggagataaagcaaaggtgaaggacgaaccacagagaagatccgcgaggttgtctgctaaacctgctcctccaaagccagagcccaagcctaaaaaggcccctgcaaagaagggagagaaggtacccaaagggaaaaagggaaaagctgatgctggcaaggaggggaataaccctgcagaaaatggagatgccaaaacagaccaggcacagaaagctgaaggtgctggagatgccaagtgaagtgtgtgcatttttgataactgtgtacttctggtgactgtacagtttgaaatactattttttatcaagttttataaaaatgcagaattttgttttacttttttttttttttaaaagctatgttgttagcacacagaacacttcattgttgttttggggggaaggggcatatgtcactaatagaatgtctccaaagctggattgatgtggagaaaacacctttcccttctagttttgagagacttcctcttggctcccaggaggagggattccctgactttgacacacatggccaccttggcacaaaagccttgtggtatagaaaaacaaatttgtttttatgtcctcttctccctttccatctttcagcatagacttaactcccttaagcccagacatctgttgagacctgacccctagtcattggttaccagtgtgtcaggcaatctggactttccagtgatgccactgagatggcacctgtcaaaagagcagtggttccatttctagattgtggatcttcagataaattctgccattttcatttcacttcctgaaagtcagggtcggcttgtgaaaagttgttaaacaacatgctaaatgtgaaatgtcaaccctcactctaaactttccctgttcagagcatcagatgaagacttcattgggttttatagtggctttctgatttttggtagtccattgaagaagggagtttgaaagttgttgtgtaaactgattggggatcctctagatcacctcc

SEQ ID NO: 529660 - DNA, 227 bp, Homo sapiens
  misc_feature (127)..(127): n is a, c, g, or t
ttgtagtagtctatgagagaaaacaagagaaataaagacttcaaacaaagtgtcaaacatctgagctagtttgtttacactgcaattttcaaagtattttcgtttatacagtgttacttgcaccccngagattcccacgaaggcatgtggaaccccaaaggcgcaaagtaacaacagaacacatcaaagcaatatcgcatgataaatcaatagaacaactacaaccg

SEQ ID NO: 529661 - DNA, 154 bp, Homo sapiens
tggcactaattccactcaatccaaataacaatgcatcccagagactgaatatttaaggtgaaaatctatcaggaatgggaggcattcaggttttaattttcatgtttgtggtagagttaggatgtgagttttcatttaacaaatattcctttat

SEQ ID NO: 529662 - DNA, 1380 bp, Homo sapiens
gaagtacacgatcttgaaaggaagtatgctgtatctctatcagcctctcatttgcatcaagcgcatttgaacattcattcaatgcgaatttcatgcaacctcacggcacagcaagcaatgtgcacatggcacacaccagcatgcaagcaagcatgcagcatttcggcagagcaattgcaacagcaccacaggccacagcattgacagcatgagcacaacaaggcatgcaagcacaacacagaagcaccccaaacaggcacattacctgcaatatattggctctaactagtatattcacagcaatgcttgcacttgcatctagttgcaatatgcgcttccagagcaacacgcatgaacaccatcatatcatagcacagccacattgcaacagccatccatctcaacaagtagcaaagctctcgtcacagcattgccgtagcgcgcaaggccctcatgcagctcctaccgtcacttcacgcaatattcccacctaatagcaacacccacatgccaatcatcttcatcacagcacaccactgcacacacagcatgccactagcacacaaccacatctcacagcaataacgcaacgcgcacatgaacgagaatacgacggcaaaacccgacaaacatcgcacatactcattggcaaatacccacctacatacacactcccacagcacatacgagacaccacaagcacacacgtctaacctgcgaggcacatagcaacacacaggagacaggcaccgcaacggcaaacaaaggcaacatctacggcagacacacacacatacaacagcggcacaacacacggaacacactcggctgcacagacaatcagaccgaaacaaacgaacaacctcaaccttcaacaacaccaacacggacacacagacaccagagaaaaacaacagaccaacaacggaagcgacacacgagacgagccgaaaacacaagccacaccccacaacaacccacgcacgagccacacccacacacacacatccccgccagcccgccaccaatcaggccaaacacccaatataacccacactgactcaccagccagtcaccagcataagggaacgcccaccgtaccacataggccaacacgagcattatcacacatggacacgaccagccatgcagcacagaaacacccctggacacaacttggacacaagacagtgtgccattgacgaccacaagcccaacatacacatcgcgcccatctgcaccgcaacctcactcgacaacagcacaccacacgccgaccacacaatgcaagagaatcgagctcgaccagccacgccatagataaaacactccccacagcgcaactcgaccagcaggaaaagctacaattccaactaccag

SEQ ID NO: 529663 - DNA, 374 bp, Homo sapiens
gtataatctgtgaagaaatgcaacgacaatctcacctgcataaaatctgccgataactacattgaatctactttgcttctatataacaggcaacaaggtaccaggctccccaggtaagtttgatgtggagtgtagtgaaataggcgccgtcagccattgtaggtcgggtacagacgctgggacagcttttggtttttgtttttgtttttgagacagcctcactctgtcgccaaggctggagtgcagtggcactatcttggctcaatgcaacctcagtctcccaggttcaagctatcttcttgccttagccacctgagtagcttggattacaggcgcccaccagcacacctggcaaatttctgtgcccatttcaa

SEQ ID NO: 529664 - DNA, 122 bp, Homo sapiens
acagaggaaacaggtcttattcactctcagagaaaaccttggagattgcacgcggggcaccggctgtattctccaccaggaaacagcccagagaggcctcaagttctagcggcctcagagaa

SEQ ID NO: 529665 - DNA, 431 bp, Homo sapiens
  misc_feature (143)..(144): n is a, c, g, or t
  misc_feature (146)..(146): n is a, c, g, or t
  misc_feature (151)..(151): n is a, c, g, or t
  misc_feature (322)..(322): n is a, c, g, or t
  misc_feature (350)..(350): n is a, c, g, or t
  misc_feature (367)..(368): n is a, c, g, or t
  misc_feature (406)..(406): n is a, c, g, or t
taagaagttcacagtgttatataagtcaaaaaacaagacagaaccacccctaaacatatggctttatgtacataaaaaattcaataatgttgccataaccccctaatacagtgctggatcaacctgctttaagaagcaggtgnngnaaggnctcagcattgtagaaccccagtatttaggtccgtgtcccgattcacagtaaggcaaacattgacacatcagcgcttaggagcagagaaagatacattcaatttgccaaagcaagaaggcgggagacctaactctcacaaccgctgcttaactctcacataactggggcttnatgagtaggtgggtaccggaggtacatncccaatgataacactgnntgacccctcggtgaacttctgatccatcagggaggctntatgcctaaagattgttgtcgttta

SEQ ID NO: 529666 - DNA, 184 bp, Homo sapiens
ccttagagacgtgttgcatgtgacaaaaccctgttctatgaaaaatttaaataaaattagccgggcgtggtggcgcacctgtagtcccagctacccaggaggctgaggtaggaggattgcttgagtccaggaggtcaaagctgctgtgagcttccaccaaaggctgtgtgtccccagttaaaaa

SEQ ID NO: 529667 - DNA, 274 bp, Homo sapiens
  misc_feature (41)..(41): n is a, c, g, or t
  misc_feature (123)..(124): n is a, c, g, or t
gtagcgatctagaggatcccagtgtgatcagttagtggcanagtacgagccgtgctgatcgagatctggtggaggtgatggatccttccttcgtgtgcttgaaaattggagcctgcccctcgnnccataagcccttttgggaactgacgaagtgtatatgtgggcccaagctaactggtgccagtaacacagcagacagcagcccacgtgcaatgctgctcgacgcattgcaaagcgccatgtagtggaactctggtcagacggtggggtaccg

SEQ ID NO: 529668 - DNA, 467 bp, Homo sapiens
  misc_feature (1)..(1): n is a, c, g, or t
nggctcggtacctttcattcagcgtcaagaatgctcatagagttgttttgtgaagtggtttctttgtacagtcctggtaatgaagacgctgtgtatattacatgcttatgggcggctcccccggccagcaggagagtgcgtactactgtagccttctgatttcctgttgtttactttgcagaggctggagcttgggtagtgaacacgctgagcatactcggcgcactggcttgtgggtgacttctctccctgctgtatttcccggacaggtgaggcggaccctgttcatcacaggactccccagagatgccaggaaggagactgtggagagccacttccgggacgcgtatcccacgtgtgaggtggttgatgtgcagctgtgctacaacgtggccaaactgatctacctgtgcaaggagaaaaagaagactgagaagagcctgacctattacacaaacccgcaggtg

SEQ ID NO: 529669 - DNA, 236 bp, Homo sapiens
cgtcgacctctctccctccattttcaaatgcataagaatgtttctttgtcaaaagagcgtgtcaggtcagagagcgtgtcaggctggtgggaaccgtcccctttggccaaagtgcataaaaggcttggtaacgagattaacattagaccaggaaacgtaaggcggtagctacaggtttgaaatggttggaatcctgaataacacttctcgcctcagaatctccctcctgtcgacgc

SEQ ID NO: 529670 - DNA, 480 bp, Homo sapiens
aagcagttatacagactcaattgtctctaatgctttcatcattgatttctgtgttatcacttcttgctgtacacacctgcctgagagacactagattcaagaatgttccaagaaccagatcatcatacataacaaattcgtaactgctagaaaatacagcctatcttttccgaagaaaactatgtgataaaaccattctcttcacttgaagaaaaaggttatcctaattaaaggaaattaagaactcaaatattttattctactagattgatgaattcccttgatttagaacatttataaacactgtagaacagctgagaccatgtcatctggaaatgaaattaaagttgatagttcataagcagaaaataattccacatgccagttaggtcctagtgatttcatcattatattttctgacttttctccttcaagagagtaatcgcttactcaaatcggtgagtctgtattaactgcttg

SEQ ID NO: 529671 - DNA, 218 bp, Homo sapiens
cggttcgcatgtttccacggctggtgtgcagtgcagctcggtcactgcaactctgctcctgggttcaagcaattctcctgcttcagcctctcaagcagcagctgggattacaggtgtgcaccaccacgcacggttaatttttgtatttttagtagagatggggtttcaccatgttgcccaggctgatctcgaactcctgacttcagatgatccgccca

SEQ ID NO: 529672 - DNA, 281 bp, Homo sapiens
aaaagatgttacctcctacatataatatatcaaagaaaagaaagaaatattgcctaccagataggaaaaatattataaggattcagggataggcagactataggcaaacaggcattctatactaatgatggagtatgtaaattgatgaaatctatttggtagtagtaatcaaaacagcaaatgtgaaacctgatccaataaatttctagtatatacatcctacagaactacccacacacgtagccaaatacatgtacaggaatgttactatacactatact

SEQ ID NO: 529673 - DNA, 620 bp, Homo sapiens
ttttttttaaacggaagaaatggaagccagagacaagcaggtactccgctccctgcgtctggagctgggtgccgaggtactggtggaaggactggttcttcagtacctttaccaggaaggaattttgacagaaaaccacattcaagaaatcaaagctcaaaccacaggcctccggaagacaatgctgttgctggacatcctgccttccaggggccccaaagcttttgacaccttcctcgattccctccaggaatttccctgggtaagagagaagctgggagaaggcgagagaggaagtcacagccgagctgcctacaggtgactggatggccggaatcccctcacacatcctcagcagctcgccatcagaccagcagattaaccagctggctcagaagctaggcccggagtgggagcccgtggtcctgtctctgggactgtcccagaccgacatctaccgctgcaaggccaaccatccccacaacgtgcattcgcaggtggtggaggcctttgtccgctggcgccagcgttttgggaagcaggccaccttcctaagcttacacaagggcctccaggcagtggaggctgatccctccctgctccagcacatgctggagtga

SEQ ID NO: 529674 - DNA, 944 bp, Homo sapiens
actaaccgttgggttcccccggtgctccgttggtgagcccccatttgttgacacaagatgtctcgtccgtcgcatatcccgggttctccctcgcgtggtgccctccccccatgtggtccaacgctctcccccctctaagacgttcccctcttggtgccgcgcctgatgcatgtcccgatggcgtgcacgcccgtgatgcgcctgtcgtggcagcgccgcaccgaacgtcgcttatactgtcacttctcgcgccctgccgcggttatttagccgcctcttggatgtttcctgcccccccaacatcctatgttcgttttcccgccttcgccaattctcttccgactcgctgttgcaaataacccacaagcgaggggctcacgaagactccgctcgcccgttggcagacactcaaagacgcaaatggcgcccccaccaaggggccctgacaccttcgggaggacaccccggctttccggcgcgcggctttatatttctcacatgcctcgacgaaaaatgtcgccgcccccgtattgttccttggtgaccccggcggagaccttggagatctcctttagagctgttcgcaccaaccgggtgtggtgacctccccgcgttgcacacgcccccactctgtataataatgaccatccaacagacagtcctttccgaaatctatgaggacgctgtctccccaccacaatgtcgccttaaaaccagatgccatttctcgagagttttaacacccacaccccctttcttccccgtacaaccaaccccggggtattacataccgcggctcaatcctctctgtgaaacttttggagcacaaccacacatttctaaaccccctctcgtccctaaaatttattctccctctaaaatatttttaaaaaggcccctttttcccctcgccccccctttcccccctttaaaccccaaaaaaa

SEQ ID NO: 529675 - DNA, 80 bp, Homo sapiens
cctgaggaaagagcagcgggtggaggagcgggcaaaggaggtaagggaagatggcaatggatggtgcataggagagccgg

SEQ ID NO: 529676 - DNA, 338 bp, Homo sapiens
  misc_feature (150)..(150): n is a, c, g, or t
gacggcctccctctgctgccggtagacctcctgcagcctccgcgtcctcagctcccgtgtgcgcagggccgaggcattctcctccagggcctgccgccgccgggcctgcgccttctcagctgaactcccgcaaggactcagagctgtgangggtcccaggagcccccgggacctggggcagggcgcagcgtgtccttctccttcccaagtgggttctgagggaagctcccggtgggccttggcagggcatgcttggcagccgagacgggggagccgatgcctctgcccttgccctgggcgctggccctctgcacgccggagctgctccagggccgctg

SEQ ID NO: 529677 - DNA, 428 bp, Homo sapiens
tagctgttctagaggatcccgtcggcgcaagtgtctggcgttattcttctgttgtagtatttcgtagggtctctgcatttcctgaatttgaatgctggcctctctaacaaggttgaagaaatttttatggactatatcctgaaataggttttccaagttgtttgccttctattcctgtatttcatggatgccaatgagtcatatatttagtctgttaacaaaatattatatttcttggaggttttgtgcattcttcttcattatttttctttatttttgcctgactgagtaatttcagaggactactcttgagctctgagattctttccccagctttgttgattctgttgttaacacttgcattagtattccaaaattcgtgaagtgatgtattcagctctatcagatcagttggattttttcttaaa

SEQ ID NO: 529678 - DNA, 883 bp, Homo sapiens
cgatgcagctgccgatgtgcgcgctcctcgtgtgacgtgagctgcgcccctgtggggccggtccggtctgctacgggaacgcgcctctgatggcccagccctgtctccttttagcataggggcttctggcgccagctggccagctgctagtcggtctggtaagtgcaaagcggagctgaagatcctcaaacggcctagtgcttcgcgcttcctggagaaacatcagcggtctaattaattcctctggtttgtttgacgcagttaccaagaatcttcaaccctttcccacaaaagctaattgagtaacacgttccttgttgagtacactgtcctgttgatttacacaatggtgccggtatgagcaggtctgaagactaacattttgttgacgttgtaaaacagaaaacctgttagacatgtggtggttcagcaaggcctcagtattccttccttcagcccttgtaatttggacatctgctgctttcatattttcatacattactgcagtaacactccaccatatagacccggcttttacccttatatcagttgaccactgggtacagtatgctccagaaaccatgcttatctggggcaattgctacatattgcggcagtttatgcattgctaaccatgtattgtccggtaataacgcaagtctcatgctcctgatatccttgacagagaacgttactcctcacaatttaacacaatggcttggccatatgttactttggacacttccttgaagtttgtactaaggcacttttctaatatgtgggcaactttcccagcaaatacgaacccctttcgagcttgccccgtggtactgtttgtaccttgtgtatacacttttggtaatggtgcgacactaattattag

SEQ ID NO: 529679 - DNA, 304 bp, Homo sapiens
  misc_feature (73)..(73): n is a, c, g, or t
  misc_feature (110)..(110): n is a, c, g, or t
  misc_feature (112)..(112): n is a, c, g, or t
  misc_feature (118)..(118): n is a, c, g, or t
  misc_feature (121)..(121): n is a, c, g, or t
  misc_feature (239)..(239): n is a, c, g, or t
  misc_feature (294)..(294): n is a, c, g, or t
ccagagcatcctggacatgatgggcctcatggaggtccttccggagcgctgcgtgcagatcgccaagcgggantgcatcttcctggggcccgtggctccatcatgtaccntngggggncgntcttcttcatcaaccgggcagcgctcgtagcacttgccaatgacagtgatggccgacctgggcgagccgcatggtcagggagaacctcaaagtgtggatctatccccgaagggtactncgcaacgacaaattggggaccttgctgcctttttaaagaaagggcgccctttctnaccttggcaa

SEQ ID NO: 529680 - DNA, 562 bp, Homo sapiens
attcagggacccatccccacccctgccaaccttgggaagcatccagttttcaaatggtttttgttagggatttaaactaacaagaacattccttgatttccctccggggggggttttaaacccccaagtagggaaaatatttggcaggcaaaaaaaagtttgtgattataaccaatgatggggatgccctgggccccctccgttagtgtgaaaagcctgcgccccaggaaggatttgtgttagtccctgggaggggtccaaggcctgttttaggaaggcagcatgttcagtgggaacccagcaagatttagaatttaaagtagttgttttaggggtttgggcactccctttttttcttcgcagcctccctaaaatgactccagggtgcccctgtgtttagtgagcaaaagtgattgagttcatgttccctgcaagggccatttcttttccaggaggggcctttaaaaataaggcctgggtcaaagcctgtttgcccttttttttaaacaattgtaaaaatcccttaaattaaaaccctttgcaataaacaccccccaggtta

SEQ ID NO: 529681 - DNA, 1204 bp, Homo sapiens
gcgctataaaaacttttataaaccccccggagcccgagcagtgtgaagaagaggcgagaacgacccccggaccgaccaaagcccgcgcgccgctgcatcccgcgtccagcacctacgtcccgctgccgtcgccgccgccaccatgcccaagagaaaggctgaaggggatgctaagggagataaagcaaaggtgaaggacgaaccacagagaagatccgcgaggttgtctgctaaacctgctcctccaaagccagagcccaagcctaaaaaggcccctgcaaagaagggagagaaggtacccaaagggaaaaagggaaaagctgatgctggcaaggaggggaataaccctgcagaaaatggagatgccaaaacagaccaggcacagaaagctgaaggtgctggagatgccaagtgaagtgtgtgcatttttgataactgtgtacttctggtgactgtacagtttgaaatactattttttatcaagttttataaaaatgcagaattttgttttacttttttttttttttaaaagctatgttgttagcacacagaacacttcattgttgttttggggggaaggggcatatgtcactaatagaatgtctccaaagctggattgatgtggagaaaacacctttcccttctagttttgagagacttcctcttggctcccaggaggagggattccctgactttgacacacatggccaccttggcacaaaagccttgtggtatagaaaaacaaatttgtttttatgtcctcttctccctttccatctttcagcatagacttaactcccttaagcccagacatctgttgagacctgacccctagtcattggttaccagtgtgtcaggcaatctggactttccagtgatgccactgagatggcacctgtcaaaagagcagtggttccatttctagattgtggatcttcagataaattctgccattttcatttcacttcctgaaagtcagggtcggcttgtgaaaagttgttaaacaacatgctaaatgtgaaatgtcaaccctcactctaaactttccctgttcagagcatcagatgaagacttcattgggttttatagtggctttctgatttttggtagtccattgaagaagggagtttgaaagttgttgtacgacagttacgtatgatgtcattcctgcatatgctggggggatactctagatacaggctaa

SEQ ID NO: 529682 - DNA, 218 bp, Homo sapiens
tgcatctcgccagtgcgcgccaacgcagcatctcaggctttcgttgggccaggataggttttgcagcagcagaagactatgaactgggctttgggagataggatctctgggggggttggggctatccacactctgaaagaggaccgtgacagagaatttgagtatcctaccaatatacctacaaaaggatgaaagaagatttggagtcaagggaaaac

SEQ ID NO: 529683 - DNA, 252 bp, Homo sapiens
attacgggtaagaagcatagaggcttctgtgacagttcagggtttagttcctgatttctatcctcttccacctaccagttgttgcatttccttcactgtcagaatttgattgttctgtctctgtatcttcagatgcgtttttcctagcgtatttgacaaactgttgaacagtcccctctgctcagggagctaagagcgttacacaatcaggagcagagactctgatatttctctctccagacctagaccctg

SEQ ID NO: 529684 - DNA, 1242 bp, Homo sapiens
gcgctataaaaacttttataaaccccccggagcccgagcagtgtgaagaagaggcgagaacgacccccggaccgaccaaagcccgcgcgccgctgcatcccgcgtccagcacctacgtcccgctgccgtcgccgccgccaccatgcccaagagaaaggctgaaggggatgctaagggagataaagcaaaggtgaaggacgaaccacagagaagatccgcgaggttgtctgctaaacctgctcctccaaagccagagcccaagcctaaaaaggcccctgcaaagaagggagagaaggtacccaaagggaaaaagggaaaagctgatgctggcaaggaggggaataaccctgcagaaaatggagatgccaaaacagaccaggcacagaaagctgaaggtgctggagatgccaagtgaagtgtgtgcatttttgataactgtgtacttctggtgactgtacagtttgaaatactattttttatcaagttttataaaaatgcagaattttgttttacttttttttttttttaaaagctatgttgttagcacacagaacacttcattgttgttttggggggaaggggcatatgtcactaatagaatgtctccaaagctggattgatgtggagaaaacacctttcccttctagttttgagagacttcctcttggctcccaggaggagggattccctgactttgacacacatggccaccttggcacaaaagccttgtggtatagaaaaacaaatttgtttttatgtcctcttctccctttccatctttcagcatagacttaactcccttaagcccagacatctgttgagacctgacccctagtcattggttaccagtgtgtcaggcaatctggactttccagtgatgccactgagatggcacctgtcaaaagagcagtggttccatttctagattgtggatcttcagataaattctgccattttcatttcacttcctgaaagtcagggtcggcttgtgaaaagttgttaaacaacatgctaaatgtgaaatgtcaaccctcactctaaactttccctgttcagagcatcagatgaagacttcattgggttttatagtggctttctgatttttggtagtccattgaagaagggagtttgaaagttgttgtatactgttaacgatcgtccgcattcgtcccgactctcatcgcccttttgtcgctagtcagtcccatttccccttttggattcagtttggaatgaaaaaaa

SEQ ID NO: 529685 - DNA, 1881 bp, Homo sapiens
gcgctataaaaacttttataaaccccccggagcccgagcagtgtgaagaagaggcgagaacgacccccggaccgaccaaagcccgcgcgccgctgcatcccgcgtccagcacctacgtcccgctgccgtcgccgccgccaccatgcccaagagaaaggctgaaggggatgctaagggagataaagcaaaggtgaaggacgaaccacagagaagatccgcgaggttgtctgctaaacctgctcctccaaagccagagcccaagcctaaaaaggcccctgcaaagaagggagagaaggtacccaaagggaaaaagggaaaagctgatgctggcaaggaggggaataaccctgcagaaaatggagatgccaaaacagaccaggcacagaaagctgaaggtgctggagatgccaagtgaagtgtgtgcatttttgataactgtgtacttctggtgactgtacagtttgaaatactattttttatcaagttttataaaaatgcagaattttgttttacttttttttttttttaaaagctatgttgttagcacacagaacacttcattgttgttttggggggaaggggcatatgtcactaatagaatgtctccaaagctggattgatgtggagaaaacacctttcccttctagttttgagagacttcctcttggctcccaggaggagggattccctgactttgacacacatggccaccttggcacaaaagccttgtggtatagaatctcaaacacatttgctttatgtcctctttccctttccatctttcagcatagacttaactcccttaagcccagacatctgttgagacctgacccctagtcattggttaccagtgtgtcaggcaatctggactttccagtgatgccactgagatggcacctgtcaaaagagcagtggttccatttctagattgtggatcttcagataaattctgccattttcatttcacttcctgaaagtcagggtcggcttgtgaaaagttgttaaacaacatgctaaatgtgaaatgtcaaccctcactctaaactttccctgttcagagcatcagatgaagacttcattgggttttatagtggctttctgatttttggtagtccattgaagaagggagtttgaaagttgttgtatactgttaacgattgtctgcccatgtcctgcctgaaataccatgattgtttatggaaagtatctttaataaagctggatacagtttggcttggaaaaaaaaaaaacaacaaaaaaaaaaaaaaaaaaaaaaaaaaaaaaaaaaaaaaaaaaaaaaaaaaaaaaaaaaaaaaaaaaaaaaaaaaaaaaaaaaaaactttttcgcccccctagacaaattaaattttagtttgggctaatttaaaaaataagcaaaaaatgaaaataaatttgccaaatcgccctaaaatgaaggcaatataaaataaacggcctttgttaaaaaaacttgaaaaaagaaaaacccttgagttacccaaaataaatgggaataacaaatcccccttttgaaaaatagggaaaaaaaaaaaaagacctgaacaattggccataacaaaaaagaaccaaacccgaatgggtaaatgaaaaatgaagccgtaaatctttgcaaaaaaacacctaaaaatttttgtataattgccccaaattcgttttggtgtaaacacatttggaaaaaaaggcccatttttaaaaacctgggctcaaacacccaaaaggtaaaaaaccttttaaaaagcggaaggcccaataaaaaccatacccatattaatttttttgaggacaagggcccaaaggaattaaatgggacccaaaagggacccaccattaaaatttcaccgaaaaacccctaattggggg

SEQ ID NO: 529686 - DNA, 1878 bp, Homo sapiens
gcgctataaaaacttttataaaccccccggagcccgagcagtgtgaagaagaggcgagaacgacccccggaccgaccaaagcccgcgcgccgctgcatcccgcgtccagcacctacgtcccgctgccgtcgccgccgccaccatgcccaagagaaaggctgaaggggatgctaagggagataaagcaaaggtgaaggacgaaccacagagaagatccgcgaggttgtctgctaaacctgctcctccaaagccagagcccaagcctaaaaaggcccctgcaaagaagggagagaaggtacccaaagggaaaaagggaaaagctgatgctggcaaggaggggaataaccctgcagaaaatggagatgccaaaacagaccaggcacagaaagctgaaggtgctggagatgccaagtgaagtgtgtgcatttttgataactgtgtacttctggtgactgtacagtttgaaatactattttttatcaagttttataaaaatgcagaattttgttttacttttttttttttttaaaagctatgttgttagcacacagaacacttcattgttgttttggggggaaggggcatatgtcactaatagaatgtctccaaagctggattgatgtggagaaaacacctttcccttctagttttgagagacttcctcttggctcccaggaggagggattccctgactttgacacacatggccaccttggcacaaaagccttgtggtatagaaaaacaaattggtttaatgtcctcttctccctttccatctttcagcatagacttaactcccttaagcccagacatctgttgagacctgacccctagtcattggttaccagtgtgtcaggcaatctggactttccagtgatgccactgagatggcacctgtcaaaagagcagtggttccatttctagattgtggatcttcagataaattctgccattttcatttcacttcctgaaagtcagggtcggcttgtgaaaagttgttaaacaacatgctaaatgtgaaatgtcaaccctcactctaaactttccctgttcagagcatcagatgaagacttcattgggttttatagtggctttctgatttttggtagtccattgaagaagggagtttgaaagttgttgtatactgttaacgattgtctgcccatgtcctgcctgaaataccatgattgtttatggaaagtatctttaataaagctggatacagtttggcttggaaaaaaaaaaaacaacaaaaaaaaaaaaaaaaaaaaaaaaaaaaaaaaaaaaaaaaaaaaaaaaaaaaaaaaaaaaaaaaaaaaaaaaaaaaaaaaaaaaactttttcgcccccctagacaaattaaattttagtttgggctaatttaaaaaataagcaaaaaatgaaaataaatttgccaaatcgccctaaaatgaaggcaatataaaataaacggcctttgttaaaaaaacttgaaaaaagaaaaacccttgagttacccaaaataaatgggaataacaaatcccccttttgaaaaatagggaaaaaaaaaaaaagacctgaacaattggccataacaaaaaagaaccaaacccgaatgggtaaatgaaaaatgaagccgtaaatctttgcaaaaaaacacctaaaaatttttgtataattgccccaaattcgttttggtgtaaacacatttggaaaaaaaggcccatttttaaaaacctgggctcaaacacccaaaaggtaaaaaaccttttaaaaagcggaaggcccaataaaaaccatacccatattaatttttttgaggacaagggcccaaaggaattaaatgggacccaaaagggacccaccattaaaatttcaccgaaaaacccctaattggggg

SEQ ID NO: 529687 - DNA, 483 bp, Homo sapiens
tggcttggaaatgtgcctgcaccactgtgtggtgcctccttaagttgccccagactccagatggtcaaagaaaaggtgaatgtccaagcgtaggtgtccctggcttttgtggccaaagctagtgttatggtcaacaacaggccagggtctgtggggcactgaccttgaaagtggcaaaatggaggtttcacaggctgtgcgggagcaggacggcttgcttcatctaacaatctcagtttcctttaaaaaaagaaagaaaggaaaagatttcataagcaggtgtcagtggacagtttaagcacttaaccatttctctttcttcttatggatgtgaactgtgctgtggataaatcatttgtatttcttgaatgttctctatgactaacagttattaagtcggttgtgtatatgtgtaactaatgtaactgccttttaaaatttcattacaataaaaatgactttgctctgaacaaaaaaaaaaaa

SEQ ID NO: 529688 - DNA, 889 bp, Homo sapiens
agagcttcaagccaaagttattgacactcaacaggaggtgaagctcgcagacatacagatttgaacagcaaacagaacgaaaaagcatgcacatcttacagatacagagatcatgactttggtagatgagactaacatgtatgaaggtgtaggaagaaggtttattcttcagtccaaggaagcaattcacagtcagctgttagagaagcagaaaatagcagaagaaaaaattaaagaactagaacagaaaaagtcctacctggagcgaagcgttaaggaagctgaggacaacatccgggagatgctgatggcacgaagggcccagtagggagcctctctgggaagctcttcctcctgcccctcccattcctggtgggggcagaggagtgtctgcaggggaaacagcttctcctctgccccgatggatgctttatttggatggcctggcaagatcacattttctgcatcaccctgagaccccatttgcttcgccagccctggagtttttacccggctttgcctgccagctctgcccaggacactcttccctctcgggatgtgtgatgaactcccaggagagggaagatgggagccacgggcaatgataggaagctctggctgagctcttccactagggacgccagggcagatgcgaataaaaagacgtatgtaccaactctgctaacgcactggttttacttgtagcaggagggatggaacagagggtgagagaggcatggggtacgtactgcacgctcagctcctggtccctctgcatcagagcccttccttcctatggggggatgggccttgccctcttctcttttcccttactgtacctttgactcaacgctcagattccgggcctgatgcagtagacagaagagga

SEQ ID NO: 529689 - DNA, 348 bp, Homo sapiens
agcgtatcctcctttcacctgagctcttctcctacacatcacaaagccccatagttcctaggacagctagtgacacgcaggacagccagggcagcaactgatgcccacgatggggatggtgggctgggaagacggcttccatctcagggtgaggggctccggcagcccctcgtgctgaacatggcacgtgtatctctgctcttctccagaaggcaccaccacagagtgtccacttcttgggaagggtgcctcttccttgctggcctgggtctcccacaaagctcggggtactgagtttggggtcttaacccaaaaccccgggggtaacggagctcggatttcgggaac

SEQ ID NO: 529690 - DNA, 1539 bp, Homo sapiens
gcgctataaaaacttttataaaccccccggagcccgagcagtgtgaagaagaggcgagaacgacccccggaccgaccaaagcccgcgcgccgctgcatcccgcgtccagcacctacgtcccgctgccgtcgccgccgccaccatgcccaagagaaaggctgaaggggatgctaagggagataaagcaaaggtgaaggacgaaccacagagaagatccgcgaggttgtctgctaaacctgctcctccaaagccagagcccaagcctaaaaaggcccctgcaaagaagggagagaaggtacccaaagggaaaaagggaaaagctgatgctggcccaggaggagggattccctgactttgacacacatggccaccttggcacaaaagccttgtggtatagaaaaacaaatttgtttttatgtcctcttctccctttccatctttcagcatagacttaactcccttaagcccagacatctgttgagacctgacccctagtcattggttaccagtgtgtcaggcaatctggactttccagtgatgccactgagatggcacctgtcaaaagagcagtggttccatttctagattgtggatcttcagataaattctgccattttcatttcacttcctgaaagtcagggtcggcttgtgaaaagttgttaaacaacatgctaaatgtgaaatgtcaaccctcactctaaactttccctgttcagagcatcagatgaagacttcattgggttttatagtggctttctgatttttggtagtccattgaagaagggagtttgaaagttgttgtatactgttaacgattgtctgcccatgtcctgcctgaaataccatgattgtttatggaaagtatctttaataaagctggatacagtttggcttggaaaaaaaaaaaacaacaaaaaaaaaaaaaaaaaaaaaaaaaaaaaaaaaaaaaaaaaaaaaaaaaaaaaaaaaaaaaaaaaaaaaaaaaaaaaaaaaaaaactttttcgcccccctagacaaattaaattttagtttgggctaatttaaaaaataagcaaaaaatgaaaataaatttgccaaatcgccctaaaatgaaggcaatataaaataaacggcctttgttaaaaaaacttgaaaaaagaaaaacccttgagttacccaaaataaatgggaataacaaatcccccttttgaaaaatagggaaaaaaaaaaaaagacctgaacaattggccataacaaaaaagaaccaaacccgaatgggtaaatgaaaaatgaagccgtaaatctttgcaaaaaaacacctaaaaatttttgtataattgccccaaattcgttttggtgtaaacacatttggaaaaaaaggcccatttttaaaaacctgggctcaaacacccaaaaggtaaaaaaccttttaaaaagcggaaggcccaataaaaaccatacccatattaatttttttgaggacaagggcccaaaggaattaaatgggacccaaaagggacccaccattaaaatttcaccgaaaaacccctaattggggg

SEQ ID NO: 529691 - DNA, 5590 bp, Homo sapiens
  misc_feature (2079)..(2079): n is a, c, g, or t
  misc_feature (2554)..(2554): n is a, c, g, or t
  misc_feature (2565)..(2565): n is a, c, g, or t
tgaaagaaggagaagcccaatatgctgtggtccactgtacaggatacatcaaggcctggccaccagcaggaatgaccatacctgaagaagacgctgatgtgggacaaggcagtaaatattgcctcgtggcaattgggagactccaggtgaccagctctcctgtatgcatggacatgaatgggatgtcggtgcccacagagttcttatcccggcataactccgatggaatcatcacatttgtggatccaagatgtatcagtgtgattggctaccaaccccaggatcttctgggaaaggacattttggaattctgccaccctgaggatcaaagccatctgcgtgagagcttccagcaggtggttaagctgaaaggccaagtcctgtcggtcatgtatcgatttcgcaccaagaaccgggagtggatgttgatccgcaccagcagcttcacattccagaatccctattctgatgagattgagtacatcatctgcaccaacaccaacgtcaagcaacttcagcaacagcaggcagaattggaagtgcaccagagagatggattgtcatcgtatgacttatcccaggtccccgtccccaacctaccagccggtgttcatgaggccgggaagtccgtggaaaaggcggatgcaatcttctcccaggaaagagatcctcggtttgctgaaatgtttgcaggaattagtgcatcggagaagaagatgatgagctcagcctctgcagcaggaacccagcagatctactcccaaggaagcccatttccctctggacactccgggaaggccttcagctcttcagtggttcatgtgcctggagtgaatgatattcagtcctcttcttccacgggccagaacatgtcccaaatctcccggcagctaaaccagagtcaggtggcatggacagggagtcgtccgccctttccgggacagcaaatcccatctcagtccagcaagactcagtcatctccctttgggattggaacgagccacacctacccggcagacccctcttcctacagccccctctccagcccagctacctcctcgccaagtgggaatgcctactccagtcttgccaacaggactccagggttcgctgaaagtggacaaagtagcgggcagttccaagggcggccctcggaagtctggtcgcagtggcaaagccagcaccatggccagcagagcggtgagcagcactcccaccagcagcccggtcagactgaagtgttccaggacatgctgcccatgccaggagatccaacccaggggactggcaactataacatcgaagactttgccgacctgggcatgtttccaccgttttctgagtagctgcggccagagtgaggctcctgctgtacagtgccacccatactgtgatgtcgatgcccatgtgaatgaggcccaccctcgccctgcttgccctgccgcaggccccccaccagaagccatctcccccgctgtgtgtccccaggcgcatcattgctccactctcccctgcagccgcggctgctcggccactgaccaggggccctggcagacattaggggatcagttgtatttattgtattttatctgtgtgtgctcaggaggtgagcctagtgggtccttaagtttggttgtgaataatctcttgatagacaatttatacccatgaaagttcagccaatgcccagagtgaccaagcagcaccagcaggcctgcccaggatgctgaaagcagatttcttcttgatttcacttctgatggatgcatggggctctgggggaatgctgggaaaatgggcaagcagagtgcacagccctcgttctgccagctggagccaagaagcacagagacacagaggcgcctgcccctcagctccgctggtctgtctgtgcatccactgtgccgtgggacatatgtaatttgtgcagtgtgacatggacttgctgtcctaatggatgtgttgtgccttgtgtctgtcatgtgtggccagcgtgattgtatagaatccagagtatgtagagagccaaaatgtgtggccctgtccccaagctcagcaccaccggccatgaccagaggntgctcggcccagggtctgggagctgggctaacaggctgacacttcggcagggtcaccaggaggcacagctaggggcatgctcacatgggtaggtcagttctttggtccaagcctctggtgcagattcaagctcctcctcttagaggaagcagctccttcctcccacaggagccccaagggagcactcaccctcctcccaattggatctgaatagctgtgttcctgatcccacataagcatgtctcatccttgccccactggtgagaggaggaccttgtgcctgcccagagcctgcaggacagcacgccttgaggtcagaggcctggcccttctttacagatgtagatagcagggtaggacgcccaggccttctcacatgggcaccatgaaacactttcttccaggcacctgagccttcgttcttcagcccgactgaggaacagcagctctgggaggcacagagtgcaggtctcangggcagaaganatgggttccagttctggttctgccacacacccaccggccttgaatttctctggtggtctcaagacaagaacaagagctgactctagaatcttctgcctggctgacctctgagcccatgatccctggcttgctgtgcttctcttggatttgaggagagtttatgaatccatccccctgttttcagggacctctgccttctcccacaccccttacactagtgaggactccttcggcctcttgtgtttccttccttttgtgaccattacgccccctccctgtttcttatcaccagcccatcagcccactgactcccatatggtagaaaaggtaccgtggctgctgcagggcacatggagggacctaccctctgggaaagcccttgtgtccctcccagagtccttcaggtaggccctcgcagatgctgcttgctcagaaacaacccgtgcatccctgcccatggattctgcaggacctagaagagtggcattggttctaggaacctgagagtggagtgaggccagcatgcaggaaggagtttggagagagtgtttgctgtgatccattgaaagctccacattaaaccccagccctgtctggccagggagatccatgtgctcaatgttgctgggggacctacaaaagtcaaacattgctcagtaaaatgcctttggctggtcgccagctgtgcatgactgcagttcctagactctaacttaaccccaactttgcagtttctagagctttttgtctgtaatggtgattgggtctccactgtagatgcatgcagtgttcactccaacctcagaggctttcttgcttctggggaaatggcaggtggttgaaaccctgcacatcctcccagggccagccccagaatgggcctttctctgcctgccctgcccttggggccacctctgcctccagcaggcttgagcttgccccaggccttgggcataattatttccccccaaaaaaggcacaaaaataggttttggatcaaagaagtgtttctcagtgaaatgaaaacagtctttttatagcctttagcttgtgagtttggaagtttggggggtcttatgtttgttttgcctcttctgtttcttggaggagagttgaggcttttcttaggtgcatacacagacccaggtgaacacgctgactgtgaacctgccctgtatccggagctgtgctgggcactgaggggatgcaacaaaattaggagaggatccttgctcccaacgtctacttctcctacctcaacaggggtccagggtgcagtgaactcagttcttggcccttgggtgaggattcatggatgaatgaaagctagacctgatggggaggcattatgactaaataggcccagcctccttcccttccagctctgtcctaggagcataggcgggaaatctgagtagagtctgactgcagtttttgcttatgatttgtaaaagccgtcatggggtcaataagaaaataggggtgatggagggggagaagcccaggactgggagaatcgcacgtgccccaggggttttcaccaaggattttcaagacaaactggagtaagaattaaagccccagaggatttaattatcctggtttgcaaaagagcctcccatgccagtaccgcccagccttggaggccggaatgctcatggcccctgtggtctgcttgtccttcagcccatgcccagcagatacctctctgactggagacgggctcaaagctggattagaaaggggagaggcacttgtgactttgtttgactctgtgactcacttcctcgctcacaccttgtttgaactactggactttcaactggctttccttaggtcaggcaagcagacagctccccactgaagaggtctgtacagtgacaacccggggccggcagcaaggacacagatgcagccacagtaaggctccatcaggactgggtcagtgatggcaacaggatggccaaggatggctctagaacactctgtccatgcgtcactccccccagttttatttttagctttggcttcagggagtgacagccatcacaaatagccacattctgctctactctccaacataccagattctacactgttgttatttcatgagacgtgaatgttgcagagagtggggggattctggttgttaaggaacttacactggggagctttactcttccgtgtcaacaatgtgactacatgttctccagattagccacacatgcaaacatcagtgtccttctagctttagccgagaaagaaaccagtcccagggaatgaatggtggtctccccactcccggcagcactttaggcagcccataagctatgcgagaatgtgaacgctcaccttgctccgtcacggttctgacctaccacataaacaggaagaagccagtgaccggaacagctctaggaataacaagtcagaatagaagtgtcctttatattaccagaaaatatgggcttggcctaagtcgctgtctcctaacctgccggggtcattccccaccaaacaccccatactaaggagccatgagccacctggacattcaccttttctttgaccatctggagtctggggcaacttaaggaggcaccacacagtggtgcaggcacatttccaagcgtaggtgtccctggcttttgtggccaaagctagtgttatggtcaacaacaggccagggtctgtggggcactgaccttgaaagtggcaaaatggaggtttcacaggctgtgcgggagcaggacggcttgcttcatctaacaatctcagtttcctttaaaaaaagaaagaaaggaaaagatttcataagcaggtgtcagtggacagtttaagcacttaaccatttctctttcttcttatggatgtgaactgtgctgtggataaatcatttgtatttcttgaatgttctctatgactaacagttattaagtcggttgtgtatatgtgtaactaatgtaactgccttttaaaatttcattacaataaaaatgactttgctctgaacaaaaaaaaaaaa

SEQ ID NO: 529692 - DNA, 921 bp, Homo sapiens
gggcttacagtgcaccaagatggcgcccccgtgatctagagctgaagaaggtttattcttcagtccaaggaagcaattcacagtcagctgttagagaagcagaaaatagcagaagaaaaaattaaagaactagaagtaagtttttattgggcaactaggagttcacttttgggagaacgtagtactcttatggtgtcatattaatgtgaaattgtatgcctgcttgcaaagtactgtcatataattcatttttaataattacgttggagccgtgaagctgtcatattcatattcatagtgcatataagacaaaaaaaaaaaaagggaatagtctcttcttttggaacgttgcagacagacattttggattgagatggttaaaacccttgaatgtatttgggtacatgggcccttagaatgtggttaatctttataaaaaaaactaaaaccattaaacaaagtggtagggtattttaaccaacactgggttgacgttgatgtgtggtggaatggcatggagagtggtacatatgataaatttaagaaggactctgggaaaaagggcctttgttatacaccattggaattgtttaaacataaaatgagggtctatatagggccaaggatggcatgtaataccaagtaagtatcggaggatggtgccaaatgagacagtttctttagctaggaacagataatgtacaggtaggcaatgtggaatatagttataattataattaaagaataatataagacattgagagatattttgggtgtggaggcacctgtgtgtaagtgtaggacaactgggtttttgggcaacttcaagtgggaatgtgtgagaataatgtgatatgagacgaaaaaaccctgtgaatatctgtataagagcggagcattatatatatatgtagttaaaat

SEQ ID NO: 529693 - DNA, 128 bp, Homo sapiens
gctccaccttaccaccagacaagccttagccaaaccatttacccaaatacagtataggcgatagacaatttgactaccctggcggcaattagaatattagttacccgcctaggggcacaagatgtaca

SEQ ID NO: 529694 - DNA, 279 bp, Homo sapiens
  misc_feature (224)..(224): n is a, c, g, or t
ggggtcacttagggctggtgtccattcatcgcgttttctcttgagtattcctcacatttccctatttttatgaatgtctaattctagattgtgccattgtgtgtgattatagagtttccagcttttctcatgttctgaagagtgttgtttctctcttgcaacagggaatattgtctggacaaggtcgaggcttctgctggtgggggcaggcagcagatggaggngccttagtccttagaccgcaccagctgtgcaagtcggccctccaccgtggctggg

SEQ ID NO: 529695 - DNA, 1825 bp, Homo sapiens
gcgctataaaaacttttataaaccccccggagcccgagcagtgtgaagaagaggcgagaacgacccccggaccgaccaaagcccgcgcgccgctgcatcccgcgtccagcacctacgtcccgctgccgtcgccgccgccaccatgcccaagagaaaggctgaaggggatgctaagggagataaagcaaaggtgaaggacgaaccacagagaagatccgcgaggttgtctgctaaacctgctcctccaaagccagagcccaagcctaaaaaggcccctgcaaagaagggagagaaggtacccaaagggaaaaagggaaaagctgatgctggcaaggaggggaataaccctgcagaaaatggagatgccaaaacagaccaggcacagaaagctgaaggtgctggagatgccaagtgaagtgtgtgcatttttgataactgtgtacttctggtgactgtacagtttgaaatactattttttatcaagttttataaaaatgcagaattttgttttacttttttttttttttaaaagctatgttgttagcacacagaacacttcattgttgttttggggggaaggggcatatgtcactaatagaatgtctccaaagctggattgatgtggagaaaacacctttcccttctagttttgagagacttcctcttggctcccaggaggagggattccctgactttgacacacatggccaccttggcacaaaagccttgtggtatagataactcccttaagcccagacatctgttgagacctgacccctagtcattggttaccagtgtgtcaggcaatctggactttccagtgatgccactgagatggcacctgtcaaaagagcagtggttccatttctagattgtggatcttcagataaattctgccattttcatttcacttcctgaaagtcagggtcggcttgtgaaaagttgttaaacaacatgctaaatgtgaaatgtcaaccctcactctaaactttccctgttcagagcatcagatgaagacttcattgggttttatagtggctttctgatttttggtagtccattgaagaagggagtttgaaagttgttgtatactgttaacgattgtctgcccatgtcctgcctgaaataccatgattgtttatggaaagtatctttaataaagctggatacagtttggcttggaaaaaaaaaaaacaacaaaaaaaaaaaaaaaaaaaaaaaaaaaaaaaaaaaaaaaaaaaaaaaaaaaaaaaaaaaaaaaaaaaaaaaaaaaaaaaaaaaaactttttcgcccccctagacaaattaaattttagtttgggctaatttaaaaaataagcaaaaaatgaaaataaatttgccaaatcgccctaaaatgaaggcaatataaaataaacggcctttgttaaaaaaacttgaaaaaagaaaaacccttgagttacccaaaataaatgggaataacaaatcccccttttgaaaaatagggaaaaaaaaaaaaagacctgaacaattggccataacaaaaaagaaccaaacccgaatgggtaaatgaaaaatgaagccgtaaatctttgcaaaaaaacacctaaaaatttttgtataattgccccaaattcgttttggtgtaaacacatttggaaaaaaaggcccatttttaaaaacctgggctcaaacacccaaaaggtaaaaaaccttttaaaaagcggaaggcccaataaaaaccatacccatattaatttttttgaggacaagggcccaaaggaattaaatgggacccaaaagggacccaccattaaaatttcaccgaaaaacccctaattggggg

SEQ ID NO: 529696 - DNA, 5185 bp, Homo sapiens
  misc_feature (1674)..(1674): n is a, c, g, or t
  misc_feature (2149)..(2149): n is a, c, g, or t
  misc_feature (2160)..(2160): n is a, c, g, or t
tgaaagaaggagaagcccaatatgctgtggtccactgtacaggatacatcaaggcctggccaccagcaggaatgaccatacctgaagaagacgctgatgtgggacaaggcagtaaatattgcctcgtggcaattgggagactccaggtgaccagctctcctgtatgcatggacatgaatgggatgtcggtgcccacagagttcttatcccggcataactccgatggaatcatcacatttgtggatccaagatgtatcagtgtgattggctaccaaccccaggatcttctgggaaaggacattttggaattctgccaccctgaggatcaaagccatctgcgtgagagcttccagcaggtggttaagctgaaaggccaagtcctgtcggtcatgtatcgatttcgcaccaagaaccgggagtggatgttgatccgcaccagcagcttcacattccagaatccctattctgatgagattgagtacatcatctgcaccaacaccaacgtcaagcaacttcagcaacagcaggcagaattggaagtgcaccagagagatggattgtcatcgtatgacttatcccaggtccccgtccccaacctaccagccggtgttcatgaggccgggaagtccgtggaaaaggcggatgcaatcttctcccaggaaagagatcctcggtttgctgaaatgtttgcaggaattagtgcatcggagaagaagatgatgagctcagcctctgcagcaggaacccagcagatctactcccaaggaagcccatttccctctggacactccgggaaggccttcagctcttcagtggttcatgtgcctggagtgaatgatattcagtcctcttcttccacgggccagaacatgtcccaaatctcccggcagctaaaccagagtcaggtggcatggacagggagtcgtccgccctttccgggacagcaaatcccatctcagtccagcaagactcagtcatctccctttgggattggaacgagccacacctacccggcagacccctcttccttgccctgccgcaggccccccaccagaagccatctcccccgctgtgtgtccccaggcgcatcattgctccactctcccctgcagccgcggctgctcggccactgaccaggggccctggcagacattaggggatcagttgtatttattgtattttatctgtgtgtgctcaggaggtgagcctagtgggtccttaagtttggttgtgaataatctcttgatagacaatttatacccatgaaagttcagccaatgcccagagtgaccaagcagcaccagcaggcctgcccaggatgctgaaagcagatttcttcttgatttcacttctgatggatgcatggggctctgggggaatgctgggaaaatgggcaagcagagtgcacagccctcgttctgccagctggagccaagaagcacagagacacagaggcgcctgcccctcagctccgctggtctgtctgtgcatccactgtgccgtgggacatatgtaatttgtgcagtgtgacatggacttgctgtcctaatggatgtgttgtgccttgtgtctgtcatgtgtggccagcgtgattgtatagaatccagagtatgtagagagccaaaatgtgtggccctgtccccaagctcagcaccaccggccatgaccagaggntgctcggcccagggtctgggagctgggctaacaggctgacacttcggcagggtcaccaggaggcacagctaggggcatgctcacatgggtaggtcagttctttggtccaagcctctggtgcagattcaagctcctcctcttagaggaagcagctccttcctcccacaggagccccaagggagcactcaccctcctcccaattggatctgaatagctgtgttcctgatcccacataagcatgtctcatccttgccccactggtgagaggaggaccttgtgcctgcccagagcctgcaggacagcacgccttgaggtcagaggcctggcccttctttacagatgtagatagcagggtaggacgcccaggccttctcacatgggcaccatgaaacactttcttccaggcacctgagccttcgttcttcagcccgactgaggaacagcagctctgggaggcacagagtgcaggtctcangggcagaaganatgggttccagttctggttctgccacacacccaccggccttgaatttctctggtggtctcaagacaagaacaagagctgactctagaatcttctgcctggctgacctctgagcccatgatccctggcttgctgtgcttctcttggatttgaggagagtttatgaatccatccccctgttttcagggacctctgccttctcccacaccccttacactagtgaggactccttcggcctcttgtgtttccttccttttgtgaccattacgccccctccctgtttcttatcaccagcccatcagcccactgactcccatatggtagaaaaggtaccgtggctgctgcagggcacatggagggacctaccctctgggaaagcccttgtgtccctcccagagtccttcaggtaggccctcgcagatgctgcttgctcagaaacaacccgtgcatccctgcccatggattctgcaggacctagaagagtggcattggttctaggaacctgagagtggagtgaggccagcatgcaggaaggagtttggagagagtgtttgctgtgatccattgaaagctccacattaaaccccagccctgtctggccagggagatccatgtgctcaatgttgctgggggacctacaaaagtcaaacattgctcagtaaaatgcctttggctggtcgccagctgtgcatgactgcagttcctagactctaacttaaccccaactttgcagtttctagagctttttgtctgtaatggtgattgggtctccactgtagatgcatgcagtgttcactccaacctcagaggctttcttgcttctggggaaatggcaggtggttgaaaccctgcacatcctcccagggccagccccagaatgggcctttctctgcctgccctgcccttggggccacctctgcctccagcaggcttgagcttgccccaggccttgggcataattatttccccccaaaaaaggcacaaaaataggttttggatcaaagaagtgtttctcagtgaaatgaaaacagtctttttatagcctttagcttgtgagtttggaagtttggggggtcttatgtttgttttgcctcttctgtttcttggaggagagttgaggcttttcttaggtgcatacacagacccaggtgaacacgctgactgtgaacctgccctgtatccggagctgtgctgggcactgaggggatgcaacaaaattaggagaggatccttgctcccaacgtctacttctcctacctcaacaggggtccagggtgcagtgaactcagttcttggcccttgggtgaggattcatggatgaatgaaagctagacctgatggggaggcattatgactaaataggcccagcctccttcccttccagctctgtcctaggagcataggcgggaaatctgagtagagtctgactgcagtttttgcttatgatttgtaaaagccgtcatggggtcaataagaaaataggggtgatggagggggagaagcccaggactgggagaatcgcacgtgccccaggggttttcaccaaggattttcaagacaaactggagtaagaattaaagccccagaggatttaattatcctggtttgcaaaagagcctcccatgccagtaccgcccagccttggaggccggaatgctcatggcccctgtggtctgcttgtccttcagcccatgcccagcagatacctctctgactggagacgggctcaaagctggattagaaaggggagaggcacttgtgactttgtttgactctgtgactcacttcctcgctcacaccttgtttgaactactggactttcaactggctttccttaggtcaggcaagcagacagctccccactgaagaggtctgtacagtgacaacccggggccggcagcaaggacacagatgcagccacagtaaggctccatcaggactgggtcagtgatggcaacaggatggccaaggatggctctagaacactctgtccatgcgtcactccccccagttttatttttagctttggcttcagggagtgacagccatcacaaatagccacattctgctctactctccaacataccagattctacactgttgttatttcatgagacgtgaatgttgcagagagtggggggattctggttgttaaggaacttacactggggagctttactcttccgtgtcaacaatgtgactacatgttctccagattagccacacatgcaaacatcagtgtccttctagctttagccgagaaagaaaccagtcccagggaatgaatggtggtctccccactcccggcagcactttaggcagcccataagctatgcgagaatgtgaacgctcaccttgctccgtcacggttctgacctaccacataaacaggaagaagccagtgaccggaacagctctaggaataacaagtcagaatagaagtgtcctttatattaccagaaaatatgggcttggcctaagtcgctgtctcctaacctgccggggtcattccccaccaaacaccccatactaaggagccatgagccacctggacattcaccttttctttgaccatctggagtctggggcaacttaaggaggcaccacacagtggtgcaggcacatttccaagcgtaggtgtccctggcttttgtggccaaagctagtgttatggtcaacaacaggccagggtctgtggggcactgaccttgaaagtggcaaaatggaggtttcacaggctgtgcgggagcaggacggcttgcttcatctaacaatctcagtttcctttaaaaaaagaaagaaaggaaaagatttcataagcaggtgtcagtggacagtttaagcacttaaccatttctctttcttcttatggatgtgaactgtgctgtggataaatcatttgtatttcttgaatgttctctatgactaacagttattaagtcggttgtgtatatgtgtaactaatgtaactgccttttaaaatttcattacaataaaaatgactttgctctgaacaaaaaaaaaaaa

SEQ ID NO: 529697 - DNA, 1285 bp, Homo sapiens
caagatactgaaacacagcagagaactaccgaggcagctggcgcagatgcttgtaggcactgttgagaaaggcttcagacccacagtctgaagagatggagaacccctcctccaggagcaaggaataagaatgacaattgttctgtaggacagttgacttagattcaggaaagttcttcagaaaatatattcagatcacaaaaaaggtgttaaaatcccaggatctttcagccaaggatggcacttgcttctttcagcatcactcatcaagttgaaatttatgagtgtccttggttatcacaaacaaagcaagcaaactgaacaaatgagaatgcttctttagtatctacatagcaccttaaaagctctgttatctttacaaaatgtgtgtatggaaaggtaaaatgggaataaatagtattaaattctgttcttaggaacctactgtatagtgatagaccagctacacagaacgaaaaagcatgcacatcttacagatacagagatcatgactttggtagatgagactaacatgtatgaaggtgtaggaagaaggtttattcttcagtccaaggaagcaattcacagtcagctgttagagaagcagaaaatagcagaagaaaaaattaaagaactagaacagaaaaagtcctacctggagcgaagcgttaaggaagctgaggacaacatccgggagatgctgatggcacgaagggcccagtagggagcctctctgggaagctcttcctcctgcccctcccattcctggtgggggcagaggagtgtctgcaggggaaacagcttctcctctgccccgatggatgctttatttggatggcctggcaagatcacattttctgcatcaccctgagaccccatttgcttcgccagccctggagtttttacccggctttgcctgccagctctgcccaggacactcttccctctcgggatgtgtgatgaactcccaggagagggaagatgggagccacgggcaatgataggaagctctggctgagctcttccactagggacgccagggcagatgcgaataaaaagacgtatgtaccaactctgctaacgcactggttttacttgtagcaggagggatggaacagagggtgagagaggcatggggtacgtactgcacgctcagctcctggtccctctgcatcagagcccttccttcctatggggggatgggccttgccctcttctcttttcccttactgtacctttgactcaacgctcagattccgggcctgatgcagtagacagaagagga

SEQ ID NO: 529698 - DNA, 215 bp, Homo sapiens
ttctacctgacctaggctgtatgtgttgctacactcatctacaaagtgtaggcagcatcaaccctgggaaatggcacatttgaaccaggatcgccctgacatgggcttgccttaattgtatgtgtatccccacccctgacctagcttggtatcttgtggatgtatctgtgacagtggtaaaagtacataaaattgcattcaaggggtaagcagga

SEQ ID NO: 529699 - DNA, 1393 bp, Homo sapiens
taaaatcatagccatatggtaaattttctatttggttatgggttctctgtttatgtgagtgggcattgcaggtggggtgttactgtggaaagtggccaatttttattaaaatatttctggaagaaaatttaaaaagaaaaaaaaaaaaaaaaaaaaaaaaaaaaaaaaaaaaaaaaaaaaaaaaaaaaaaaaaaaaaaaaaaaaaaaaaggggggcgcgagcgcgacaaaagaaatactccccgaggggagcgcccacactatgaagcccaccccaagttttgtgaggtcaaacagagaggggcgacaaataagaggaggcgcctatattatataatagataagaaagcaggagaagccgggtctattatatacaaaacacacgaatagagtgaggaaaaacaagcgtaaaagacgagagaaatctttagtgaaaaaagaaccttatatatatatagtggggatggagaaaaaattagtatggacaaatacacacactacacaaaagaagagatatatattaaagagactagcaaaagaaggacaaatctaactacacaacaaactgagagagcgaagattaaataatgagagtgtgataaaaaaaacagacgcagactaatataagatgacggcggtaagaaaaaaacgtattgcgtcataatggaatgtctattaaatcaatatagaagaacacacaatctactcacaaacgccgggaggaatacgccgcaagaccaaacaagaggaaagaaacaaagaaacacacacacaaaaacgaacaaaaaagacagagacagagaacaccaaggaagcagacaacaaacagcatacaaacaaaacagacaaagcgaagaaacagacaacccaacacaagccaacagacaggggcgagaacggagcacagagagagaagagcaagaaagaaaaagagagagaaaaagtaagaagcaagacaaaaaaaacagaaaagaggccgagaggaacgagaaaagaagagaggcaagacggaaggaaacaaaaacaaagaaagaaagaaaagaagaaaaaaaacagcaaaaaagcgtaaagaaaaaaaaaacagaacgacaaaacaaacagcgcgaaagaaggaagaaagcacaaaccaggcacagcaggcaacacacgacagcagcacagcacaggcagagcggaaaaccacacccagcgacagagagagacgcgagaagggacgcaacagacaagaagagcagagcaaacaagagcagacccacgcagacaagagagaggagataaagaggagaaggaaagaccgaacaacgacaggaggaccaagccaagcaaagaacgagaaggacgaagacagcgaggcgaggaagacagagcaagagacggcagcgagacgagatcag

SEQ ID NO: 529700 - DNA, 200 bp, Homo sapiens
agctcccccgattggcatacaggcagagccaatgatcgggtagatagacaaggtagaatatccatattatattctgtattaacaacgtggatggacacctctataaacttgatggacgaatgccttttccggtgaaccatggcgccagttcagaggacaccctgctgaaggacgctgccaaggtctgcagagatattcac

SEQ ID NO: 529701 - DNA, 1806 bp, Homo sapiens
gcgctataaaaacttttataaaccccccggagcccgagcagtgtgaagaagaggcgagaacgacccccggaccgaccaaagcccgcgcgccgctgcatcccgcgtccagcacctacgtcccgctgccgtcgccgccgccaccatgcccaagagaaaggctgaaggggatgctaagggagataaagcaaaggtgaaggacgaaccacagagaagatccgcgaggttgtctgctaaacctgctcctccaaagccagagcccaagcctaaaaaggcccctgcaaagaagggagagaaggtacccaaagggaaaaagggaaaagctgatgctggcaaggaggggaataaccctgcagaaaatggagatgccaaaacagaccaggcacagaaagctgaaggtgctggagatgccaagtgaagtgtgtgcatttttgataactgtgtacttctggtgactgtacagtttgaaatactattttttatcaagttttataaaaatgcagaattttgttttacttttttttttttttaaaagctatgttgttagcacacagaacacttcattgttgttttggggggaaggggcatatgtcactaatagaatgtctccaaagctggattgatgtggagaaaacacctttcccttctagttttgagagacttcctcttggctcccaggaggagggattccctgactttgacacacatggccaccttggcacaaaagccttgtggtatagaaaaacaaatttgtttttatgtcctcttctccctttccatctttcagcatagacttaactcccttaagcccagacatctgttgagacctgacccctagtcattggttaccagtgtgtcaggcaatctggactttccagtgatgccactgagatggcacctgtcaaaagagcagtggttccatttctagattgtggatcttcagataaattctgccattttcatttcacttcctgaaagtcagggtcggcttgtgatgaagacttcattgggttttatagtggctttctgatttttggtagtccattgaagaagggagtttgaaagttgttgtatactgttaacgattgtctgcccatgtcctgcctgaaataccatgattgtttatggaaagtatctttaataaagctggatacagtttggcttggaaaaaaaaaaaacaacaaaaaaaaaaaaaaaaaaaaaaaaaaaaaaaaaaaaaaaaaaaaaaaaaaaaaaaaaaaaaaaaaaaaaaaaaaaaaaaaaaaaactttttcgcccccctagacaaattaaattttagtttgggctaatttaaaaaataagcaaaaaatgaaaataaatttgccaaatcgccctaaaatgaaggcaatataaaataaacggcctttgttaaaaaaacttgaaaaaagaaaaacccttgagttacccaaaataaatgggaataacaaatcccccttttgaaaaatagggaaaaaaaaaaaaagacctgaacaattggccataacaaaaaagaaccaaacccgaatgggtaaatgaaaaatgaagccgtaaatctttgcaaaaaaacacctaaaaatttttgtataattgccccaaattcgttttggtgtaaacacatttggaaaaaaaggcccatttttaaaaacctgggctcaaacacccaaaaggtaaaaaaccttttaaaaagcggaaggcccaataaaaaccatacccatattaatttttttgaggacaagggcccaaaggaattaaatgggacccaaaagggacccaccattaaaatttcaccgaaaaacccctaattggggg

SEQ ID NO: 529702 - DNA, 957 bp, Homo sapiens
cggtgatctagaggatcccgaaggcgcacgatggcgcgtcatgagacgtgaatgttgcagagagtggggggattctggttgttaaggaacttacactggggagctttactcttccgtgtcaacaatgtgactacatgttctccagattagccacacatgcaaacatcagtgtccttctagctttagccgagaaagaaaccagtcccagggaatgaatggtggtctccccactcccggcagcactttaggcagcccataagctatgcgagaatgtgaacgctcaccttgctccgtcacggttctgacctaccacataaacaggaagaagccagtgaccggaacagctctaggaataacaagtcagaatagaagtgtcctttatattaccagaaaatatgggcttggcctaagtcgctgtctcctaacctgccggggtcattccccaccaaacaccccatactaaggagccatgagccacctggacattcaccttttctttgaccatctggagtctggggcaacttaaggaggcaccacacagtggtgcaggcacatttccaagcgtaggtgtccctggcttttgtggccaaagctagtgttatggtcaacaacaggccagggtctgtggggcactgaccttgaaagtggcaaaatggaggtttcacaggctgtgcgggagcaggacggcttgcttcatctaacaatctcagtttcctttaaaaaaagaaagaaaggaaaagatttcataagcaggtgtcagtggacagtttaagcacttaaccatttctctttcttcttatggatgtgaactgtgctgtggataaatcatttgtatttcttgaatgttctctatgactaacagttattaagtcggttgtgtatatgtgtaactaatgtaactgccttttaaaatttcattacaataaaaatgactttgctctgaacaaaaaaaaaaaa

SEQ ID NO: 529703 - DNA, 780 bp, Homo sapiens
gggcttacagtgcaccaagatggcgcccccgtgatctagagctgaagaaggtttattcttcagtccaaggaagcaattcacagtcagctgttagagaagcagaaaatagcagaagaaaaaattaaagaactagaacagaaaaagtcctacctggagcgaagcgttaaggaagctgaggacaacatccgggagatgctgatggcacgaagggcccagtagggagcctctctgggaagctcttcctcctgcccctcccattcctggtgggggcagaggagtgtctgcaggggaaacagcttctcctctgccccgatggatgctttatttggatggcctggcaagatcacattttctgcatcaccctgagaccccatttgcttcgccagccctggagtttttacccggctttgcctgccagctctgcccaggacactcttccctctcgggatgtgtgatgaactcccaggagagggaagatgggagccacgggcaatgataggaagctctggctgagctcttccactagggacgccagggcagatgcgaataaaaagacgtatgtaccaactctgctaacgcactggttttacttgtagcaggagggatggaacagagggtgagagaggcatggggtacgtactgcacgctcagctcctggtccctctgcatcagagcccttccttcctatggggggatgggccttgccctcttctcttttcccttactgtacctttgactcaacgctcagattccgggcctgatgcagtagacagaagagga

SEQ ID NO: 529704 - DNA, 1823 bp, Homo sapiens
gcgctataaaaacttttataaaccccccggagcccgagcagtgtgaagaagaggcgagaacgacccccggaccgaccaaagcccgcgcgccgctgcatcccgcgtccagcacctacgtcccgctgccgtcgccgccgccaccatgcccaagagaaaggctgaaggggatgctaagggagataaagcaaaggtgaaggacgaaccacagagaagatccgcgaggttgtctgctaaacctgctcctccaaagccagagcccaagcctaaaaaggcccctgcaaagaagggagagaaggtacccaaagggaaaaagggaaaagctgatgctggcaaggaggggaataaccctgcagaaaatggagatgccaaaacagaccaggcacagaaagctgaaggtgctggagatgccaagtgaagtgtgtgcatttttgataactgtgtacttctggtgactgtacagtttgaaatactattttttatcaagttttataaaaatgcagaattttgttttacttttttttttttttaaaagctatgttgttagcacacagaacacttcattgttgttttggggggaaggggcatatgtcactaatagaatgtctccaaagctccaggaggagggattccctgactttgacacacatggccaccttggcacaaaagccttgtggtatagaatctcaaacacatttgctttatgtcctctttccctttccatctttcagcatagacttaactcccttaagcccagacatctgttgagacctgacccctagtcattggttaccagtgtgtcaggcaatctggactttccagtgatgccactgagatggcacctgtcaaaagagcagtggttccatttctagattgtggatcttcagataaattctgccattttcatttcacttcctgaaagtcagggtcggcttgtgaaaagttgttaaacaacatgctaaatgtgaaatgtcaaccctcactctaaactttccctgttcagagcatcagatgaagacttcattgggttttatagtggctttctgatttttggtagtccattgaagaagggagtttgaaagttgttgtatactgttaacgattgtctgcccatgtcctgcctgaaataccatgattgtttatggaaagtatctttaataaagctggatacagtttggcttggaaaaaaaaaaaacaacaaaaaaaaaaaaaaaaaaaaaaaaaaaaaaaaaaaaaaaaaaaaaaaaaaaaaaaaaaaaaaaaaaaaaaaaaaaaaaaaaaaaactttttcgcccccctagacaaattaaattttagtttgggctaatttaaaaaataagcaaaaaatgaaaataaatttgccaaatcgccctaaaatgaaggcaatataaaataaacggcctttgttaaaaaaacttgaaaaaagaaaaacccttgagttacccaaaataaatgggaataacaaatcccccttttgaaaaatagggaaaaaaaaaaaaagacctgaacaattggccataacaaaaaagaaccaaacccgaatgggtaaatgaaaaatgaagccgtaaatctttgcaaaaaaacacctaaaaatttttgtataattgccccaaattcgttttggtgtaaacacatttggaaaaaaaggcccatttttaaaaacctgggctcaaacacccaaaaggtaaaaaaccttttaaaaagcggaaggcccaataaaaaccatacccatattaatttttttgaggacaagggcccaaaggaattaaatgggacccaaaagggacccaccattaaaatttcaccgaaaaacccctaattggggg

SEQ ID NO: 529705 - DNA, 5536 bp, Homo sapiens
  misc_feature (2079)..(2079): n is a, c, g, or t
  misc_feature (2554)..(2554): n is a, c, g, or t
  misc_feature (2565)..(2565): n is a, c, g, or t
tgaaagaaggagaagcccaatatgctgtggtccactgtacaggatacatcaaggcctggccaccagcaggaatgaccatacctgaagaagacgctgatgtgggacaaggcagtaaatattgcctcgtggcaattgggagactccaggtgaccagctctcctgtatgcatggacatgaatgggatgtcggtgcccacagagttcttatcccggcataactccgatggaatcatcacatttgtggatccaagatgtatcagtgtgattggctaccaaccccaggatcttctgggaaaggacattttggaattctgccaccctgaggatcaaagccatctgcgtgagagcttccagcaggtggttaagctgaaaggccaagtcctgtcggtcatgtatcgatttcgcaccaagaaccgggagtggatgttgatccgcaccagcagcttcacattccagaatccctattctgatgagattgagtacatcatctgcaccaacaccaacgtcaagcaacttcagcaacagcaggcagaattggaagtgcaccagagagatggattgtcatcgtatgacttatcccaggtccccgtccccaacctaccagccggtgttcatgaggccgggaagtccgtggaaaaggcggatgcaatcttctcccaggaaagagatcctcggtttgctgaaatgtttgcaggaattagtgcatcggagaagaagatgatgagctcagcctctgcagcaggaacccagcagatctactcccaaggaagcccatttccctctggacactccgggaaggccttcagctcttcagtggttcatgtgcctggagtgaatgatattcagtcctcttcttccacgggccagaacatgtcccaaatctcccggcagctaaaccagagtcaggtggcatggacagggagtcgtccgccctttccgggacagcaaatcccatctcagtccagcaagactcagtcatctccctttgggattggaacgagccacacctacccggcagacccctcttcctacagccccctctccagcccagctacctcctcgccaagtgggaatgcctactccagtcttgccaacaggactccagggttcgctgaaagtggacaaagtagcgggcagttccaagggcggccctcggaagtctggtcgcagtggcaaagccagcaccatggccagcagagcggtgagcagcactcccaccagcagcccggtcagactgaagtgttccaggacatgctgcccatgccaggagatccaacccaggggactggcaactataacatcgaagactttgccgacctgggcatgtttccaccgttttctgagtagctgcggccagagtgaggctcctgctgtacagtgccacccatactgtgatgtcgatgcccatgtgaatgaggcccaccctcgccctgcttgccctgccgcaggccccccaccagaagccatctcccccgctgtgtgtccccaggcgcatcattgctccactctcccctgcagccgcggctgctcggccactgaccaggggccctggcagacattaggggatcagttgtatttattgtattttatctgtgtgtgctcaggaggtgagcctagtgggtccttaagtttggttgtgaataatctcttgatagacaatttatacccatgaaagttcagccaatgcccagagtgaccaagcagcaccagcaggcctgcccaggatgctgaaagcagatttcttcttgatttcacttctgatggatgcatggggctctgggggaatgctgggaaaatgggcaagcagagtgcacagccctcgttctgccagctggagccaagaagcacagagacacagaggcgcctgcccctcagctccgctggtctgtctgtgcatccactgtgccgtgggacatatgtaatttgtgcagtgtgacatggacttgctgtcctaatggatgtgttgtgccttgtgtctgtcatgtgtggccagcgtgattgtatagaatccagagtatgtagagagccaaaatgtgtggccctgtccccaagctcagcaccaccggccatgaccagaggntgctcggcccagggtctgggagctgggctaacaggctgacacttcggcagggtcaccaggaggcacagctaggggcatgctcacatgggtaggtcagttctttggtccaagcctctggtgcagattcaagctcctcctcttagaggaagcagctccttcctcccacaggagccccaagggagcactcaccctcctcccaattggatctgaatagctgtgttcctgatcccacataagcatgtctcatccttgccccactggtgagaggaggaccttgtgcctgcccagagcctgcaggacagcacgccttgaggtcagaggcctggcccttctttacagatgtagatagcagggtaggacgcccaggccttctcacatgggcaccatgaaacactttcttccaggcacctgagccttcgttcttcagcccgactgaggaacagcagctctgggaggcacagagtgcaggtctcangggcagaaganatgggttccagttctggttctgccacacacccaccggccttgaatttctctggtggtctcaagacaagaacaagagctgactctagaatcttctgcctggctgacctctgagcccatgatccctggcttgctgtgcttctcttggatttgaggagagtttatgaatccatccccctgttttcagggacctctgccttctcccacaccccttacactagtgaggactccttcggcctcttgtgtttccttccttttgtgaccattacgccccctccctgtttcttatcaccagcccatcagcccactgactcccatatggtagaaaaggtaccgtggctgctgcagggcacatggagggacctaccctctgggaaagcccttgtgtccctcccagagtccttcaggtaggccctcgcagatgctgcttgctcagaaacaacccgtgcatccctgcccatggattctgcaggacctagaagagtggcattggttctaggaacctgagagtggagtgaggccagcatgcaggaaggagtttggagagagtgtttgctgtgatccattgaaagctccacattaaaccccagccctgtctggccagggagatccatgtgctcaatgttgctgggggacctacaaaagtcaaacattgctcagtaaaatgcctttggctggtcgccagctgtgcatgactgcagttcctagactctaacttaaccccaactttgcagtttctagagctttttgtctgtaatggtgattgggtctccactgtagatgcatgcagtgttcactccaacctcagaggctttcttgcttctggggaaatggcaggtggttgaaaccctgcacatcctcccagggccagccccagaatgggcctttctctgcctgccctgcccttggggccacctctgcctccagcaggcttgagcttgccccaggccttgggcataattatttccccccaaaaaaggcacaaaaataggttttggatcaaagaagtgtttctcagtgaaatgaaaacagtctttttatagcctttagcttgtgagtttggaagtttggggggtcttatgtttgttttgcctcttctgtttcttggaggagagttgaggcttttcttaggtgcatacacagacccaggtgaacacgctgactgtgaacctgccctgtatccggagctgtgctgggcactgaggggatgcaacaaaattaggagaggatccttgctcccaacgtctacttctcctacctcaacaggggtccagggtgcagtgaactcagttcttggcccttgggtgaggattcatggatgaatgaaagctagacctgatggggaggcattatgactaaataggcccagcctccttcccttccagctctgtcctaggagcataggcgggaaatctgagtagagtctgactgcagtttttgcttatgatttgtaaaagccgtcatggggtcaataagaaaataggggtgatggagggggagaagcccaggactgggagaatcgcacgtgccccaggggttttcaccaaggattttcaagacaaactggagtaagaattaaagccccagaggatttaattatcctggtttgcaaaagagcctcccatgccagtaccgcccagccttggaggccggaatgctcatggcccctgtggtctgcttgtccttcagcccatgcccagcagatacctctctgactggagacgggctcaaagctggattagaaaggggagaggcacttgtgactttgtttgactctgtgactcacttcctcgctcacaccttgtttgaactactggactttcaactggctttccttaggtcaggcaagcagacagctccccactgaagaggtctgtacagtgacaacccggggccggcagcaaggacacagatgcagccacagtaaggctccatcaggactgggtcagtgatggcaacaggatggccaaggatggctctagaacactctgtccatgcgtcactccccccagttttatttttagctttggcttcagggagtgacagccatcacaaatagccacattctgctctactctccaacataccagattctacactgttgttatttcatgagacgtgaatgttgcagagagtggggggattctggttgttaaggaacttacactggggagctttactcttccgtgtcaacaatgtgactacatgttctccagattagccacacatgcaaacatcagtgtccttctagctttagccgagaaagaaaccagtcccagggaatgaatggtggtctccccactcccggcagcactttaggcagcccataagctatgcgagaatgtgaacgctcaccttgctccgtcacggttctgacctaccacataaacaggaagaagccagtgaccggaacagctctaggaataacaagtcagaatagaagtgtcctttatattaccagaaaatatgggcttggcctaagtcgctgtctcctaacctgccggggtcattccccaccaaacaccccatactaaggagccatgagccacctggacattcaccttttctttgaccatctggagtctggggcaacttaaggaggcaccacacagtggtgcaggcacatttccaagcgtaggtgtccctggcttttgtggccaaagctagtgttatggtcaacaacaggccagggtctgtggggcactgaccttgaaagtggcaaaatggaggtttcacaggctgtgcgggagcaggacggcttgcttcatctaacaatctcagtttcctttaaaaaaagaaagaaaggtttcttcttatggatgtgaactgtgctgtggataaatcatttgtatttcttgaatgttctctatgactaacagttattaagtcggttgtgtatatgtgtaactaatgtaactgccttttaaaatttcattacaataaaaatgactttgctctgaacaaaaaaaaaaaa

SEQ ID NO: 529706 - DNA, 1701 bp, Homo sapiens
  misc_feature (3)..(3): n is a, c, g, or t
  misc_feature (54)..(54): n is a, c, g, or t
  misc_feature (90)..(90): n is a, c, g, or t
  misc_feature (98)..(98): n is a, c, g, or t
  misc_feature (112)..(112): n is a, c, g, or t
  misc_feature (568)..(568): n is a, c, g, or t
  misc_feature (571)..(572): n is a, c, g, or t
  misc_feature (577)..(577): n is a, c, g, or t
  misc_feature (579)..(579): n is a, c, g, or t
  misc_feature (581)..(582): n is a, c, g, or t
  misc_feature (585)..(585): n is a, c, g, or t
ctncaaagtgatttttttccccacaaaagttcaacacttaagctagactttcantgttaactttgccctaaaaagttaagacattctggntaaccatnacagtcacatgatntctgatgctatctggtctgttaataataaagtctttatttggatgtatttttcctcaattaaattacaggaaactggatataggatttcgttgcaacgctattaaagttccaaaccaggagtgtgcagcactggaaaaggagatcagtactaaaacttacaataaatatcagagaagccgttagtttttacagcatcgtctgcttaaaagctaagttgaccaggtgcataatttcccatcagtctgtccttgtagtaggcagggcaatttctgttttcatgatcggaatactcaaatatatccaaacatctttttaaaactttgatttatagctcctagaaagttatgttttttaatagtcactctactctaatcaggcctagctttgctcattttggagcctcactaaaataacagatttcagtatagccaagttcatcagaaagactcaaatanggnntgatnangnnatngaaaccctttccatctttcagcatagacttaactcccttaagcccagacatctgttgagacctgacccctagtcattggttaccagtgtgtcaggcaatctggactttccagtgatgccactgagatggcacctgtcaaaagagcagtggttccatttctagattgtggatcttcagataaattctgccattttcatttcacttcctgaaagtcagggtcggcttgtgaaaagttgttaaacaacatgctaaatgtgaaatgtcaaccctcactctaaactttccctgttcagagcatcagatgaagacttcattgggttttatagtggctttctgatttttggtagtccattgaagaagggagtttgaaagttgttgtatactgttaacgattgtctgcccatgtcctgcctgaaataccatgattgtttatggaaagtatctttaataaagctggatacagtttggcttggaaaaaaaaaaaacaacaaaaaaaaaaaaaaaaaaaaaaaaaaaaaaaaaaaaaaaaaaaaaaaaaaaaaaaaaaaaaaaaaaaaaaaaaaaaaaaaaaaaactttttcgcccccctagacaaattaaattttagtttgggctaatttaaaaaataagcaaaaaatgaaaataaatttgccaaatcgccctaaaatgaaggcaatataaaataaacggcctttgttaaaaaaacttgaaaaaagaaaaacccttgagttacccaaaataaatgggaataacaaatcccccttttgaaaaatagggaaaaaaaaaaaaagacctgaacaattggccataacaaaaaagaaccaaacccgaatgggtaaatgaaaaatgaagccgtaaatctttgcaaaaaaacacctaaaaatttttgtataattgccccaaattcgttttggtgtaaacacatttggaaaaaaaggcccatttttaaaaacctgggctcaaacacccaaaaggtaaaaaaccttttaaaaagcggaaggcccaataaaaaccatacccatattaatttttttgaggacaagggcccaaaggaattaaatgggacccaaaagggacccaccattaaaatttcaccgaaaaacccctaattggggg

SEQ ID NO: 529707 - DNA, 4149 bp, Homo sapiens
  misc_feature (2079)..(2079): n is a, c, g, or t
  misc_feature (2554)..(2554): n is a, c, g, or t
  misc_feature (2565)..(2565): n is a, c, g, or t
tgaaagaaggagaagcccaatatgctgtggtccactgtacaggatacatcaaggcctggccaccagcaggaatgaccatacctgaagaagacgctgatgtgggacaaggcagtaaatattgcctcgtggcaattgggagactccaggtgaccagctctcctgtatgcatggacatgaatgggatgtcggtgcccacagagttcttatcccggcataactccgatggaatcatcacatttgtggatccaagatgtatcagtgtgattggctaccaaccccaggatcttctgggaaaggacattttggaattctgccaccctgaggatcaaagccatctgcgtgagagcttccagcaggtggttaagctgaaaggccaagtcctgtcggtcatgtatcgatttcgcaccaagaaccgggagtggatgttgatccgcaccagcagcttcacattccagaatccctattctgatgagattgagtacatcatctgcaccaacaccaacgtcaagcaacttcagcaacagcaggcagaattggaagtgcaccagagagatggattgtcatcgtatgacttatcccaggtccccgtccccaacctaccagccggtgttcatgaggccgggaagtccgtggaaaaggcggatgcaatcttctcccaggaaagagatcctcggtttgctgaaatgtttgcaggaattagtgcatcggagaagaagatgatgagctcagcctctgcagcaggaacccagcagatctactcccaaggaagcccatttccctctggacactccgggaaggccttcagctcttcagtggttcatgtgcctggagtgaatgatattcagtcctcttcttccacgggccagaacatgtcccaaatctcccggcagctaaaccagagtcaggtggcatggacagggagtcgtccgccctttccgggacagcaaatcccatctcagtccagcaagactcagtcatctccctttgggattggaacgagccacacctacccggcagacccctcttcctacagccccctctccagcccagctacctcctcgccaagtgggaatgcctactccagtcttgccaacaggactccagggttcgctgaaagtggacaaagtagcgggcagttccaagggcggccctcggaagtctggtcgcagtggcaaagccagcaccatggccagcagagcggtgagcagcactcccaccagcagcccggtcagactgaagtgttccaggacatgctgcccatgccaggagatccaacccaggggactggcaactataacatcgaagactttgccgacctgggcatgtttccaccgttttctgagtagctgcggccagagtgaggctcctgctgtacagtgccacccatactgtgatgtcgatgcccatgtgaatgaggcccaccctcgccctgcttgccctgccgcaggccccccaccagaagccatctcccccgctgtgtgtccccaggcgcatcattgctccactctcccctgcagccgcggctgctcggccactgaccaggggccctggcagacattaggggatcagttgtatttattgtattttatctgtgtgtgctcaggaggtgagcctagtgggtccttaagtttggttgtgaataatctcttgatagacaatttatacccatgaaagttcagccaatgcccagagtgaccaagcagcaccagcaggcctgcccaggatgctgaaagcagatttcttcttgatttcacttctgatggatgcatggggctctgggggaatgctgggaaaatgggcaagcagagtgcacagccctcgttctgccagctggagccaagaagcacagagacacagaggcgcctgcccctcagctccgctggtctgtctgtgcatccactgtgccgtgggacatatgtaatttgtgcagtgtgacatggacttgctgtcctaatggatgtgttgtgccttgtgtctgtcatgtgtggccagcgtgattgtatagaatccagagtatgtagagagccaaaatgtgtggccctgtccccaagctcagcaccaccggccatgaccagaggntgctcggcccagggtctgggagctgggctaacaggctgacacttcggcagggtcaccaggaggcacagctaggggcatgctcacatgggtaggtcagttctttggtccaagcctctggtgcagattcaagctcctcctcttagaggaagcagctccttcctcccacaggagccccaagggagcactcaccctcctcccaattggatctgaatagctgtgttcctgatcccacataagcatgtctcatccttgccccactggtgagaggaggaccttgtgcctgcccagagcctgcaggacagcacgccttgaggtcagaggcctggcccttctttacagatgtagatagcagggtaggacgcccaggccttctcacatgggcaccatgaaacactttcttccaggcacctgagccttcgttcttcagcccgactgaggaacagcagctctgggaggcacagagtgcaggtctcangggcagaaganatgggttccagttctggttctgccacacacccaccggccttgaatttctctggtggtctcaagacaagaacaagagctgactctagaatcttctgcctggctgacctctgagcccatgatccctggcttgctgtgcttctcttggatttgaggagagtttatgaatccatccccctgttttcagggacctctgccttctcccacaccccttacactagtgaggactccttcggcctcttgtgtttccttccttttgtgaccattacgccccctccctgtttcttatcaccagcccatcagcccactgactcccatatggtagaaaaggtaccgtggctgctgcagggcacatggagggacctaccctctgggaaagcccttgtgtccctcccagagtccttcaggtaggccctcgcagatgctgcttgctcagaaacaacccgtgcatccctgcccatggattctgcaggacctagaagagtggcattggttctaggaacctgagagtggagtgaggccagcatgcaggaaggagtttggagagagtgtttgctgtgatccattgaaagctccacattaaaccccagccctgtctggccagggagatccatgtgctcaatgttgctgggggacctacaaaagtcaaacattgctcagtaaaatgcctttggctggtcgccagctgtgcatgactgcagttcctagactctaacttaaccccaactttgcagtttctagagctttttgtctgtaatggtgattgggtctccactgtagatgcatgcagtgttcactccaacctcagaggctttcttgcttctggggaaatggcaggtggttgaaaccctgcacatcctcccagggccagccccagaatgggcctttctctgcctgccctgcccttggggccacctctgcctccagcaggcttgagcttgccccaggccttgggcataattatttccccccaaaaaaggcacaaaaataggttttggatcaaagaagtgtttctcagtgaaatgaaaacagtctttttatagcctttagcttgtgagtttggaagtttggggggtcttatgtttgttttgcctcttctgtttcttggaggagagttgaggcttttcttaggtgcatacacagacccaggtgaacacgctgactgtgaacctgccctgtatccggagctgtgctgggcactgaggggatgcaacaaaattaggagaggatccttgctcccaacgtctacttctcctacctcaacaggggtccagggtgcagtgaactcagttcttggcccttgggtgaggattcatggatgaatgaaagctagacctgatggggaggcattatgactaaataggcccagcctccttcccttccagctctgtcctaggagcataggcgggaaatctgagtagagtctgactgcagtttttgcttatgatttgtaaaagccgtcatggggtcaataagaaaataggggtgatggggggggctgccgaccagaggccttaaactctggtgtcgagtactactgcgaccacctgaacgagacgagcttcactgtccatttcaacagcatgg

SEQ ID NO: 529708 - DNA, 87 bp, Homo sapiens
  misc_feature (28)..(28): n is a, c, g, or t
aattcaagcttcctaacgatgtacgggngacatgttttaaacaatataaaatagaaattaagaatctaaatatttagatacaaaaaa

SEQ ID NO: 529709 - DNA, 469 bp, Homo sapiens
aggcatgcatgctggctgttttaggtcttatgctaaggcagcaggcccagcgtggtcagaccaccggtagacatgagtctatcagaaggctggacattaagccagctccgtagattgtctaggcatccggttactaacctatagcttagcgatagggatttaacatcagattcataggatcagctcttatgataaaagctgaagactgagagtcgtagcatgcggactgcaaaggcatgtggctgcatggagatcacacagtgatgagacgacactctttgatgaagaactactacggtttaccagttgtgtgaaaggactaaagaggcctgatatatatctcgttgaactgcatggctgttagattaaattgaacgcgtctaaacaagcttgctgtagagatgaaaggttgtaggcgcttaactagggtcttgcgtttgcctggcactaggctgacagttatgccgcc

SEQ ID NO: 529710 - DNA, 797 bp, Homo sapiens
gcgctataaaaacttttataaaccccccggagcccgagcagtgtgaagaagaggcgagaacgacccccggaccgaccaaagcccgcgcgccgctgcatcccgcgtccagcacctacgtcccgctgccgtcgccgccgccaccatgcccaagagaaaggctgaaggggatgctaagggagataaagcaaaggtgaaggacgaaccacagagaagatccgcgaggttgtctgctaaacctgctcctccaaagccagagcccaagcctaaaaaggcccctgcaaagaagggagagaaggtacccaaagggaaaaagggaaaagctgatgctggcaaggaggggaataaccctgcagaaaatggagatgccaaaacagaccaggcacagaaagctgaaggtgctggagatgccaagtgaagtgtgtgcatttttgataactgtgtacttctggtgactgtacagtttgaaatactattttttatcaagttttataaaaatgcagaattttgttttacttttttttttttttaaaagctatgttgttagcacacagaacacttcattgttgttttggggggaaggggcatatgtcactaatagaatgtctccaaagctggattgatgtggagaaaacacctttcccttctagttttgagagacttcctcttggctcccaggaggagggattccctgactttgacacacatggccaccttggcacaaaagccttgtggtatagaaacaattgttttattcctcttctccctttccatctagcatagctactcctaacgatacc

SEQ ID NO: 529711 - DNA, 382 bp, Homo sapiens
  misc_feature (2)..(2): n is a, c, g, or t
  misc_feature (69)..(69): n is a, c, g, or t
  misc_feature (75)..(75): n is a, c, g, or t
  misc_feature (121)..(121): n is a, c, g, or t
  misc_feature (156)..(157): n is a, c, g, or t
  misc_feature (159)..(159): n is a, c, g, or t
  misc_feature (161)..(161): n is a, c, g, or t
  misc_feature (205)..(205): n is a, c, g, or t
  misc_feature (225)..(225): n is a, c, g, or t
  misc_feature (228)..(228): n is a, c, g, or t
  misc_feature (232)..(232): n is a, c, g, or t
  misc_feature (272)..(272): n is a, c, g, or t
  misc_feature (301)..(301): n is a, c, g, or t
  misc_feature (318)..(318): n is a, c, g, or t
  misc_feature (341)..(341): n is a, c, g, or t
gnggatatccttacaaatattatcttgctatcacatcaactattatacatttaatcgtttacatgcgcnctaganaacatctacatgtacatttcaaaatataaaaatatattacaaatcngctgaattatttacaagcaatgttctattatctcnntncntcatttgttttatacgaatactaacagagttacacatatttccntttctgttaagtcaataganaantcgntatggcttcttagcttacgcaagcgaagaaagtgtttttnttttccttttcaagaccaactttggtgcntaaaagattcagtttgnagatacttgtaaaaaaaatacantttttcttacattaagaaaaaacaactcgagaaaccaaatg

SEQ ID NO: 529712 - DNA, 116 bp, Homo sapiens
gctgcggtgactctgaggatcccctgcggcgcgagcacttgcggcgcgagccctagggtcgacggtatcgataagccagtaattctcaattactcactagtgctcggggccgcaag

SEQ ID NO: 529713 - DNA, 1310 bp, Homo sapiens
agctgctgccctcgtgtggtgtcccctttcggactgtagctcatggtgcttcgtgtcaaggctgttggtgtcaaccagatgagtctgtccgctcgtatctgtgtagaccctgctgtccgccgtgtgcccgacccgtttccatttaccgccttgtgtgacacccttgtttgccgcaggggcgccaagccctgtcgggttgccctccctttctcagcgggtgtagtggggcggactccgcgcggtctttcgttccgtcgtccgtgctttccgttggttgtcaggcgtttcgtagtagatattagtcctcgggggggccacggggtccgaagtggtccatgcatttccacgagtatcaaggtccatgggaagtatatccccttgcaatatatgccgtgatgaccacttgtcttaaagcgacattccccctgaggtcgttccacagtcccggcaagacatctatccctgtgggtccaacgctgttcccgaacacgtctctgtaagtttggtttctgtgttgtcgatcagatattgggggcagagattttccttggtccagggctaagggtacgtttctctgggaggctgtagttatccctcacctagtgatctggctgcggtgtacatgtctcccactttatggtgactgacttatgggcagtgcttagtctccgggcatggcacctatgctatatcgtcagggcacgagggctaatcctcggtgtattctggttgagatgaggggagcttcagacggagcctgatgctcaaaaccctagttctgctctggattcaatgggggaaccttgggcaagttactttccttttaactgggcctcatgctgccccatgctgttaactgtgtgagataaccgtacctcccttgcaggattataccgaagagtttaaatccaaatgtatataaagattgaggccaggcacggtggcttacatctggaatcctagcactttggcaggccaaaacacggaggagtcgcttgagcccaaggagtttaagaccaacctaggcaataatacgtgagaccccggttcaaagtaaaaaaaaataaaagattggctgggcagcagtggctcatgcctgtaatcccaggcctttgggaggccgaggtgggtggatcccctgaggtcaggagtttaagaccagcctggccaatgtggtgaaatcccttctctactaaaaataaaaaaattagccaggcatggtggccgggtgcctgtaatcccagctactcaggaggctgaggcaggagaatcacttgaacccgggagaaaccagcggcagtgagccaagc

SEQ ID NO: 529714 - DNA, 614 bp, Homo sapiens
cctggacggaactgggctcgcttttctgttgggaatgtgaggctctccctacggtcgtggtctgcgttcgtccggatcttccgtggccgccgctaccgccgctaccgccagcaccatctgccatcaggccgcgcgcgcacgcagaggcccggcagccgggtccgagaggcgcgcgcacgcccgctcgcccgcgtggtcgccgcccctcggaagcctccggagcctcacacgggttcgctacggagggaggcggaggcctgcgggaggaggcggaggaggagcgagggaagatggcggccgtggagctcgagtggatcccggagacgctctacaacaccgccatctccgctgtcgtggacaactacatccgctcgcgccgcgacatccgctccttgccggagaatatccagttcgacgtttactacaagctttaccaacagggacgcttgtgtcagctcggcagtgaattctgtgaattggaagtttttgctaaagttttgagagctttggataaaagacatttgctccaccactgttttcaggctctgatggaccatggcgttaaggtagcttccgtcttgccctacttcttcagtagacggtgctcttacata

SEQ ID NO: 529715 - DNA, 524 bp, Homo sapiens
ctggtgacggtaccaacacaccagcccaggccagacttaggaccggggctgtaccggagaagtacgcacggttctgggcttcagggagaccaggctccatttctgcggtgaagtcttggagagaccaggatcaggggctgagtgcaacctcctccccatgccatctgcagagccggaagaggaaaacacaaatacaagtggaggccatctcttcccctagggcctaacctctaagcctagcagcacaaactcaggagctgtggtttcatttaataataaatatgcatccttgaattcaacggaggaacatgctcctggaatttagaagcaagaggggctgggcgcggtggctcacacctgtaatcccagcacttggggaggccaacacgggcagactgcctgagctcaggagatcgaggccggcctgggcaacatggtgataccgtttctactaaaacacaaaaaattagccaggcatggcagcctgcgcctgtaatcccagctactcagaaggctgagacagg

SEQ ID NO: 529716 - DNA, 270 bp, Homo sapiens
aaattggtatttatcttggaaatggcagtctcatttctcataaaagccaagagacctatttaacctgtgatggctatcacacttcaaagatagcagaatcttttagaactgaagctccttgaagcaggctgaaaatacatataagcaaacagaaaagataagtttaaaggcgacttcagtaaagatccagctggtgatctgacctcccagtgagtccctgagtgcttggaaatgttatagtcttgacggaaatatggaggttattggcat

SEQ ID NO: 529717 - DNA, 533 bp, Homo sapiens
tcttgagtatcccctaattggacagcgcgtgatacgattagggcagttattttatgtaaaggggtattgttgtgtttggtactgttataggtgggatgttgtggagatgataaagccagcgaaaatgcttccgattaaaaggcgtttaatagagttaattagtagggggttattttcattaattaggactaggggtgggaaacgtggttaccctaggaatgcaaagaagataattcgagtgctgtaggcagcggttagggatgtggcaattaatgtaattagtagggctcaggcgtatgtgtaggatatatttactgctccgatccattatccacaggcttaatgacgagcaagacatccgaaacataggcaggactgtataaagcaataaccaattcgacagcaagcagcactaatttattgggaagctgggattgacaggtaatgccttattctcagaggattctactcagaagaccttattatagaggcagcaaaacattattccataaaaatgcctgagccctactaat

SEQ ID NO: 529718 - DNA, 189 bp, Homo sapiens
ctcattcggggcacctctgtcatctttgccttgaggatatcctatcgtcccagtgttctgcagtttcatgcagctccactagctcgttggcccttcctctgggcttgcgcaggttctgctgctaggtgtcgtgggccataggcctggccagtggcgggccccgcctggctgtgctgtgtgtgctggagc

SEQ ID NO: 529719 - DNA, 343 bp, Homo sapiens
tagatcttaaagtgtttatctgtggtttccgtactgcctatgatacattataagaatttataattaaagtttattaagaggaaagattatgcttatattttaggggaagggggaatattgaactacatttatagtgattttgtttcaggtttttctgaggaattttaaataccctgtgtcctcttaatagtaaaaacagtttgaggtactctgagtttcttacaactatttgtctctgaatagttttctcttaaaatttgacaaatattaaaaacattgtccttccttctttggttacagtgggagtctcttctgttttgccgggaaagtttaacatattttt

SEQ ID NO: 529720 - DNA, 378 bp, Homo sapiens
agtccataacattgaatttagtcttgtactttcctcccttttttttgagacagagtctccctctgtcacccaggctggagtgcagtggcacgatctcggctcactgcagcctctgcctcccaggtgcaagcaattctcctgcctcagcctcccaagtagctggggttacaggtgcgtgctaccacacccagctaagttttttgtatttttagtagagatggggtttcaccatgttggccaggctgatctcaaactcctgacctcaggtgatccacccgcctcagcctcccaaagtgctgggattataagcttgagccaccgcgccggcctccttcttataattatagtaaataattacctcacctcagtcccatatag

SEQ ID NO: 529721 - DNA, 263 bp, Homo sapiens
tgctgggtaaaagcctaaattccccccccctcatggtttgggggccgcatggtccttgtggatattgggtttgtgggagttaagggaacttaggaaataaggtccccccccccatttttttttgggattcagtttttcaaaaatcttttttttttccccttcccccccctgggggaattacaaaaccaaggcccttttctttaatgtaaagggggtttttttaaaaaaaaaaccaaataaacccccagtccgtctttgtttta

SEQ ID NO: 529722 - DNA, 325 bp, Homo sapiens
ccccccggggcgggcgggggccccaaggccccgggggccctcttgtgggggggggcccgccccgcgctttttttccccgccggggggggccccccgggccggggccccccttttttttttcccctttcgcggggggcccccacgggagctgggggtttccctttttgggttgggggccgttccccacttggggtttgggcccttccccccccgggctgggcctacgggttttttttggcccggggttttggcccccgggggccccccccccccctttccgggggggttccccccccccccctttttttttttttgggggggggga

SEQ ID NO: 529723 - DNA, 223 bp, Homo sapiens
cactgcgagtcaggagtatgagaccagcctgaccaacatgggacaagcaccgtatctaaaaaagacggagatcagccaggagtggtggtggaacaccgcagtcccagctacacgggaagcagaggcaggagaatcactcgaccctgagaggcggaggttgcagtgagccacagatcgcgccactgcactccagcctcagcctcccgagccgcagggaacgaca

SEQ ID NO: 529724 - DNA, 103 bp, Homo sapiens
tccgccgtgtcgcacagtaaggggtagggggtagatgaggacaagaacaccctgagaaagtattttacatgcacaaggctttatgagagaataggagaacaca

SEQ ID NO: 529725 - DNA, 596 bp, Homo sapiens
  misc_feature (2)..(2): n is a, c, g, or t
  misc_feature (85)..(85): n is a, c, g, or t
  misc_feature (101)..(101): n is a, c, g, or t
  misc_feature (103)..(103): n is a, c, g, or t
  misc_feature (114)..(114): n is a, c, g, or t
  misc_feature (120)..(120): n is a, c, g, or t
  misc_feature (125)..(125): n is a, c, g, or t
  misc_feature (130)..(130): n is a, c, g, or t
  misc_feature (174)..(174): n is a, c, g, or t
  misc_feature (195)..(195): n is a, c, g, or t
  misc_feature (244)..(244): n is a, c, g, or t
  misc_feature (252)..(252): n is a, c, g, or t
  misc_feature (262)..(262): n is a, c, g, or t
  misc_feature (304)..(304): n is a, c, g, or t
  misc_feature (386)..(386): n is a, c, g, or t
  misc_feature (457)..(457): n is a, c, g, or t
  misc_feature (586)..(586): n is a, c, g, or t
antctttgaacccacaaataaaaaataccctccaaaaaaaaaaaaaaaagacagtaagtggaagcctcgtcattgtttaagttanaccagcggggcttgcntnggagaactgcncctgcncagtnctgtncctgtgctcctggccctgggtggcccctactcgtcctctgtggnggatgtaagcatccctttgtngatcagatgaaaccgcagcgtgtggaagaggtggagcggctgaactggngtaaagtnaggaactgcngaatcagtttagcttgggtgaggagcctctgaaaaaactggngaggtatacattgacaaaggtggccatcagaaactggcagtaaaagcgatccatgaggcctccatggcacaggaatggtatnggcaaagtctttgattttaaaggctcgtttgaattcacttgcgaagaatcctccaaaggggccaatgagcnagggaaaggtggagagagcgatgctgtgaatttggaaggggtacatccggaccgttttccagcaaatgactgaatggatcaccccaggaatgttgtactcctgcaggcgaaaaaggtccgagggctcanagtccacagt

SEQ ID NO: 529726 - DNA, 1269 bp, Homo sapiens
  misc_feature (139)..(139): n is a, c, g, or t
ggtttcgattataactagtatggggataaggggtgtacgtgtgccttgtggtaaggaactgggctatgggcattatgtagatcttagtagctgaaaggaccgtataattcagcgtgctcccgactcgataacgggcggnatgccgccactgcgcgtacgtgtggaatagcattagcttgggctgtggtagcagtgtcaaagtgaaatgcaggctcaggagctccgaagtccagtggattagtgttgctggactagtcatgacaatggagtgtagcagaagtactagctagtagatcagagtcaccgggtgtacgcccatttacctgctatgatgatactttgcttgtctacactcgtgaggtactgccgacgtgtgaagggcccccgagtcggagttccattgttgcgtaggaaagctcgagcaaggagtagcatctgcgaaggggagtctcagactcgaagacctaaatgaagagataccgtagttgccgggacgtcaacgccaacggaaagcggacgtggggccaccgacagttcgagagcacaactggtgaatcacgcacgtcgtcaccctgggcccgcgacgggcagcagccagtgacgccgtcgaggggcaactgagccgcgacggccgcccaacagcgacaaagttgccaaagcgccgaacaaaaccagccagctactcacccctgcgtcacccgacctccccgagggcactccccgtacagcacacggtggctcgctgacccgcccaatcagcacaacaaccccacgtgcagctctcgacgctataccattgccgagcccatgctcaggccctcgtgcaacgggcgaaagcgcctctaccacgcacttgaacgcaccgaagctaacttcgactcgcgtgtctgcacaccatgtcacctacctccacttgtacagcacccgaaacctgcctgatgagttccgcacaacgtcaatatctacggcgtacggagcaagagagcggagtaatgacataccttgcgttcacgttgcggaatcagatttcataacattcgcaaggctatgagatagattccagctgaccgaaggacgaatacagtaagttctcataaggcataacacggaagaggtccatgtacatcacaccgcgccaatctataaaggcccacacaacaaacacagcagaaaacaaggagttgttacgcacccccacccaatggaaccataaacaacaccccaaaagagccctcaggccaacagcccactggcagcctagggcaccac

SEQ ID NO: 529727 - DNA, 371 bp, Homo sapiens
gggggggggggggggggcccccaaaattttccctttttaaatttttttggggggaaaaatttcggggggggggggggaaagcccgggggggccaagggaaaaaaaaaaaggggtttttgggggcggggggggggggggggtccgggcccaaaggggttttttggggggggggggagagagggaggggcccccccccctttttcccccccgggcccggccggggtttttttttttttcccctttcccccccccaaaaaaaggtgggggcccggcccttttttttttttttttttttccccgggggggccccccccccccccccctctttttgggggggcccccctcccaattttttttttttaattttttta

SEQ ID NO: 529728 - DNA, 289 bp, Homo sapiens
taagtaccccatctcaattatgcccacaaccccatgagcccaaaaagggataagagaaacctatctttcaggattctcaagatacagagttttcatggagtgataatgaaaggagcagcagccgcattatacgatcatctaatcaatcaaacaccaaaaataattctcaataatgcatcgtcgacactcgaatcaacatcaaaatcatctcagcatatataataaattactaatcacataactacacaataactaatactaataaaacaatcacaccgaccgataataa

SEQ ID NO: 529729 - DNA, 290 bp, Homo sapiens
ccaaaagttttttttcccaacccccaaatttttggtttccccccaaggtttttaaactttttcccggggaaaagcaaaaaactttttttttcccccttccctttttcccaaaaaggggggcccaggggtttccgttggctggtttgccaccttttttggtgaagcctttttttggtaaccccattcccctgttccgttttgttgttaactgccctcccctaaaaggccccgttgaaaaagcttttttaggggggttttttaagggggtttaaattaaagctttaaaatta

SEQ ID NO: 529730 - DNA, 327 bp, Homo sapiens
gagactatgctgcagcaggagacagtgctcaccagagacgcgccacctggtgagagtatgcaaggcacggcgcatccacgtgccatgcacggacatccacccagtccatcgcaatcttccatgcatcggcaacaagacagcagcggcgctctgagcagtcaggccccagggttcagcagcagtagggggttgggacattcggcgtgtgcagctctcggcgtgtgcatgcacacgccgagtgtccatacgaagttgttgcatgtcttggtggacgaagtagttgcagcacacgccgagcacccatacagatcgtagtggacgaagttg

SEQ ID NO: 529731 - DNA, 365 bp, Homo sapiens
  misc_feature (86)..(86): n is a, c, g, or t
  misc_feature (281)..(281): n is a, c, g, or t
gctcagcctctttccctatagtatttacagaataattttaaatttcagtttcacctccactacttcaacgattttaccctgtaaantgctgaaggtctttgtgaactgtcgaccagcaagggcgcaaagtagaggtatctagattacaaacttcaaccaaaagtagtccttgagtaattaaaatgttacttcattatcttctttttgcgggaagattgctcagaagtgcgcattctttacatgccttcacctcgttgagctaaacaggtcaaaagtataanaaactcaacattatttttaacttgcgttattcgtggtgccaaatgagaatagagctgtttttgccactttgggctggatgatta

SEQ ID NO: 529732 - DNA, 421 bp, Homo sapiens
agttcgacggagactctcgaaggcgggtagaaggtagaggaactagttacaggtatttctgaatttcagttgtcatggggatagaaaactggataagatttacaaagagggagtataggtagaaaagtgaaaagttctagctgggtgcggtgacttacccctataatcccagcacttcgagaggccaaggtgggagtatggctggaggccaggagttcaataccagcctgggcaacatggtgaagccctgcctttaagaaaaaatacaaaaaattacctgggtgtggtgcagtgtacctgtagctcagctacccaagaggctgaggcaggaggattgcttgagcctaggagatcaagactgcagtgagccatgattgcagcactacactccagcctgagtgacagagcaacactctgtctc

SEQ ID NO: 529733 - DNA, 365 bp, Homo sapiens
  misc_feature (152)..(152): n is a, c, g, or t
gcacctgctctcataatgacaatatataccgggatgcagtgatatgggttcccacgaaccgcttctgtgtgaactggggaagtccggcctctctgggcctcagtaggctccaggctgcaaggggtggactgtgggatgcatgccctggcaancattgaagttcgatcatgaaaaacaaaaaaaaaaaaaaaaaaaaaaaaaaaaaaaaaaaaaaaaaagggggggcgctaaaattttccccggggggccccatttcgtccccgtttttttaaggggccccctgagcataacagcggggcgtttaaccggggaaactgcgggttcttgaagcacccttttttgggggtgcttttgggcatcctcga

SEQ ID NO: 529734 - DNA, 1166 bp, Homo sapiens
gaaacttgtcaacccaagatccggtcggaattccggggggaactactatactcaaattcgcgcccgcgtcgattagacttaactcccttaagcccagacatctgttgagacctgacccctagtcattggttaccagtgtgtcaggcaatctggactttccagtgatgccactgagatggcacctgtcaaaagagcagtggttccatttctagattgtggatcttcagataaattctgccattttcatttcacttcctgaaagtcagggtcggcttgtgaaaagttgttaaacaacatgctaaatgtgaaatgtcaaccctcactctaaactttccctgttcagagcatcagatgaagacttcattgggttttatagtggctttctgatttttggtagtccattgaagaagggagtttgaaagttgttgtatactgttaacgattgtctgcccatgtcctgcctgaaataccatgattgtttatggaaagtatctttaataaagctggatacagtttggcttggaaaaaaaaaaaacaacaaaaaaaaaaaaaaaaaaaaaaaaaaaaaaaaaaaaaaaaaaaaaaaaaaaaaaaaaaaaaaaaaaaaaaaaaaaaaaaaaaaaactttttcgcccccctagacaaattaaattttagtttgggctaatttaaaaaataagcaaaaaatgaaaataaatttgccaaatcgccctaaaatgaaggcaatataaaataaacggcctttgttaaaaaaacttgaaaaaagaaaaacccttgagttacccaaaataaatgggaataacaaatcccccttttgaaaaatagggaaaaaaaaaaaaagacctgaacaattggccataacaaaaaagaaccaaacccgaatgggtaaatgaaaaatgaagccgtaaatctttgcaaaaaaacacctaaaaatttttgtataattgccccaaattcgttttggtgtaaacacatttggaaaaaaaggcccatttttaaaaacctgggctcaaacacccaaaaggtaaaaaaccttttaaaaagcggaaggcccaataaaaaccatacccatattaatttttttgaggacaagggcccaaaggaattaaatgggacccaaaagggacccaccattaaaatttcaccgaaaaacccctaattggggg

SEQ ID NO: 529735 - DNA, 996 bp, Homo sapiens
  misc_feature (334)..(334): n is a, c, g, or t
  misc_feature (495)..(495): n is a, c, g, or t
  misc_feature (619)..(619): n is a, c, g, or t
  misc_feature (635)..(635): n is a, c, g, or t
ggggttttgcgtcgtagtctcctgcagcgtctggggtttccgttgcagtcctcggaaccaggacctcggcgtggcctagcgagttatggcgacgaaggccgtgtgcgtgctgaagggcgacggcccagtgcagggcatcatcaatttcgagcagaaggaaagtaatggaccagtgaaggtgtggggaagcattaaaggactgactgaaggcctgcatggattccatgttcatgagtttgggagataatacagcaggctgtaccagtgcaggtcctcactttaatcctctatccagaaaaacacggtgggccaaagggatgaagagaggcatgtnggagacttgggcaagtgtgacttgctgacaaagatggtgtggccgatgtgtctattgaagattctgtgatctcactctcaggagaccattgcatcattggccgcacactggtggtccatgaaaaagcagatgacttgggccaaaggtggaaatgacgaacngtacatagacaggaaacgctggaagtcgttgggcttgtggtgtaattgggatcgcccaataaagcattccctgggatgtagtctgagggcccttaactcatctgttatcctgctagctgtaganatgtatcctgataaanctttaacactgtaatcttaaaagtgtaattgtgtgagcttgtgcagagattgctttaaagtacctgtagtgagaaacgtgatttagtgatcacttggagatttgtatgtttattaaagtcagttaaaatgtctgttgcaatgactgttttttggcagagttaaattacgagatgggttttaattgtcagaatttctttgtcagttcaggctgtgaattaaaccctggatgggacttttataggtttaaagattccagtcaaaaaaaaaaacctggggttttttggggggaaaaggttaaaggccttgtatcgtttctgacaggtttgtaaggggatgggcctgggagtataaaacggtgtt

SEQ ID NO: 529736 - DNA, 450 bp, Homo sapiens
tcttacgaggatcccccctggcttgctcaggtctcctggcttgctcttgcttctctagttctttagtgatgttagggtgtcgattttagatctttcctgctttctcttgtaggcatttagtgatataaatttccctctacacactgtttcaaatgtgtcccggagcatctggtacgttatgtctttgttctcattggtttcagagaacatctttatttctgccttcatttcgttatttacccagtagtcattcaggagcaggttgttcagtttccatgtagttctgcaggttctgagcgagtttcctaatcctgtagttctagtttgattgcactgtggtctgagagacagtctgttataatttctgttctttcacatttgctgaggagtgttttacttccaattatgctgtccattttggatttcgtgcaatgtggtgctgagaagacc

SEQ ID NO: 529737 - DNA, 935 bp, Homo sapiens
gcgctataaaaacttttataaaccccccggagcccgagcagtgtgaagaagaggcgagaacgacccccggaccgaccaaagcccgcgcgccgctgcatcccgcgtccagcacctacgtcccgctgccgtcgccgccgccaccatgcccaagagaaaggctgaaggggatgctaagggagataaagcaaaggtgaaggacgaaccacagagaagatccgcgaggttgtctgctaaacctgctcctccaaagccagagcccaagcctaaaaaggcccctgcaaagaagggagagaaggtacccaaagggaaaaagggaaaagctgatgctggcaaggaggggaataaccctgcagaaaatggagatgccaaaacagaccaggcacagaaagctgaaggtgctggagatgccaagtgaagtgtgtgcatttttgataactgtgtacttctggtgactgtacagtttgaaatactattttttatcaagttttataaaaatgcagaattttgttttacttttttttttttttaaaagctatgttgttagcacacagaacacttcattgttgttttggggggaaggggcatatgtcactaatagaatgtctccaaagctggattgatgtggagaaaacacctttcccttctagttttgagagacttcctcttggctccaggagcagaaggatatacctggactgactgatactacagggccctcgcgacttggggccccaaaagagctagcagaatccggaaacttttcaatcgtcttaaaggaagatgatgtccgccaagattttgtaagaaacccttaaataagaaggtaaaaccttggcaaagccgcaggattcgagcctgtgaacgccaggtgtccatgagacaaaggggggaggatatggccctagaaaaaacagggatcccaaaaaaaaaacaag

SEQ ID NO: 529738 - DNA, 167 bp, Homo sapiens
  misc_feature (141)..(141): n is a, c, g, or t
gattgacaagttcgagtttgtgcgagaagctgaaacgccagaaatatgacatcaccacgctcaggagccgcattgaccaggcccagaagcacagcaagaaggctgggaccccagccaagggcaaagtcggcgggcgctggnagtagagaggccagaaaggcccctcg

SEQ ID NO: 529739 - DNA, 1086 bp, Homo sapiens
ctgtatgtttcaattggccagtttaatgtttagtagctaaaagactggttaatgataccaatgcactcgtaaaaccttcagaaggaaaggagaatgttttgtggaccactttggttttcttcttgttgcgtgctggcacgttttacagcttattacgtttttaacaatcagtactttttaatggacacaacttgaccaataaatttgtcacagacattttgacgacccattaacaaaagcttaaactgacgcaaaaaaaacaaacacacacagcgccgccccccccacaactttccccccaagggcccccaaccctattcgcgcgttataccgcggccctttctctctggtctaccaacgaggtggtccccctaattgcgagtgagctctcgctattatatctcgcgcctatgaggcgtgcccgtgtcccgcgccccgttactaacaaaccggtttcgctcaccgtgggacacaaccggctcctaaaacctcttggcaacatcatcttagcgtagaaaaagaaaaacccccttataccactctccgtgccatgcaacactgcatcaacactatacatctatgcgcccaccaccaacatctacccctaccagaacaacatttttaacaacagactctcatcacacgcgctataacacctcatatttcacaacatccctaacacacaccatcgtatatccacacgccgatgttacacaacaatcaccccagtccatttatccctctctgcccatccctctcaccactattccaccgcacaccccgcaacacattctctccactctctctaacccattcttcactacccaccacgaaccactccccaaaaaaacattcaacatattaatctcctacaacacacaacgttaccttcaattccccataacctaatacgaataaccttctactaccactataaacataaacaatacatattatcataaatagacaactacataacatcttattcaacattactattattcatcaataaataaatcacctcaaatcaccttatcaaaataataaaaaatcatataaacactcgctccatccatctcaaaacac

SEQ ID NO: 529740 - DNA, 667 bp, Homo sapiens
  misc_feature (639)..(639): n is a, c, g, or t
gcgctataaaaacttttataaaccccccggagcccgagcagtgtgaagaagaggcgagaacgacccccggaccgaccaaagcccgcgcgccgctgcatcccgcgtccagcacctacgtcccgctgccgtcgccgccgccaccatgcccaagagaaaggctgaaggggatgctaagggagataaagcaaaggtgaaggacgaaccacagagaagatccgcgaggttgtctgctaaacctgctcctccaaagccagagcccaagcctaaaaaggcccctgcaaagaagggagagaaggtacccaaagggaaaaagggaaaagctgatgctggcaaggaggggaataaccctgcagaaaatggagatgccaaaacagaccaggcacagaaagctgaaggtgctggagatgccaagtgaagtgtgtgcatttttgataactgtgtacttctggtgactgtacagtttgaaatactattttttatcaagttttataaaaatgcagaattttgttttacttttttttttttttaaaagctatgttgttagcacacagaacacttcattgttgttttggggggaaggggcatatgtcactaatagaatgtctccaaagctggttggtttgggaacccttccttctngttgagggctcctttggttcaggggggg

SEQ ID NO: 529741 - DNA, 333 bp, Homo sapiens
ggggttttgcgtcgtagtctcctgcagcgtctggggtttccgttgcagtcctcggaaccaggacctcggcgtggcctagcgagttatggcgacgaaggccgtgtgcgtgctgaagggcgacggcccagtgcagggcatcatcaatttcgagcagaaggaaagtaatggaccagtgaaggtgtggggaagcattttagcactcacgaacaggtctgaaatggcggccagtgtcaagacgtgcagacatacaagctccagtctagagcatcccagaggagcacagaaatacggtcacactacgctttccccgtgggtccgcagcaggttgaaaga

SEQ ID NO: 529742 - DNA, 655 bp, Homo sapiens
taatagtagttctggaaccttaggttttatgctatatcatgcatatgagtggatatgtgatcatgattcattttgccagatttacattttgctgtgtgtggaaaagttacgttcacttcaacttacagacccttttgatataatgtacagcaaatgtcatttaaatattgaatgctctattgggggaagacaaatgaagagaatgcatcctgagcatttcaaatcagtagtttggacagtgccttgttggggtccaatctttttggattggattctatgtcatcttgtgatgtgacttttcaatagttcacaaaagtaaaggttggtggtcaacaaaaatagaagcaagtcatagcagttctgtgccttagctggtagtttataactttttgccgtgattctttactggacaatcatagcttacagatggtataactgtattatataatggatattttctttaggtagtagggacaacttgatctgaaagaagatcatcagcttcaagtggcgattgattcagtgcccacaatgtatacagggttgctagttgttactcatgtgcgaatataccttttccttagtgtattctgtcaatataggatcctgtaaatgagacttggttggaatattatttaaaccggatctcttatac

SEQ ID NO: 529743 - DNA, 121 bp, Homo sapiens
tacaaccacattctggaccgcgacgagcggctctggttggaagagcgcattgaggccggccaacccaagccgtcacgggctgagcaaaagtacattttgcagaagctcaacgctgctgagg

SEQ ID NO: 529744 - DNA, 683 bp, Homo sapiens
tacggatgagagaagacgacagaaggggttgaaaaaaaaaaaaaaaaaaaaaataaaaaaaaaaaaaaaaaaaaaaaaatatcaaaaaaaaaaaaataaaaaaaaaaaaaaaaataaaaaaaaaaaaaaaataaaaaaaaaaaaaaaataagaataaattaaaatataaaacataaataaaaattataaaataatatgagctgatttatacacaaaaattacctaattattgaatatataataataataaatgctttatcattatttcaaagtacttatttgaaaatactattgaattactaaacatatttgaaatacttgatgaattcccctttacacaattttttatattttacaaaacgattataattattgtaattttctaaataaataactccatattggtaaagataaattgcataatattcagcattaattatatgttaaacaattatatattaaatacaatttttcatatactataataattttaccctatgttagatactttaccaataatattcaaaaactaaaaatgaatattctaaattaatgatctttatctttatatcatataattcgtaatataaatttttataaaacatcatttaattctaaacataatgttcccaaataccattatatctgtataagtgacacaaatattaatcaatatatatatt

SEQ ID NO: 529745 - DNA, 677 bp, Homo sapiens
gcgctataaaaacttttataaaccccccggagcccgagcagtgtgaagaagaggcgagaacgacccccggaccgaccaaagcccgcgcgccgctgcatcccgcgtccagcacctacgtcccgctgccgtcgccgccgccaccatgcccaagagaaaggctgaaggggatgctaagggagataaagcaaaggtgaaggacgaaccacagagaagatccgcgaggttgtctgctaaacctgctcctccaaagccagagcccaagcctaaaaaggcccctgcaaagaagggagagaaggtacccaaagggaaaaagggaaaagctgatgctggcaaggaggggaataaccctgcagaaaatggagatgccaaaacagaccaggcacagaaagctgaaggtgctggagatgccaagtgaagtgtgtgcatttttgataactgtgtacttctggtgactgtacagtttgaaatactattttttatcaagttttataaaaatgcagaattttgttttacttttttttttttttaaaagctatgttgttagcacacagaacacttcattgttgttttcgggggaggggaatttccctataaactgttcccaactggattattggggaaaaaccttcccttagtttggggctctcttggcccgggggggtcccatttgcaaatgc

SEQ ID NO: 529746 - DNA, 179 bp, Homo sapiens
cccaatttgtttttgcccgtttttttccccccaactggggtttggccaggatttttccgtgtggggggtaaatgggaccctttcccccccccccttcctttaaagggtggtgttttgtgggggggaaggtcagggctccttaccaccaataaaggccccggaaaaggccttgggtgtta

SEQ ID NO: 529747 - DNA, 814 bp, Homo sapiens
gcgctataaaaacttttataaaccccccggagcccgagcagtgtgaagaagaggcgagaacgacccccggaccgaccaaagcccgcgcgccgctgcatcccgcgtccagcacctacgtcccgctgccgtcgccgccgccaccatgcccaagagaaaggctgaaggggatgctaagggagataaagcaaaggtgaaggacgaaccacagagaagatccgcgaggttgtctgctaaacctgctcctccaaagccagagcccaagcctaaaaaggcccctgcaaagaagggagagaaggtacccaaagggaaaaagggaaaagctgatgctggcaaggaggggaataaccctgcagaaaatggagatgccaaaacagaccaggcacagaaagctgaaggtgctggagatgccaagtgaagtgtgtgcatttttgataactgtgtacttctggtgactgtacagtttgaaatactattttttatcaagttttataaaaatgcagaattttgttttacttttttttttgttttgtttggttctttatggaaagccccctttgcttgttttgtggtgtgtaatgccgtttgtcctttagttgttatgagcctttctcgctgtttttctgatgtgtactactctctttttttcccttaattccacccttttgtttttcttttcttcttacttccaacaaatattttcgtctcgtgttttgttttttctcttcattttattattcagctttttcttccctttgtcctggttctttcttaatctgtcgacccctcacaattgacaacaaacttctgatttctt

SEQ ID NO: 529748 - DNA, 705 bp, Homo sapiens
aaacttcaaccgagggcagtctacggattagatcatcctttcatgactcggaatcatgtgaggacgctacatgcatgctcctattcgtacatactcatagaatgctacagtaagaatgaagtgcaaaagttacatccgggaacaagtgagacagatgatgctagagacagaagcgtaaaaggatggaactcctgactgcatagatacagagcgggacattagaagatagcaagagccgtcaagcattcactaggacgtacacaccaagcgaaaacagtagagacataggtaagtgcaaaccccacatatgaataaacgaactgaacaaatgctgtagtcacccaagaattgagctatgaaagcgtagagaagcccctaaggattccccaagaaagtttaaccagtggaggacctagacgaaatacgttggattggcaacactggagataattagacaaagctcgaacatacgtgccgtttggacccgtggattcaccaacagatgaggacaatcacggattatcagtgcaagacaattgtatgtactcgatagcctggacatagtagacacctagcccagatgaagacagaacttcagagtatgaacaaaaacgagagtaagaatgtaccaacaagactaaaggagcaccaacttctacatcacatcgtcaaatgaggacgttcccccaaaaatactagctacaa

SEQ ID NO: 529749 - DNA, 182 bp, Homo sapiens
aagcttcatagtggggtatctaatcccagttcgggtcttatctattgtgtgttcagatatgtttaagccactttcgtagtcaattttgttgtcacactggagtttatttacaactccatgtgagttaaagctttattgtgggagggggtgatctataacactctttacgccggcttctattg

SEQ ID NO: 529750 - DNA, 1142 bp, Homo sapiens
cactacccttcccactcttcccttcactttctgcggcagaagagttatttccccgtggccgtcaccaaccacacgtccatggggagtactgctaggctgttgctgatgaactcccaagggttcttcagtcagcttgtgataaatgctgcctggcctgggactcacccttcagggcagtggggttccctctggcccaaggcacatctagaaatgccattttcatttcacttcctgaaagtcagggtcggcttgtgaaaagttgttaaacaacatgctaaatgtgaaatgtcaaccctcactctaaactttccctgttcagagcatcagatgaagacttcattgggttttatagtggctttctgatttttggtagtccattgaagaagggagtttgaaagttgttgtatactgttaacgattgtctgcccatgtcctgcctgaaataccatgattgtttatggaaagtatctttaataaagctggatacagtttggcttggaaaaaaaaaaaacaacaaaaaaaaaaaaaaaaaaaaaaaaaaaaaaaaaaaaaaaaaaaaaaaaaaaaaaaaaaaaaaaaaaaaaaaaaaaaaaaaaaaaactttttcgcccccctagacaaattaaattttagtttgggctaatttaaaaaataagcaaaaaatgaaaataaatttgccaaatcgccctaaaatgaaggcaatataaaataaacggcctttgttaaaaaaacttgaaaaaagaaaaacccttgagttacccaaaataaatgggaataacaaatcccccttttgaaaaatagggaaaaaaaaaaaaagacctgaacaattggccataacaaaaaagaaccaaacccgaatgggtaaatgaaaaatgaagccgtaaatctttgcaaaaaaacacctaaaaatttttgtataattgccccaaattcgttttggtgtaaacacatttggaaaaaaaggcccatttttaaaaacctgggctcaaacacccaaaaggtaaaaaaccttttaaaaagcggaaggcccaataaaaaccatacccatattaatttttttgaggacaagggcccaaaggaattaaatgggacccaaaagggacccaccattaaaatttcaccgaaaaacccctaattggggg

SEQ ID NO: 529751 - DNA, 167 bp, Homo sapiens
tagaggatcgcaagggctgttcgcgtgctcggaggggtgtcgctgccatctgcggacatactaaacagatctgtgctgcagccgcgtaggaaggcctggggcggggctgcagctctgcccacccttcggctcagagggtttccggtgagatctgcccggcgtggtcc

SEQ ID NO: 529752 - DNA, 215 bp, Homo sapiens
agcgagcacaaagattccagagacaggctgtacaaggtccctgaaccaggctgtacaaggtccctgagccaggttgtacaaggatccctgagccaggatgtaccaaggtcccatgagccaggatgcatcacagttcctgagcaaggatacaccaaagttcctgtgccaggctaaacaaaggtaccagagccatgtacttcaacggtcactccagg

SEQ ID NO: 529753 - DNA, 403 bp, Homo sapiens
tcgtgctgacagcgctccaaacacgcgcattcgcatggttgacctttggaatcgtccccagggcactgtagccaggattcacatcggccacattatcattgtccatccgcaccaatgctgtagcaacataggatcatgttattcatgactcatgtgcacggctgtgtacacgtttcctggtcgccagaagatccacatctcaaaccaagtgtggccttcaccaagtccaatgactcatcaactatgaagacaattctgcctgaatcgacgctgtcatccctgatggctgtggggtcaactacatcccccgtcgtcattattaggacagttcgtggcgccctgcactcatgagggcttccaatgtgctgcccccctcttaatactcaccaataaattctacttc

SEQ ID NO: 529754 - DNA, 473 bp, Homo sapiens
gcgctataaaaacttttataaaccccccggagcccgagcagtgtgaagaagaggcgagaacgacccccggaccgaccaaagcccgtcgccgccgccaccatgcccaagagaaaggctgaaggggatgctaagggagataaagcaaaggtgaaggacgaaccacagagaagatccgcgaggttgtctgctaaacctgctcctccaaagccagagcccaagcctaaaaaggcccctgcaaagaagggagagaaggtacccaaagggaaaaagggaaaagctgatgctggcaaggaggggaataaccctgcagaaaatggagatgccaaaacagaccaggcacagaaagctgaaggtgctggagatgccaagtgaagtgtgtgcatttttgataactgtgtacttctggtgactgtacagtttgaaatactattttttatcaagttttataaaaatgcagaattttgttttacttt

SEQ ID NO: 529755 - DNA, 155 bp, Homo sapiens
ccttgtctcttaaaaaaaaaaaaaaaaaaaaaatgagagaaatcggctgggcatggtttctcatgcctgtaatcccagaactttgggaggctgaggcaggtggatcaccggaggttaggaattcaagactgaaaccttgtctctactgaaaatac

SEQ ID NO: 529756 - DNA, 1041 bp, Homo sapiens
  misc_feature (8)..(8): n is a, c, g, or t
  misc_feature (59)..(59): n is a, c, g, or t
  misc_feature (104)..(104): n is a, c, g, or t
  misc_feature (109)..(109): n is a, c, g, or t
  misc_feature (114)..(114): n is a, c, g, or t
  misc_feature (179)..(179): n is a, c, g, or t
  misc_feature (1041)..(1041): n is a, c, g, or t
aaaggcancccccccgctaacactaagccctcccggcccccgatgtgtgtggaaatgtnaaccggataaacaattcccaccacaggaaaacagccatgaccccngattnacccnccaagccccgaaaataaaccccctcacctaaagggaaacaaaaaagctggaagcctccccacccnggtggcggcccgctcctagaacctaggggatcccccccgggctgccaggaattccggcacgagggatcctccagataaattcctgctgccattttcatttcacttcctgaaagtcagggtcggcttgtgaaaagttgttaaacaacatgctaaatgtgaaatgtcaaccctcactctaaactttccctgttcagagcatcagatgaagacttcattgggttttatagtggctttctgatttttggtagtccattgaagaagggagtttgaaagttgttgtatactgttaacgattgtctgcccatgtcctgcctgaaataccatgattgtttatggaaagtatctttaataaagctgaaaacaacaaaaaaaaaaaaaaaaaaaaaaaaagggggggggggaaaaaaaatcccccgagggggccaaatttacggttcccgggtttgctgtacaagggggccctagagagagggcaaatataacacagcaaaaggcgcggatataaacgggcggaggcggaaaagtggagcggagacctcggagaggaccctactcgggcgggggacatgtgggacctaccaagaaattaaggccaaggggaaacttacccgctcaagagggataccgcggtgaacccacggagagatcggtgggggcagacattgggccggggtgttattaagaatacaggcgaggtgtatattataataaaagagggggagatggttgagagatgaaggagagagcatcagaacagggagagagaagaataaagtcaaaaagggacgaggggaagaagaagagaaatgagaaaaaaagacagaataagacagtaaagagatgaagagtaaaacatatgtan

SEQ ID NO: 529757 - DNA, 482 bp, Homo sapiens
aggtagtcattgaaatgactttttttcttgagacggagtgtcactcaaccatgctgaagtgcagtggcgctaccttggctcgcggcaacctccacctcccggattcaagcgattcttgtgcctcggcctcccaagtggctgggattgcaggtgcctgctgccatgcctggctgatttttgtctttttggtggagatgggatttcactatgttggcccatctggtcttgaactcctgacctcgggtggatcatttgaggtcgggttttgaggctagcctggccaacatggtgaaaccccgactctgctagaaatgcacaaattagctgggcgtggtggtgggcgcctgtgatcccagctgcttgggaggctgaggcaggggaatcgcttgaggccgggaggtggaggttgcagtgagccgaggtcgcgccattgtactccagcctgggcaacagagggagactccttttgggggtgagaaaag

SEQ ID NO: 529758 - DNA, 698 bp, Homo sapiens
  misc_feature (698)..(698): n is a, c, g, or t
aaactgtatccagctttattaaagatactttccataaacaatcatggtatttcaggcaggacatgggcagacaatcgttaacagtatacaacaactttcaaactcccttcttcaatggactacctgaaataccatgattgtttatggaaagtatctttaataaagctggatacagtttggcttggaaaaaaaaaaaacaacaaaaaaaaaaaaaaaaaaaaaaaaagggggggggggaaaaaaaatcccccgagggggccaaatttacggttcccgggtttgctgtacaagggggccctagagagagggcaaatataacacagcaaaaggcgcggatataaacgggcggaggcggaaaagtggagcggagacctcggagaggaccctactcgggcgggggacatgtgggacctaccaagaaattaaggccaaggggaaacttacccgctcaagagggataccgcggtgaacccacggagagatcggtgggggcagacattgggccggggtgttattaagaatacaggcgaggtgtatattataataaaagagggggagatggttgagagatgaaggagagagcatcagaacagggagagagaagaataaagtcaaaaagggacgaggggaagaagaagagaaatgagaaaaaaagacagaataagacagtaaagagatgaagagtaaaacatatgtan

SEQ ID NO: 529759 - DNA, 190 bp, Homo sapiens
  misc_feature (43)..(43): n is a, c, g, or t
  misc_feature (73)..(73): n is a, c, g, or t
  misc_feature (114)..(114): n is a, c, g, or t
ctctctaaggctggagaagggagaccaggatggtacttgaacntcccagggatgctgtcccatcccttccttnctcactcctactctttgaccctgatggccaaagcagagacnaggcctaaaggtaaaaacgttctctctgtattctctggcttttactccctaagttgtctctcgctataagtccttt

SEQ ID NO: 529760 - DNA, 1230 bp, Homo sapiens
  misc_feature (232)..(232): n is a, c, g, or t
gatcgacctactccttcggagctcttcgaggaccccatgcctgacgctgaccttgaggcgagtacggcagaaccgtcgtgcctcttctcagttcgccggagacctcgccagtcgtgaggatcaaaccacgctagtctgatgccatctgacataggtatcgacacgtgaccgggcatgaggagtacctgcgtagaccgccgtcgaagagttgcctctgtgtgtagccttgagnatgagtacgctatcttgagtcatttcatgggcacttttcgtagttgcgaaggtgggtgggctgagcgtttcctagtgcaggcgtgtagcggcttgttggcggcaagctggtcacttttcgagaccgattgctcgagggagtgaggcggctacccggattcagctacgaaacggcccgtttgtcccaaagccaagccaagcgctgataccgagtctcatctcacgcctcagtcttgacccgcttgggacccggtacgatggggaccttacgtgcgtttactaggttctgcaacagacgttggacgtagatgctcggagggggcaccttgcggcgggacgcattcgcaatttcgatgggggtcgttcccataagcgtgttcggcaacccaaaggacccccccgtgcaaaacgcggtaccgcgtgaaccaggtgtccatttggcgcgccacaggggaaccccaagtcttttataagaccgtaaggagtgggctcgtggtgaacaggtggggaaattgtcggaaaacctattttggcgcacgcctttcgagaatcactttggccattccgtttccggttcccaatttgtgggccatttgatcgattgtggcggctccgaaagagacaacatcatgttttcaacctatccgacgaagtttccccttgttgtggatcacagagggctccgaaccggcgcgaaaacggcaaacgagaggggcgccccaggtttggccgcacaggttgccctccacactgggcacaatctttaggatttgggcccacagaggcttatcgttggggtcaggcacctgcttcggggcaacgggagttcccccagatcctgctgctttgtgggccccaacgtttgattccctttgggtggccgtgtttcctttcgctttgccgtgtccgtttgctcgtttggcgtgcggaggctgggaaacccgatttcctaaatttcatctacccccgtttttccccatttccaagtatcccgcgccg

SEQ ID NO: 529761 - DNA, 196 bp, Homo sapiens
ttgcgtgcggatgcgctggtcacgctgtaatcccaccactttgggaggccgaggcgggcagatcacgaggtcaggagttcgaaaccagcctgaccaatatggtgaaaccctgtctctactaaaaatacaaaaattagctgggcatggtggtgtaataccaacatactcaggaagctgaggcagtagaattgcttga

SEQ ID NO: 529762 - DNA, 894 bp, Homo sapiens
tcatcggtgtgttggctcttgccgcattaacactgtcgagtgcgagagaaggcacgctgacgtcataatacagtgtgtgttgtacagtgataccaggataaaatcacgcgcgtggatcccggcaggagcgtgaatctactactcggatacttactaaaattcgacgcgctgagacataggcacgacagaccgacaacaattcgccttgagataatagggtagtggtggcggtagctctgagtataggagagcggcggaatacgcaatacagagatctgccctaggtgacaatggacactacgattctgaacatgccttgacgccagatgacattgtggaggaaattcaacctaatctggacgtacatacataccgtcctgttgctagccgatttgaaagaggtacctacaggaacgtagcgtgaatctggatctccatggattgaggagattccacagaggacgaaacttcagattcgaacaattagcaaacaacggtcccttaatcttcgaccggagagttggtcaatcggtccacgaagctttagcaattcgcaggtcctaggccaacttggatggcgcaaggcgacaggtctggagcggtggttgggacaatgtaccactcacgaataggcactagagttgccttttacacgcggaatcgagaaccttgaagtgccatgtgaaccacttcaccagaaatgtgggagctggtagccccacgggtaatccaagagccagagtaaccagaagccatcgtgggcgggcgtgggtgtgacacagccaactgcgtcacgagagttgatatcaggccgctgagccacagggacgaccactcgcacagatggccttaatccggcgctagacaccccccacggcccttctatcatggggc

SEQ ID NO: 529763 - DNA, 118 bp, Homo sapiens
aggatcccccgtacaatacccgcaagcatgcccatggtcagaggggcgcctggcgctgtagcagtgatcctcccgcactatcactgtgcgtcactgccaggacctgcgtagtggctgg

SEQ ID NO: 529764 - DNA, 144 bp, Homo sapiens
gcggtccgcattgctcaacgtcagggaagtaccccggcgaagtacaaccttaagcccaatctttgcaattcgatcccgccaagggtggaaacactgggaattggcggacgcctttgacgccacacttgccttctttaggatttg

SEQ ID NO: 529765 - DNA, 1301 bp, Homo sapiens
  misc_feature (588)..(588): n is a, c, g, or t
ttttgtggtttatttagttttaatttccatattcctataaatcttaatctctctgacaacccactctaggcttgggagggaacaaggaaaacttgtgaacacccaagagggaacctgtgcagcgaaaacccacaaagaattctctatagcgaatatacgtgcgaaccaaatgtggggtgtggaggggtgtgcctctctccttaagcttacagaaaggaattgactcgtgggtggttataaaaataaacacacagagtctcacaacttttattcgaagttttgtctcccacgagttcgagcagagtggtgtgaatcttttgtgtggcgtggtctcttgtgccatctccgtggacacccaaagaggcgcctccaagtgggcctctcccaaaatattctctcatgtgcgctatctcttatcatcacctgtgtgtgcacaaaaaacacccccaacagtgtgtctgtgtgcgccaatctcacacaaccaacctctcaggtctctgtgtgacgcacggtgtcgcgaaaattgtaaaaaacaccgtgtggggagacacccccactctgtgtgtcgtgtgtgtgggtgtcccccangcttattttttgcgcgcctagtgtgcggcaaccaatatatttcgcccagaggagaccccccctgtatattgcgctctatagagcgattcgagacaatgtgctcctccactatttctttcccaaatattttttccctcccccccctatataaagattgtcgggctctttttggcgcccccgctggtgttgcgcgccattatatgtaggagcgtgttgtgttgtaagagtctctcacacacgccctgtgataacaactattttataaaccgccgcgtgggggaaatataacatctctccgtggtgtggacaacacgcgcgagagaaaccccccttttttatttttacccgcaaaaattttctcctttttatcttcccctccccaaggggtggctcctacaaagaaaagccgaggggaaaaacaattttttccgtcgtgcgagttgacctcttctggttggggacaccccctttgtcgttcttgctgccaaaaacgacagcctcttcaaagaggagaaagaaactgcgcgcggccccacaaggggggctcttccccccgagtctcgacgggggccaaattgtttctccgaaaacaaccacccggggtgggtggtgcgcgttgtctccccccccatggcggactacaataatttgtcaccccagggcgagcacaatggtttcctaacaaaaatgcaggggaacgaggagcgccctca

SEQ ID NO: 529766 - DNA, 488 bp, Homo sapiens
tggtatgcacaagagtgaacgtcgtctcacaaaaaagtccgggcgtgatggctcacaccggtaatcccagcacttggggaggccagacggggggatcacgaggtcaggagttcaagaccagccgggcctagatggtgaaacccggtctctactaaaaatacaaatattagctgggcatgggggcatgcacctgtaatctcaactactcagaggtctggatgcaggagaatggcggaaacccaggagggagaggttacatggagccgagattggcaccacggcactctagccggggcgacagagcaagactccatctcgaaagaaagaaagagaagggaaattccccagggaagtacctgggctgatttcataaacaggtaccgaaggaagcagaggcttgtggaggacttccccagctcatgcagctattggggccggggcgtctgaaattcataatttcagagtcacccctttgatgaccttagcag

SEQ ID NO: 529767 - DNA, 1112 bp, Homo sapiens
  misc_feature (1112)..(1112): n is a, c, g, or t
gagcgggctggtggctgcgtggcagctctgcgtcctgaagctgctccgacgccgtcgctggtgaccaagatggacctccctggctgctgctcccctgtcccctgactgctgctgctggagtggcaacatggctggctgtgcccctgtgccctgctcctgcctgatgccccagctgcctgctctgtgctgcgatgcccctgctgctgcctgctgccgtgcttacattggtgctggtggccctgaagattgtgcggtggcccgtgggctgcgtgccctggtggagtgcctccgggctcacagcccgcctgccctgcctgatgtgactgacagctgacgggcgactcttttcttgtgttgctttgcttgggagaggttgccctgcactgtgcgggctgcttgcctgcctgatggcttgtctggatcagcagggaaggtgcactggagcccgttgtgcttcaccctgattgtttcaaatcccgttgggcatgaagccctggacaccctgaatgccctggtggccccacacttctttgaactcagagcccatgacctggaagccccatggtgaccacttagggcagtttagaacaacccctagtgagcatgtggtactgccacaggtataaacccaattccaaggcacgcgcaccaaaggagaccactgtggctttgggtttggcagcttccttcatagaaccctggcggggacgattccttacagacaggcactggacaatagggagacccaggaaccagaggagcaaccagcaaaagaccagcccgggtgccagaccaggacacatgcaatcaccaccgcgacggaagacaggcaccccaagatggccacatcacagggacccccccaaagcaaagcgcccccaagggcctaacccaggcgaatagccaccaagaaggcccaggccaagatatggaacgcgggcatacgagacccttaaaccgaaccacaaacgaaaacggccagccaagagctatacaacagagggatgccagacccacagcgaaccaaaccgagccacagccggcccggagcagtaggacacagaggcaacacgacacgaaggccaacatctcgacatcctaagccccccacn

SEQ ID NO: 529768 - DNA, 368 bp, Homo sapiens
  misc_feature (274)..(274): n is a, c, g, or t
  misc_feature (279)..(279): n is a, c, g, or t
  misc_feature (315)..(315): n is a, c, g, or t
agagaaatttgaaccctcatacactgcttatgaggataaattatatctcagtaagatggagctgctttggaaagcaatctggcagttcctcaaaaagttaaatatagagttaccatatgacccaacagttccacttctaggtacatacccaagacagagaataacatacatccacacaaaaacttgttaatgaatgttcataggcagcattacttataatagccaaaaagtgggaaataatccaaatattccatgcaatttgtggaatggaatnacatnaaaatgtgtttacatagtgggaaaattttttttccnatggaaaaggaaggtggaactagttacaagctaccaaccttggacctttaaaa

SEQ ID NO: 529769 - DNA, 140 bp, Homo sapiens
  misc_feature (7)..(7): n is a, c, g, or t
agctgcntccccttttaagtcaggcaagtcaagctaaaaatctcggaggtgctggcagcctggtggtgctgtaaaacatgagagccagattcctagatgctgaggcagatgcaggtagagtccccaagaaatactagaag

SEQ ID NO: 529770 - DNA, 803 bp, Homo sapiens
ttctggcgaaggagagaccctgcacactcagaggccccaagaagcacttaaagcgtgcagagaggtcgaagcctagcctgcttcgcaaaataacggccggatctggacctaccccatgcacaggtccatacaacctgagggaatgactctctatgatgcgctttctcaggattaagctcaagtgtgcggcgactggagatgacgactggaacatattgatgcaaggctacatcaaaatcgatggcgacgctagagtgaatgtcacataccctgttctatccatgtgtgtcatgaggatggagaatacaggggatcattaccccctgacctatcacacccaagaccagctctagaaggcacacaatcacaaccctggaggtccagtacaagttgggctaaggcagggagactactgggggagtgaaggaaattccacacccgtggacttatgacgctcgaaccatccaatacccataaccggaccttgagcgcgaaccataggggcacacattggtttaccgatctggccatactatccactgttatgcaaattggatgcagaccatttacatgtttgcgaaagcggaggaaccaacctttattcggagaaacctgttatcactcacaaggtaaagacttcgctggtcttttgaatggaggtccttgtaaaagaatgcccgtgcggaccaggtccaccctaaggtttacaaaaaatatggtattggagggggcgaaatacgtggaatttgcgcaatggggaaaaggggtgcccttatcgtttcttagaaggattagcggccccc

SEQ ID NO: 529771 - DNA, 515 bp, Homo sapiens
gggggaataaaattttcctgcctatggaaagggggattcagtattattttaggaaagccttggccgacacctggaaagcatcttttttggaaatttctgctaaagaaaaataaactggtggggatgcctttcgaaggattactttggaggcagaaaaaatggacggggccgcttacaagggcaaggctttatgcttggtgatgcgattctgctggaaaacctgaagaccctgcgaatatattctacgctggagaagcaaactgcccgtctccttgataaaaaactatgctccctttttcttctgctaccccggaagatatcattttgggcagagctccccctcctttaaaatatggtaactttgagtctgggcaaaagaaggtcactttccattttaaaattttaagccactcttattttcaactcatacattgcctttctctaatttattgaccaagaatactatcggcgttaaacattccactgtaactggtgcttaaaataatgcgaacatc

SEQ ID NO: 529772 - DNA, 807 bp, Homo sapiens
  misc_feature (305)..(305): n is a, c, g, or t
tggatctatccattaatttaactttctaaggaatggataaaaatataaaggtacatatccctaaaaaggggctatcctacatatgacagcccaaaattatactacctccatagggttcccgggatattctcaagccacacattttaaaaccaattacagaagaaggcacatcacattttagtgagttatagttgcaaataagggcgacactacaatacacacactcatatttctttataagttatagctcgagtttataacaaactctctcccctttcacaaacaattctcaaaactagtgtctnccaagctctccacaccatttataagagaagaggcacagtgtcacagatgtgggtggggttgtgtggcccatatattctctttattttatccacctttataaaggagggctcacacacagtgacaacacagagtggaggaaagtgtaaggctctatgtgggtaacacacgacaattaaatatcaccctgtggtgcagtgtgtttgagaatctcattgtgggcgcccttattaaagacaatatgtggggcttacaacacccagagagtataaaacacccgccgagcccgatataaacgtgagtatgagggtaataacacacgtgcccaagaggtataatacaccgcccccaagagggggcgtggcgaaaccaataaacaataagaagactccggaggcctaatagggggcgcgtgacaaagaacaaagaggggacccacacccagcgagtggcgacggggcgtaacaaaaacaagtggtgttccccactcaaaagataagccca

SEQ ID NO: 529773 - DNA, 153 bp, Homo sapiens
tcaccacagatccctaactacctaccccctgaaggcaggtacaatgacatcaccaaggtgtacacacaagtggagtttaagagatagacctgccggctgctatccttcacctgctgcccttgagagtaggaatcaacagggctcaagtctgct

SEQ ID NO: 529774 - DNA, 166 bp, Homo sapiens
ctacaggatctgctatacacccctcccaaagtgtaacggaggatcgaaggtacgctgtgtacggtcggacatcgtgctaatagtgcaatggcattagcgtgcttaactgcgagactgacaagacgagcaggtacgaaagtaggacatagtgatccggtggtatcag

SEQ ID NO: 529775 - DNA, 230 bp, Homo sapiens
ctctgaaaggaatttgtttatttcatgcaagtctagccatgataggtgtttagagaaaagttcttcgtcatcttctcagccttaacacagttccatgttgggctctacttcagcttctctcctcactctattaaagagaaccccccctctgtgtactcatataagagcacatatgatgagaaatatattttcgcgtatgagaagagaaaagtgtgggattcacaccccat

SEQ ID NO: 529776 - DNA, 1316 bp, Homo sapiens
gaaactgagtgagccctggagctgccgctgtgtggatcgtgggacctggtgggcacccgtggggagccgctgcccggagctgaccgccctttgtacagtgccagcctcccattcccggtcctggggaggaaacgagagagggggatgtgaacagctgtggaacgtcggagctctcgggagccggagcgggcacaggcgaggccggagcatgaacgagaaggagatgtgaaaggcaagagcagaaagagggagcgacacgagagacaacacaacggtagaaaagcagcgcaaaaaaacagaaagacaagcgcgagactgagaagagaacgagagaaaaaacgagcagacactagtgcacaaggacgcccaccaagacacggagacaaaaatcacgcgacacgaggagaagcagagaaaagagaagagcgagaaaagaaggagacagaaggcgcaaagacacaggcaacagaggaaggaacaaagaaagagcagaaggaaagacgaaagcccagagcagagaagagaagagcggcaaaccacagagaaagaacaagcagaaaagagaaagagcgagccaggacagcgaacagaacaagaagaagagggcgagacgcacaagcaacaaaggaaaaagaagaacgaaacagcaggacaggcccacgagaaagaaaggggcgcgaagagaggagaagagagagagagagacgcaacaggacagcaaagcacagaaacaacaacggagcgaaaagaagaaaagcaacacaagaagaacacagaagagacaagaaaaaagcagagacggcagaaggcgaaagcaaaacacaaaaaaaaggacaaaacagagacaagcagaacgaaaacgggacaagtggcagagcaagacgcggcagaggcacggcgagagagaaaaaagaagaaaagcagaaacaaaaagaagaaacggaaataagaccggaagccaggaagaagaaagaacgcgaaagcagagagcgaaaaaaagagagaaaagaggacaaaccgagggccaaacagagagaaaaagaagacaaaacgcgaagcaaagggacaaaaacggaacaaacagcaagaggacgggaacgaaaacagcgagacggccacaaacggcgcagggaaaaggagaagaggcaccacagcgaccaaagaagacaaggaggggggagcaggcggcgcaccgcgaagaacacggcgagagaaaggcggacaggaggggaaaaaacgaaaagagagacaagaaagcagcgaccgacaacagggacacggagacgcgccaggagagaacgccgcagcggcgagag

SEQ ID NO: 529777 - DNA, 1142 bp, Homo sapiens
  misc_feature (124)..(124): n is a, c, g, or t
  misc_feature (134)..(134): n is a, c, g, or t
  misc_feature (1141)..(1141): n is a, c, g, or t
ggtttcttcagcgtcttctggcatgtgtgtggacccgtctgttcctctgcattcttggaggacctggagcggactgacggctcggccgagaggccttacttcatgtcttccaccctcaagaaantcttgaacangaccaacaaggaaggcagcggaggtccgtgacagggccgccagtgctctcccacgcgtctcaacggaggtcgtccagtgctcgcatggggttgcgtccatgtacgctcgggctcgttgttcgcgcgcctagacctccgttgaggctcacctgaagtcctatcacgtgccgctctgcacccgtccccatgtagccagatcccaacagtttctggacgtggagagatctggggcatctccttcttatgccaaggggcgctgtggagtgttcatggctgcccatccagactgcgagaaacaagtaaaaacccattggggcctcttgatgtctgggatggcagcgtgagccgacctccacaagctccctcatgcttcctgtcccccgcttacacgaaaacgggccagagcacaggaaggacggtgtaagtgtctgagggagctgctggccacagtgaacaccacacagtatattcctgcctgctccggacaggactgaaccccttctccacacctgaacagttggctcaagggccaacagaagcatttctttattattattattttataaactggacatgcattaagggtctatgagcttactatccgtctgtctcaacgagtgagatggggccgcaaaggagtgccttcctttatggtccatcatactgggattgaagcgtgagaattgagtgtggccaggagggggaagaaacatggatgggaaggaaggaaaggagcgaaaaatgagagatagacaaagaaacagttgaaagagatggcaaagacggacgggcacatggggaacaagaaaaaggcaggaacacccaacacggaagaaaagaaaaggaacatgaaacaagaacaaaaccaaagaaaaaagagaacaggaggcacaacagaacaggcacacacaacaaaaaaagaaaaaacaggagagacagcacacaaaaccacaaacaacacaagaaaacaaacaaaaaaacaagacaacacaaaacaacaacctagng

SEQ ID NO: 529778 - DNA, 102 bp, Homo sapiens
acggatagcggatctgcgcatgagcgtggaggccgacatcaacggcctgcgcagggtgctggatgagctgaccctggccaggaccgctgctggaaatgctga

SEQ ID NO: 529779 - DNA, 462 bp, Homo sapiens
gtgattagaggacgcttagaatcgacggtttctcctgttacatagatgatttggtatttcagtgatggttatggtttttgactcacctgtgtgtcagtcctgctagagagacagtatagaatcaagaatttcttgatgtctttttaaaaatagagattataatggccttgctagttgtcctgtgaagtgaacttacatggctggatcatcgaatgtgacagacccttaattagaaatcttttaatcctgctttccattttacttctccaccatttatttttaacattcattctctgaaaatagttatgattttcagtgtaatcggctatgtttaagaaattccatttcaaagtcttaatatgtaacaatcttcatttcttataaacttgaaggacatttttgaggcaaacttacttttatagctcattttctccctagttaaggagaattctctggttccat

SEQ ID NO: 529780 - DNA, 275 bp, Homo sapiens
tcgcggctaacgctttactctctgtgggcttaagtatgtgctgctgcacatgtggaacaattcccaggagctggctacccgtcgcgtatgctgggttcaggctggcctcagccatgcccacccctgtactgaccacattacggcgaactgtaccggtggtgtagttgccccacggctccctctcacgcccttgcggacacgactttgttcccacgtacgaccacgacgaccacgggtttgccacgcagggacgacctttggcgacggggactcct

SEQ ID NO: 529781 - DNA, 1485 bp, Homo sapiens
  misc_feature (1211)..(1211): n is a, c, g, or t
ttctaaattatatcgtcccgccccccaaaaaagagattgtgtttaatagtgtgtaaattgagaggcccctgtagtgtttcaaaagttcccccccagacagccgacgcgtgtgtttcgttaaaaatgctgttatggttttaaagaagaaatttttggggaaacgaccacacaagagtggatgaaaggtggaattttctgtaaggcgccccaccccacattttggtgaaattttgtgggtgtttaatttgataataggcccactagaggggaaaatttggtggtgtcccgacaccccagccctcacgctgataggggagaatatattttaatattgatagaagagtatatattgcctcttctgtaacatgggggcagaaagttggtctcaatgataatgttttggccgcttcaacgggcgtaggataaagaagaggccctgcaatcgtgttctccgacgtgttatattcgtcgccgccttcttcgtggtggaagaaaggttcccaacggcgacaaaacgggtttttacaatcataactaaggcgggggcttaatgagaattttattggaagcagggctgaataatgtcgtcgcaaaaggtgtaatattatagattgcccccccagcggtgtgtctttgttggagagcaccctcttattattgtgattaacaacaacacataaaattggggtggtgtataaaggatagggcagcacccatcgtagtataataacactactggtggagagtgttatataatagagattatctccgcccacggagatatggagtacagcacaccgtgtaggtgtttatatctcttctttggggtatacgaaaggaagactataatttggagcgtggaattatctctgtgaaactctgtgtgtttgacactctttgtgtgtatattgccactctctctcttggtggtgttgtttgagtagtgtatatgtctcgaaaatatgcgcgtgaattgagattttataaggagcacgcgcttttttgtaaaaaaaagagaaaaggtgtcttgtggagaatgagacgccccacagttgagattgagattgggagagaacacacatcatactcgagaatggagaagagaaatatattttatagagattataaaaaatgagagagtatagagtttgagaggtgtgtctctgtctctctctgagataatgagatatagagatatataatgggtgaanagagtataaggcgcttatattgttgagaggagatctcacggtgagggtgataataataatcgccacagtatcttaccacactgtgttctggcacacactgagtgaattaaattaaaagaaattcgaggcaccccctaattaccctcagagaagccacgggttgttaactgttttctggttgaactctttgttgttgctcggggccttctgccctgttttagtgtccctttaatcaaataatagtaaccataaaggttacccctttattaagtga

SEQ ID NO: 529782 - DNA, 143 bp, Homo sapiens
gatgaatgtcatctcctggcaagacgctcaggtagttcttttggtttaaatggcagatattgaaaactggaattttttgtttatgagtctcgatctgtcacccagactggagtgaagaggaggaatctcggttcactgcaacc

SEQ ID NO: 529783 - DNA, 270 bp, Homo sapiens
  misc_feature (130)..(130): n is a, c, g, or t
  misc_feature (149)..(149): n is a, c, g, or t
  misc_feature (262)..(262): n is a, c, g, or t
aaagcgtagtatctggaccggagtgcacccccactcacggcatggtccctcatggcttcccttggctatgggagggagttccccaaccccttgcacttcccaggtgaggcaatgccccaccctgcttctncttgccctccgtgggctgnacccactgtctaaccagtcccagtgagatgaaccgagtacctcagttggaaatgcagaaatcacccactttctgtgttggtcttgctgggagctgcagacagctgttcctatngcgcatct

SEQ ID NO: 529784 - DNA, 272 bp, Homo sapiens
ccctgctgtgaggaggaaagctggcaggaaggtcacgagtagaccattgacgaacgctcccgcgaccgcccgcgtcgtccgccagttgcatttccgtagaccccggcaacccttcccactactccttggtgctgaagaatggcaccgaggctctcctggtccacgaaccgctgttctcctctgctgacggcagccgcgccttccacgtcgatcacccggacctcttcgggtgtccatctatgatcccctcatcatctggctgaagccggaca

SEQ ID NO: 529785 - DNA, 866 bp, Homo sapiens
  misc_feature (627)..(627): n is a, c, g, or t
  misc_feature (706)..(706): n is a, c, g, or t
  misc_feature (713)..(713): n is a, c, g, or t
gagggcacattcatggcgcggacgcgggcacgcttccccttttattttgcacaacggctctactgacaagcacacctgtgtgtgcgtctattaccctatcgtggaagcggcatccttcaagtacacgcaactattgatacagaggcccaaagccgagaggggatgccacgaagtctcttatcctgcggctctcggatagtgaggagcagggtcggcagatatcacctgtgggcactcaattattcgaagcttggatcactacactcgttgacaaattggggactcgggtatacaagttcctgcacaacacgattatatggaaagaaatgcccccatgtctagaagacacccaagggacgcgttgcatcttaccggtcaattatccgcgaaagcaatcgaacctgtcaagaacacaaattaatagtatcgcgaaggcagtcgcaccaccatagcttatgccgggtgctctctcccactgacaacaactaagctccccacaggtacaaaagggaatttcccctattcctacgcgttctcatgttgcggccactgagccctatgaatgcttatttcacgggggaaaagaatgtcacagttggatcactaatttttatgagcaacactctnctccttgttggcttccgctctcgagcccaaaggcggagtcctagaacttccgcgccaaggtttattgcaatcgcgtcanacctatntattacagcatctacttggagcccaatttcggtccctatgagcggggccgtcattaaccatttgcagacggaccggtctgtttataacaaaggtttcgcgcaactggataaatacctctctggggtgtcgctccacattaagattagccgtcg

SEQ ID NO: 529786 - DNA, 907 bp, Homo sapiens
  misc_feature (737)..(737): n is a, c, g, or t
gggtctggggtgtgagaggttcgctcgctctacggagattcttcaagcgatcactagtgtcaactagacacaggatgtctcccgttccattcatactcgaggacagatcgaaggagagtcaggaacttcacttcgaaacacatgcatacaagagcgcaggcacttcgatacccgttgtgtccctagtcgggtgtatgcaggcagatggtggccctatggattatatcatatctgaagatgcaaggggaaatactaacaatgtccatttcattcatgaatccatcattgcgtgtgtggcatgcccaaaggcttcgattgtctgagcaagtgaactagcttggttatgagcgctagtgtccatgtactcgggaacttctggtgcatgagatccttaacgcctctaggaaggaaacgaagagttgcctgtcttgcgtcctcgctcggagcgagctatgctctgtagttaagactgctcgttacttacttacagctttaaccgtattactggatctgcgaataactacacactaaaatattagctagtgcggactactactgaccgtgctaaccactgtgcaatgtctccgcagtacttgggcttgcccttttggcttgaacaggcctttgaattttgactttgtgtgcaccggaattttacttgaggtgcacctaagttttagcgtaaaactgaaggtccactttcgagagggcataggtcaaggttacactttaaacancagttgttcaacctacacattgttcccttggcatgtgtggttgcaaaatggttccaacctttcttggaaattctcctaaagaatgaacagcttaagtctcgttaccgaaacgataaacgaggccgacttcctgaagcggtagtccccggtttgcctgcagacatgtccca

SEQ ID NO: 529787 - DNA, 386 bp, Homo sapiens
atgagctatttgaaatctgaaatcctggctaaagtattcaaagggagtattttataggggctcccaggattccaagtcattgaagaaagaattacttatttatttttttaaaaaggattctcactctgtcactcacgctgcactgcaagggtacgtgctcagttcactgcaacctccacctccctggtacaagtgattcttccgcctcagcctcctgagtagctggaataacaggcacccgccattacgcccggataattttggtagtttaagtacagatgggatttcatcatgttggccaggctagtcttgaactcctgacctcaggtgatccatccacctcagcctcccagagtgctgagataacaggcatgagccacttttcc

SEQ ID NO: 529788 - DNA, 120 bp, Homo sapiens
gcaatcattggatgaaaccctactaggaatacaaagttagccaggcatggtggtgcatgcctgttgatcccacgctactcagcgagccttggcaacaagtagcaacaactccagtctcaa

SEQ ID NO: 529789 - DNA, 311 bp, Homo sapiens
ctctcttgagaaccttgggaacaaatacattatgaattttaaccagccataaatggagtgctttcacccagggcttttccttgtaatttcaatcaggtttaattttgaccgtaggcttttgtctaggttggttagatcaccatctctgttataacctccaaattattaaaaagctcttctgaaagattttatggaaggttacggcatgaaatggcctatttctctgtgggaaggcagggctcagaaaaatgtgacaaacgtcacagtgggaactgtgccttgtgtcaaaccacaagtggtgcctccatacg

SEQ ID NO: 529790 - DNA, 1010 bp, Homo sapiens
gctcggagcggagactggcaaatgtgcggacttcgacacctacgactgatcgggcctacagcagcttcgagcggcggcagagggtcccgcggcatgatgctggtggacatggttcccgtagccagaaggagtttgcccacaagagcccccctacacagcgatacgtaggaccatctacctttcacagtactggttcagggcgcacgatcagcatgctcatctttcaagtgatctcagcgataagtgcagtgtcacggctcagtcagagacacacagacaccagataaatttcaaaggacttcgtgctagtgatagacattcgactgaacgtggacttcccgttacaggacagccttgaccatacgactggatgcacgtgttgggacgactcggttcactatcagtgttggaccattgcagacaggcagacaaaccaagactcaaaggatgagacttctggactcgcacgacacacacggtcggacccacagagtgaccagaccggcttcacgcggactcgaccgtacctctaccaggagagacacgcgagagaacggaacgcccgccaccagagacagacacaggacaaaccaaggagcccacccaccgatgcgggcaagaccagactgtcgagggaagcactggcgcgcagaccgagcagaccggagggatcacgcacgcatgggcaagagcgcaaggagcacacccacaacgagcacaagcaaggcaacagcagacagacgagaagcacccacagacgtacaagccgacagagccagcacgaaaaaggggggacagacagacaaggccaccacgatcaacaaagcaaaacggcacagcccaacactacgccaaagaacgcgcgtggactcacaacgactacagagcggcagcatggcacacagggaccgcgcaaggaaggaagcggacaaggacacagagggaagaaagagagacggggcacaggacaccgccacacagcaacacacaaggacagaagacggcgagca

SEQ ID NO: 529791 - DNA, 251 bp, Homo sapiens
  misc_feature (139)..(140): n is a, c, g, or t
cggcttatcaggaaagtacactccgagcggtcaggctaggtgctgtgcagcgagtcctcttcgtctctaaccacgcattaagcggaggtgtcccagtgctgccccaacactccagtgccctgccccctcccactcttgnnagaggaggccgcctcctcgtgggctccagtgctggcttgccctgcgcacatctgcatctggggtgatcctactagatgtcgacgctgcatggccatgcaatgcttgtgcac

SEQ ID NO: 529792 - DNA, 792 bp, Homo sapiens
  misc_feature (5)..(5): n is a, c, g, or t
  misc_feature (25)..(25): n is a, c, g, or t
  misc_feature (586)..(586): n is a, c, g, or t
  misc_feature (757)..(757): n is a, c, g, or t
cctgnttgtaatcagcgcgccctgngtgggacaacggattcggccttatggccgggaattaatgtgctcgcacggggtgcatcagtattatgatacctctgtactttcctttcgctattcatcaatttcccatttttttttcagcttaagtaaccacacaattttaggcctcaattttttttttttttctgtgaaggaacttgaagtgatgcatgtgtgatcttttgataccgaagggttaaagggacctggacgtgaaggaaaaagtaagatgagaaataaagaaagcctttgtaaggtggttttaaaagccttatatgcaaaccttttaatctgtgtttctgcaagtgccatccttgtacagtgttaagagggtaacatgggttacctttgcaccagcttcagtgtaagctcaccctgttttttgaagcacccatgtcagtattaagaagaataggcaggagttccttaagttacataatgttcgtgcaataattttcctggacttttttggtacattaaattttgaccaggattaccacccaaactggttttttggaaccaaaaaaaatctttttttggcatnacaattaaatttttaaggggcagaataccatctcatattcaatggggggctcaatttttataatttccttaatgttcatttaatttcaatacctgggaggggacaggttttaaaaggtttctcaaatatatagaacctaatcttaagaaaaaaagggaacattgaccgttnatcatttggggcaaaattttacgtaaagagaccat

SEQ ID NO: 529793 - DNA, 265 bp, Homo sapiens
  misc_feature (181)..(181): n is a, c, g, or t
  misc_feature (203)..(203): n is a, c, g, or t
aagacatcacagctgatatctcctggtgctatccccaaactgccactctaaactcttgaagtaaataaataatctttgctggcaggactctgctgaatctccttaggcactctctaatcagatatcctaggtcctcccaattcttagaccttttatacctgtttttctccttctgttattncatttaggtttctcaattcatncaaaaccggtatccaggccatcaccaatcattccatatgacaaatggttcttcttaaatccc

SEQ ID NO: 529794 - DNA, 214 bp, Homo sapiens
ctggaggctgctgtgagtacctactccggatgataagttagcatgaattgatttgggtgctggcaggatgttctagatatgatttttagagaatcaggtcttccagttccttagcaggatcttgaatgattggatggattagttgagttaggtctagctgggttaggtctaactgggggtaccggacgcttcgaagttcgtaatcagtggtcat

SEQ ID NO: 529795 - DNA, 837 bp, Homo sapiens
agcggggaatcattggccactggggcattagcttaacctccagcccctatccccttcctggaggttgagggtggggcgtgaaagtcccaagtcctctaatcctggactatggtctttctggtgaccagccccatcctgtaatgccacctagatgctgccaaccaccagtcttttatttgtgatcttgtgtttgagctcagagtcttgtgtcctctagcctcctgcagttagctgagactacaggtgttagagtagagaaaacgaattctctcctctgcgatggaacgtggtccttagtaccgcattgtagcacggaaacaccaagctctgtaacccatcgattgttccttcttatccacttccttgtagactggtacggcctgtgcagaactttagccttgcgcaaagaaaagctaagttggaactatggagagcagatcttgcactgcaatgtcgtctatcttgtgatggatgaagttctggctggagttaccactacaccaggaactctttccacacagtctgctgagtgtgattgccaacttcatccctttctctgatcacaacctagagtccacggaacgatgtaccaaatgccagatgggctaagcacaacatatgggctttccacttctcacttatcaacgaccgatcggataacaaactgtatcgtcttcagaactcctcagacgccccttgggtgagaccctccatgtcatgatttcttgttgacatggataactatccaatggggagcaatgccatcgcttgctgtgatttcgttacacatggggtatgacatggggaagatgcccctgaatcgtgaagccgggctat

SEQ ID NO: 529796 - DNA, 270 bp, Homo sapiens
cctcatttggcgaggcagtctccctggccctgccggacccgctgtaccccctggccccattggtaatgttggtggcctgtagccaaagggctcgcgcaccctggccccctggagctactgttccctgagctgctgccgagtcgtcctcctgcccttatgaaaggctgtacccatgccctactggcctgctgcaaagaagcagcaaagtccccgtggcgagactgcctctgctgacgtcctggagaagtgcccccctgccccactgccctg

SEQ ID NO: 529797 - DNA, 766 bp, Homo sapiens
tatcacagaaaatttcaagcaaatacacaaggtaaagagaaaatatagtaaatcaccatataaccatcactcagtttcaataactggcaaaaggtgggttatttggtttcactggtgtctccctttccctttggggggttattttcaacacaaacacaaaaagacacttgagtactttaaagcaaatgggggtcatcaaatcatttcacccaccaaatgtgttctcttcaacagcatattaatctgtaaccgaccaaagagtatttaaccaccatactataccacgttcacacaacatcaatactaattctcttaatatcagctaataactaggccatgtctaaactcttcctgattatttcatggcctcatgtcacaaagcatatgtctgctttgtcagtgaagtttaaccaactaactaagtcgggcgggggcaacggggggctccaccgcctaattaatccccagcgctttgggagggcccaggcaaggccagacatcacgaggtccggcgtccggacgacccatccttggccccacgtgggctgaggccctgtcctctggccaaacacattaccaacaaaatttaagcacgcggcgtagttgggcacaaggcccctttggaatccccagagctacgtcccggggagggttgaacggcagggaaaacccgctgtggagctccagaatctccaagaccagtctgtggcgcacattggtggagaaccctcgtctcttttcgcgaagacccaaacaaaaggcgggc

SEQ ID NO: 529798 - DNA, 928 bp, Homo sapiens
  misc_feature (623)..(623): n is a, c, g, or t
agcggattactccagacagacggctatgtaatccagccagctacactccagctccctggaggcagcagtttgattcaatggtaggagaatgttacctctcctggctctgggagctcttgcgtggatgggttctagccctgctgtcctctggcaccctaagagcccacttgacgaggagaactctgacccaggagataccaagaccgagcgatcccacgtgcgagcctcggacttcagcgctccgtccgaactgtggagctgtcgtcttatcgagcctgctacaatgccagttgagatcgctgaaggctcgcgctgataatgagatgtcgatctatctgccccgacgggaggcatctccatgcgacttgcgcgcattgccctgtctctagggtggcccataagtagcacccgtggacaggagattctcgaaggtcctcaagttcaacacctcgcggagcacttcttgaggcagaaatactccatagctttcgagcaaccttcctgcggacactgcatcgagatcagtctcgagcagatagagtcgtgcgaagtcgtgatgtatgggaagatgccgctgtattgtctgagagcaagtcagtctgctgtaccaggttccacgaganggattgccatgaggccttgtattgggtcctgaggcgctttgccacttgacgtttcagtgactcaggcgtgccgctcatagaatgctcatcaacagactacgtgaagaatgggactagggggaacatcgccgatctgatcgatgaccttgacttcgcctctccatgatcggtctggtggatcccctcttctttaatgcatatgggggctgctttgaacccgagaaattttcaccaggttcttggcacgaccgttgggtgtgggcctatgttgtgctgtactaccggaaaattctgccggggagaaa

SEQ ID NO: 529799 - DNA, 152 bp, Homo sapiens
  misc_feature (92)..(92): n is a, c, g, or t
  misc_feature (129)..(129): n is a, c, g, or t
tgtgcgcggatccttccagagactgagttctcagcccatttgtgcaattctgatcaagccatcctggcaacgcaggggaagggttcacagtngcaacacatatagcaatgcaccccccagtggcactcntggagtttccctgaaagcagaag

SEQ ID NO: 529800 - DNA, 136 bp, Homo sapiens
ctcgatgcaaagtgtcaaaactctaggacattgtgtgtgcgagtgtgagtcagatagtcatgttgtgagacaccaagacacgggtcctgtgatactctgatgatctctgtgagtctgtgtgacgaggactactgga

SEQ ID NO: 529801 - DNA, 345 bp, Homo sapiens
agttacaacagcttagtagagatggggtttcaccatgtttgccaggctggtcttgaactcttgggctcatgtgatccaccttggcctcccagagtgttgggattacaggtgtgagccactatacctggccttattatggttttgattagcatttccttgataattagagatgtcgagtatctttatatgtactttttggctatttgtatatctttggagaaatgactattcaagttctttgtttttgagttgcgttggtttttagttgttgaattgtagtagttaatatattttcaatcccagtctggtactagatacatgatttgcaaatattttctcccattc

SEQ ID NO: 529802 - DNA, 149 bp, Homo sapiens
agcgctcgtactgggaggctagaagcatctccatcgagtttagcaggtagctccatctcagcctggtctgcagagggccctggaggaggaaggctctggtgctcacttcaaaggcctcgagaaggaacttgttccaaggtgggccacgt

SEQ ID NO: 529803 - DNA, 858 bp, Homo sapiens
gattcctgaagctgacagcattcgggccgagatgtctcgctccgtggccttagctgtgctcgcgctaatctctctttctggcctggagagctatccatgctgctactccaaagtatttcaggtttactcagcggtcgagtcgcacgtcgagaggcacatgtgaatacgctcaaaatatcctccgtggaatgcgcgtagtggtagtcatgagagtctctcatgccactcccggagctagtgtgagaagtgtgagcttgatcgtagacacgaatgtgaggagcacgaatgcgacatacacaagtgcgtaggcacttacaagacattgatctatctcatgctaatggactggtctttctatctcttgttactattactgaagttcacccccagtgtaagaaacgatgacgttagtgcctgtccgtgtgaaccattgtgactttgtcatcagccaagatagttaagtgggatcgagacatgtaagcagtcctcatggaggttggaacgatgccgcatgaggattggatgaattccaaattctgcttgcttgctttggttaatattgatatgcgttatacagcttacacttatatgcacaaaatgtagcggtaataataatgttaacatggacggtgatcttcttaataattctacttttgagtgctgtctccatgtcctgatgtatctgagccaggttgctccacaggtagctctaggagggctggcaacttagaggtggggagcagagaatgctcttatccaacatcaaacattcttggtcagatttgaatcttcaatctcttgcatttcaaagctgtaagatagtaaagcgtgcattaagttaatgtcccagtttaacta

SEQ ID NO: 529804 - DNA, 449 bp, Homo sapiens
gagtgtctgtactcaggtatagtgttagcacaggtttttttcttcagtgtggcgggtaaggactcaggtataaaagctaggtagtctcagtaaaaataattgggccaaatagctatttactacccatgagatcaaggagacgccagggtaaaagaggcagcagaaggccgggtgcggtcgtcacgcctgtaatcccagcactttaggaggctgaggcgggcggatcaccagaggttggtagtttgagaccagcctgaccaacatagagaaaacctgtatctactaaaaatacaaaattagccaggcatggtggtgcatgcctgtaatcccagctactttgaaggctgaggcaggagaatcacttgaacccgggaggcagaggttgtggtaagccgagatcggccattgcacttcagcctgggcagcaagagtgaaactccgtcttaaaa

SEQ ID NO: 529805 - DNA, 308 bp, Homo sapiens
ccccccggggggggggggtccccccctttttttagggggaagggggggtttcccccccccgaattgggcaaaaacgggtttttgtggccctttaatgtcggggggggggggggggctccccttatggggttggggggggcccccccccccccgggggggggggggtacccttttacccccctttttgtgggggggggggggggggcattttttccccctggacgggggtttccccgtggggggggggttttgggggggggtgttttgggccccccccctcccccgaaaaaaagaccgggtgggcggga

SEQ ID NO: 529806 - DNA, 867 bp, Homo sapiens
  misc_feature (392)..(392): n is a, c, g, or t
  misc_feature (476)..(476): n is a, c, g, or t
  misc_feature (484)..(484): n is a, c, g, or t
ggactagacagtcgtggtgcagggacggcgtctcggtcagtctgccgaagtgtcgtggccggcactggacagatgaaggagagcagggatatggcagctcgtagttagcagtgcgcggagagttacagtgccatgatagtaccagggccagtgatttcacggtcctggtagcagcacacctgcgtgctccgcactacatcgttgctaaccacgtgagccgcacaacgtgaaggaccggcactcactagcatgcagcggttgcgtcctggtggatgggcgacgacctgagtcttcgaggccagatgggtacctcggctattcactgggacctcgtacgcagcgacacaaaatccacatcggcgtcggtgtgcaggacgaatctgcagtgagantggcatgtcaaagtcgctaaattctcaaacacgcttgactgacgaattgggcgttagtccagcggccccagataaccacatctntctgtaangtagcaaagaggtgacagtaaggggccgacatgaataccctacaggcgcagtatccgaagtgagagcaccttactccttcacacaagacccatggaaagggatacgcgcgccttggtgtgaaacgcacttcgggaacggaatcgggagacggattacagtcgcaacccacggtctttgcccatgggcatgtggtacaccctttgtaaggaggagtgcccccagccgttagttagaatgacccacttcttataaaagcggtcacccgaaaagaagtgaaaaagcacgacataaagagaagtggcaccttttcagggagaacccattgttttctggaaaggaaggcgtattgctaaaaaaattcacaacgggggcggacgccagg

SEQ ID NO: 529807 - DNA, 398 bp, Homo sapiens
  misc_feature (3)..(3): n is a, c, g, or t
  misc_feature (10)..(10): n is a, c, g, or t
  misc_feature (28)..(28): n is a, c, g, or t
  misc_feature (186)..(186): n is a, c, g, or t
  misc_feature (370)..(370): n is a, c, g, or t
ganaataaanaagtttggaaaagtaagnccctcctatattgctttagcatgtgtttccagagatgaaacatgttttaaagatgtgggcattatgtgcatttatttccataatatgatggctttaaactgtcctctttactcttaattagtcccaggcataaaattgcaacctacgaccgggtgtgngtgcacgcctgtaatctcagcactttgggagtctgaagcaggtggatcccttgagctcaggagctcaagaccagcctggccaacatggcaaaaccctgtccctgctaaaaatacaaaaattagccaagcagaaggatcacttgaaccctgaaggttgaggctgcaatgagccgtgattgcgccnactgcactgcagcctgatgacagagtga

SEQ ID NO: 529808 - DNA, 696 bp, Homo sapiens
gaattcgacttgagaaacttacctttgcacatagagctgttagtgtcagcacagatccaagtggatgcaactttgcaatcctgcagtcagatcctaaaacaaggtatacttgtatatattaaatttcattttttagaaggaacaatcactgaattttcttgttttcagtagctgctggtgcaaatttaattgaagagctgttgccaagacctatagagaccttagacataatcatgtttacagattatgtctacagataatccagaggtagaattgttatacttggagtgatgaatgtttcctttggtttataaactgacatttattgaaaatattgaaaatatctatacatgcactcacaaagtttattgtctttcttttttttttttttttttggaaagggagtctggccctatggcccaggctaaggggcaaaatccgcggctcacttttaacctccacctcccgggatgaagcagttctctggcctaaagcctcccaagtagtggggatcacgggtgcccgcaaccaaacccaggtaatcgggagatctcagtagacgagggggtttggccctgtgggccaggcgggtcttgaccacctggacctcgggtgatccacaagcctgggcctcccaaagtgctaggatcagggcatgagccacgacccggctatatgggctcccatacggatgac

SEQ ID NO: 529809 - DNA, 508 bp, Homo sapiens
  misc_feature (31)..(31): n is a, c, g, or t
gctacatcaggcaacctgttcccatttaatncttaattaggtagctccccagttaaaagctccatacttacctcacaatttgctcaagaaggaaattcctagtgaatggtggccagccagaactcaaagttatctctctgaggctcacctgagacaaatgcagatctgtttgtttcctctgccctattgttaattttaaaatgcagattcactgagccaggctaaattgtgtattcagtgggagacttatcaaggactcaaataaatttattattttttctcttatctacttatgacgtggaagccccaacctcaagttttcctgtcttacctgaccacaccaatgtacatcttaaacatgttattgatgtctcttgactttctaaaatgtattagaagactgtaccccaaccaccttgggcacctgtcatcaggacctcctgaggctgtgtcacaggctcctacttaaccttggcagaataaactttccaaatttattgacaaaaaa

SEQ ID NO: 529810 - DNA, 153 bp, Homo sapiens
ttccaaagcagtacccaatctcctttgggatgtgggcaggtagggaagcaggcttggagggttaatttacccacagaatgtgatagtaatagagggagggaggctgctgtgggtttaactcctgggttggctgttgggtactacgctttggca

SEQ ID NO: 529811 - DNA, 362 bp, Homo sapiens
ctattaagtggcagagatggaaacagaactccagtcttctgacttgtagaaaaaggtgtctatgtgattttattttaataaagcaaatttcagtgtaatgcaattaagttgaagatatcatacctgcccatctcctctagctagagtatgaaatttcagattggataaattgtggtcataagaacatttctctacaatgatgtatgtaacatgatgaataaataaaaattaccttagaagaacaactaggaaaacaatccaaatggtcattactaaaatgtccaaattgtccattttgatgagaaacacacagttatgagttatgaaaatggatttgtgaatatgaattgccaagccaggac

SEQ ID NO: 529812 - DNA, 355 bp, Homo sapiens
cgtggaagttatcgttgcttccaaacacaggccctgccacgaggcggtccggggggttccacaagtgcgatgccgtctccatggaggttcttcttccctgtgccgtgcactttgaagtggacgtgcatttcccagtctttgaggaagcacggctgctgtatccagatagagccctctttgctgcgctcgtcaggtagcagacgcacgtactgtctcgtgagcatagtgctgccctggtagtcccagagtggcatagagctggaaccgaccccttggtagggcttaatgagcgaatgctcccgcttgagatgttcactgttgccgtcagttatatccgcagcaaagaccccaaaag

SEQ ID NO: 529813 - DNA, 367 bp, Homo sapiens
tcccaaaagaaaaacttttttttggggaaaggggtgtccatcccctcacccggggagggggatacccccctccgggccaaaccccactttaaatttttcaaaaaacccgttgggggaaattggaaaagcccgggggccccttttaaaaaaggggggtcacccaaaaccaaaaggccctctgtttcccaaaacaaaaaggggcccggggccccctgggcccccgggctttgcccccaatgaaaagggggggcctacaaaacccccccttgggggggcccctaatttgggcccccccccgcaatttggggcccgggggcaaatgggccaacaaattggggaaagggaatttttccccaaaatatttaag

SEQ ID NO: 529814 - DNA, 219 bp, Homo sapiens
gagggagactctgtctgaaaaaaaaaaaaacaaaaaggagatcatgaagctagaagaggagaaagccactttaccacagaggcaggacaagcagaagtgtcccacagtgcaaagcactgctttgcactgtggaagggcaactaactggagataaccgtttacagatactttaaaacaaacctttttgtacaaaatgcttaatttataagcggttaggcc

SEQ ID NO: 529815 - DNA, 100 bp, Homo sapiens
gtgttcacaacgattcttttgcctcagcctccaaaagatgatgggattataggcgcgcgcaccacacccagctaatttttggtatttttagtagagttcg

SEQ ID NO: 529816 - DNA, 477 bp, Homo sapiens
  misc_feature (116)..(116): n is a, c, g, or t
  misc_feature (135)..(135): n is a, c, g, or t
  misc_feature (142)..(142): n is a, c, g, or t
ccatatccaaaggctgccagagagacacgggggacgaccacaacctactaggcgatgcctcgagcatgcggacctgtattgcagcctatgctctctttcttggcgctatgacagangatacatcttttaactgancaccatnctcctgacatggcatgggagagcttgactgcggacaacagtaattatgtaaatccatacatcgtaaaaaaccctgctgttggtgatcaagccatagactgcagaaaaagtaaacaaagaaatcaaagggctctggcactaaaagtttggccctggggagagacaccccagaccggtggaaaaaaggccggagacccacgaattccccaattggccatttggaccaaaccaaggcccggaaaacttggccccaaaaagacctttgaaacagaaccaccatttttttaaaattccctaaggagcggctttggccatacaaaatttgggtcccccccc

SEQ ID NO: 529817 - DNA, 536 bp, Homo sapiens
aatagacaaccttatacaaatcattctgaagtttcacatttcttcaatttaaatttatgacattcaactattttgaagtggtcctgaaaagtactatataagaaacatgttggctgggcgcggtggctcgcacctgtaatcccagcactttgggaggccaaggcgggaggatcacaaggtgaggagatcgagaccatcctggccaacacgatgaaaccctgtctctactaaaaatacaaaaaaaaaattagccgggcgcaggggcaggcacctgtagttccagctactcaggaggctgaggctggagaactgattgggcctggcaggttgaggctgcagagagccaaggtcacaccacttgcattccagcctgagcgacagagcaagactctgtctgtaagaaagaaaaaggagccaaactaacagaccctcaaaagtgacattttgaggctatgcaaaggccatatataggaacccttaaatggcgacagcctccccactgtgtcagcctgacatacaatacccgtcttttccct

SEQ ID NO: 529818 - DNA, 965 bp, Homo sapiens
  misc_feature (13)..(14): n is a, c, g, or t
  misc_feature (269)..(269): n is a, c, g, or t
  misc_feature (274)..(275): n is a, c, g, or t
ttttttttttttnnaaaaaataaattttttttatattattttttttttgattatcatcgccctttagaacgaaggtaggtggatgatagtacttggaactatacgagacaacgggagggaggactcttgaaacaaaaaagaaaaaacacagcaatagggcaaggtattcattattttactttttatttatttttttcctgagagcgtacaggacaattatccgttttatgtatttactccttgctctttatgatttcttcttttctttncaacnncatatatttttggttgttctgtagacgggatctatttttttgaatgtgctgtatttttgtgtatatataatattattatcagagtatataaaattcataacaccagtgcccgcacaatgaacaaagaactctccgagatcattttttattttattattagttcttataaatcctgttatctcttcacttgctcatatttttttaatatataccaccacctcttactactcctactccccgtccttatacaccacccccttaccaccatcttctacaccctgtacttacttcttctgtattttggtgttttttttcttggagaatccgtctaccttgcctctcacacgccccgtttgtccctattgtactgactcttgtccttccattacttcgatattactatgttttctacatttcatatctcagctctatcaccgatctactcatctcttcccatccacctatacttagtctcactatttcaactcactcttagttttttattccttctttgtctcgtgttcgccgcgcgcggctgttcattttcagtgtcttttaccgtttcttggtttccttcttctgtcacactacccgaattttttctcaccccatattttttccgtggccaattgaactacctagttactatcactaattgagaaatatcctatattaattctatattctttc

SEQ ID NO: 529819 - DNA, 182 bp, Homo sapiens
catgctatcctgtccaccagcttagtctttgagaaaagatgggtgaaagagaggactctcccagtcattccggaaaccaatgccccatttaaacattatccttgtcttggtggagaaaacagggaggatgtcctgttccctggttgatcaccttcagttcaaagttgcagccaagtgaagaa

SEQ ID NO: 529820 - DNA, 143 bp, Homo sapiens
cttgttcaaggatggctgtgtgtgtgtgtctatacttacatacatatatatatctattctagtgccccggtccccatcctgttcaggaatggactgtgtatatacatatatatgtgtgctagtgccctagcctccatgctgtt

SEQ ID NO: 529821 - DNA, 745 bp, Homo sapiens
gtgcggttgttctctggagcagcgtgcttttatctccgggccgcttctctcctacctaagtggcgtgccagacacgcacgatggaagattcgatggacatggacatgagccccctgtaggccccggagaactatctgtcctcggcgttgtagaactaaaggccggacgaaaggatcatcgactatatagagggtggatcatggatagaaaatgagcaccagttcatctttatcaacggtctagtattaggggctggtgcgacaaggactggagattgccactatagtcttgaagcaagagtgcaatgaattacggaaggcagctccaattaaagtaacagtggcaagtgttgtaaaatagtgctgtacagccaacagggtttccctttgtggggcttagagaataagcagctatcagtggtctataagggttgaagtgtggttcgagggccagtgcatattagtggagagcacttagtagctgtggaggaagatgcagagtcagaggatgacgaggaggaggatgtgaaaattctttgagtatagttgcgaacagcggtctgcccctggaggtggatagcgaggttcccatagaatgagagtaaggcttgatgtgaggaagatgatgaggatgatgatgagaggttgatgcttgagactggtggtgatgaatgatttcgatgttgcaggaagcgaaataatttcgacgggaagaatttataaagtatattgcacactacatgata

SEQ ID NO: 529822 - DNA, 294 bp, Homo sapiens
ggaaggcccgggaccgcgggatgggtgtcggcgtgaccaggccttagtccctgtctctcctcagtgacatcgtctttaaaccctgcgtggcaatccctgacgcaccgccgtgatgcccagggagacaggcgacctggagtccactacttcttaggtcatccactattggatgatatcgaatgttcattgtggagcagacatgtggctccagcagatgcagcagatccgcatgtcccttcgcgggaaggctgtgtgcttatggcagacacatatgcgcaggcatcaggcactgga

SEQ ID NO: 529823 - DNA, 904 bp, Homo sapiens
gctcgtctcactccatctctcccctctttggccggcattgaatgccaataccatagaagattcgaggaatgacgacgacaactgaggtagagctcacctgtgctcaccagctccgtcagggtggtcagccgacccctttccctgggaaccccacgttctctctgtggctggcttggttgtcggggcgtgagatgccatattgcattacagggcagcaacagaaccagtaccaggaatttacttgaccattccccttatttctcatctagaggaatctcggattcaagccctttcattgctaagacaccttttcactgaggttcttaccagctcagccaagatctccactctgctatagcacgaagcactcaatgttcgctttagcaccacgatttcttgacctatgcctttctcttagaccgtctgatacgattagtcagaacttcagatcatcagatcagtctcaaatgggtttcttggaatttcatatttgagcaaatatttatactatacccaaagtcatttggaagttcttaggttagtggtcaaaaccatccttttaaaggccagtaggtctatagacacatggtccccatccacaccgcgacaggctggggaaattgtcgccacccatccaccccctatggccattgccttccccatgggggccctgctccatcttgcacgctggcaacctctcgggttagcagagacattacgacgaagaaccaagggccaaacttggaaatacagcaacacatgtgcaatttggcgtttcaacaaccgaaggccacggtgtacgccaaacagtgaataggtcattgaccatatgtccagggtgggattctaaattggaacaatagggtcggttgacttccatcctaattagagctatccaggatag

SEQ ID NO: 529824 - DNA, 570 bp, Homo sapiens
agcggagtgttgtagtccggccgtgattggcggtgagccgcggctcatgcgcggtgcacagaggcttgtatcacagtctgtaacaacgaggagagaggcccaggccgtcgctgcatgaggcaattagcgaaggatgagaattcagctccagttcgaaagcctacaaaatctgagactgtcatttgctttcataatggattgccagcgtttcgccgtcctggcgcagaaggctgttcagccatggactcattcgagagaatagatcgggcccagcacaggcagcgtcgagtgcgaaacttccccgcagcccgccttccacccatgtgtgtcgaccctagcccaggagggaccatctctcgagcttctagagcaccgtattaagcagagcttcccacagtgccaaataatcttctacaagcagctgtgaacggaagagccctcggggtctcacatgccatccagatcacctagtctacgtgccaccccatgggccgaagtaacgagacattcacattgcacactcaatggccaaaagcgtgcaggtctagggctatggccccgaaaatgatg

SEQ ID NO: 529825 - DNA, 820 bp, Homo sapiens
  misc_feature (820)..(820): n is a, c, g, or t
caaaggaggggcccgagaccccacccaggccccgggtatcagctgctccccccatccccgctcccgccgctatccggagacagtgactcctcagcctcctccgacaagcggtccccttggtactccgctatgtagattgacccattgtgcgttggcccccggtagggtagcgagtccagctccggcggcttgtatacgcacaggtcaccccggatcttcttccgacgatcgggctctcttgcgcctgctgctgccgaggtcccggatggaccctgggcttggggatccgccgtgcccgggccccccgggggggccccccccaaggggaagggcccccgggggaatcccccaagctttgtcgcgtcccgccaggccctcttgacgcccgagtgtgtgccctgggatgtcccatgaagccgccgaatgagatgtcacgcgctggtgccctgccttgttgccgccaggggagctcgacgatcgggggccacgcagcttcactgcgggtgcccacatgtggggccacccggggtcacggtagggggcagggccttactgcgcggcccacaaggacggcaatagaccgcacagcgaaggaaagcctccccacgcgcgggtttggcaccaccaggagagaagcacccacctttagcagcacgagacaaccacccccgggggaggaggttttctacccccccaagggagggagttcaatttcacccagaggggcgcccccccacaaggggagtccccccacaggaaaagcatttttatgggcggcggacacggagccccacaccaacattaccccagggggtcatcn

SEQ ID NO: 529826 - DNA, 174 bp, Homo sapiens
agatatttttacttaagatatagtctgtgagctattcatttctacactcatttgtataagaatggagctgatttgtataagaatgggagctgatttcagagctgaatactctaataagttggcggatcgagcagaacttgctcagcttgtcatctgctgccagagcacatatct

SEQ ID NO: 529827 - DNA, 476 bp, Homo sapiens
  misc_feature (8)..(8): n is a, c, g, or t
  misc_feature (36)..(36): n is a, c, g, or t
  misc_feature (95)..(95): n is a, c, g, or t
  misc_feature (98)..(98): n is a, c, g, or t
agtgatgntggcccgtgcccgtgctataagtatacngtgtggtaatttgattagtatccctttgaacctaggaaacctttacccttgctgaaatncgntaaaggaaaacactccatatgctaaagttaaatatggtatttagaaatagtcatgtatgcattgagaagtctatatttattttacagaaagctggagattatgactagatatggaatattttttctgaatttttttttatatttcctccgacttacctctttttgaaagagagtttttattaagtgaacctccacgatattggctgaaaagttctacttctattattgtattgtaacacacatgtattgatgattttcattaagagtttcagattaactttgaaaaatattccacatggtaatcttataaattctgtttaattacatctgtaaatattatgtgtgtgatagtattcaataaagtaaaatcaaattgtc

SEQ ID NO: 529828 - DNA, 984 bp, Homo sapiens
agcggacgcgtctccgcgcatgctcctttcttttccagtcccggtaccggaccctgcagccgcagtatatgttgatgcctacgaagaaccggattgccatttactgaacctctcttttcataggagggagtcattggtggccagagacggatgtccaaaatgcctatatgcacccggtagctggtcatgacacaccatagtgtgcgcctgagcttcagtgtcgtgaacggtgcatgctggtctctctagtcccggggctgcgtgatcgatccagtttgcctggtagacttttctatctgtgtaccttagctcatctgcagggtagtccagtagtctgccgtgagttatccttcattctgccctcggcagtattgtgtcctgccaccctatcgccgtgaatcagtccacgcagtacttggctaggcctcgcgcctaaacgcgtctgtgaagggttgatgctgagctgtcgagtagcttcacaagcaggggcacatgcttgacagcagcatgcgcttacaagacggagttgcttgtgccagccttggtgctcgacagagaaaggcctgaggcgtgggggcctgggggtccagccaatgctgatattaccagcctttgagatggcggagttgagagtcggtgggcacgcttgggtcaagacccagccttcccgtgaaacgattgggacgagcgatgtcttttttcgccattgacacttatagctttagcagctccatgataaacctgctaaaatcagtgggcacagagtctccatcgcaggcgtcactggatcctccggcccaataatgtgggcccttgattccccttccccaagggaggggggcccccgggttaaccaaggcttttttgtgttcccctttttagtcgaaggcggtaaaattgccgagcttgggggtaaccattgggccactgggcttggttcacttgtgggtcacctttgtttctcccgggtcacattttccctcg

SEQ ID NO: 529829 - DNA, 606 bp, Homo sapiens
  misc_feature (366)..(366): n is a, c, g, or t
  misc_feature (368)..(368): n is a, c, g, or t
ccagagaagatagcgagatctaaatctctgccaaaaaaaaaaaaaaaaacttaaaatttaagaaacacaaagagcaaagcagaacttataaaattatattattattattattatttaaaaagctctctagttctttcaccccccagcctttccgtgaaccgtgccttctcgtgaggattaaagcaattcatttttgctcccacccttcggccctcgtggttttaaaaatataaacctttttaaaaagggaaacaaaaaaaggttccctctcttgtggcaaatttctctttttttttaggttataagaggggtggaaacattctccttgtggacccaggggtgttggatatttgtgcaggagacccncnctgtgtccccacagagagaggccacagaggcgccccaactagaaaatcatcacaccccaacgcaagcgccacccaccaggcgccgacaccgcaaacaccgacaccaaagcacgccggccacacccacccaacgagagacacaacaccacacaccacccaaggagcaacaacaagaacacgaaacgacacaagaacgcctcatacaaccaacaagcacaacaaacacgacacagagaca

SEQ ID NO: 529830 - DNA, 154 bp, Homo sapiens
atagcaaaatacagaacccgagattatactttaggctaggtgttgtggctcacacctgtaatcccaatgcttttggaggctagggtgggaggatcactcgaagccaggagcttgagaccaaactggacaacatagtgagaccccccacctctac

SEQ ID NO: 529831 - DNA, 131 bp, Homo sapiens
agtcgatctagaggatacccctcccaagtgctgggattacaggcgttagctgccgcgcccagtcctattaaacttctacgaacttcttgcacaagtaagggaatagtttctaattcctgagaaagtattat

SEQ ID NO: 529832 - DNA, 108 bp, Homo sapiens
tgggggggggtttttttccccccccccccaattgcccttaatttaacctggggttagctgcctcccttggtccctgcttggtccggacaaagtcccctgggcccccca

SEQ ID NO: 529833 - DNA, 299 bp, Homo sapiens
catttttccccaggggggtttttttaaaaaagtttaatgttttaaagtttcaaaggaggagggttgctttttaagctataacagtcgactttatttttttactttgaaaaatcttgacttgtttgagggtatataaaatatataaagggacccttaatggattggttttcaaaatttaaaattttttggatttgctcttggaaaattgtttttaacggaaagtattaaaaaattgaggggggaatttttagaaccaaagttttttttaataaaaatccccccatgcttggcccatgcca

SEQ ID NO: 529834 - DNA, 289 bp, Homo sapiens
  misc_feature (44)..(44): n is a, c, g, or t
  misc_feature (261)..(262): n is a, c, g, or t
ccactgcttggcacggtgtgaggcgccagggcattcttcccacnccgcccctcccgaagggcccaaccaggggttgtgcagaggggggaaccatttaactaatatccatagaagagaaagagctgcgccccccctcccccatccccccaaaaaaattattttgccagggtgaggttgtggggggcgcctcctggggtgcacgattccctcagctctgggtttaatgtattatatttatttggggccgacagtgccccaatnnagggtcagaagtggcaaaaaaaaaaaa

SEQ ID NO: 529835 - DNA, 399 bp, Homo sapiens
aactgcactgatctggaaggttcatggaggaagttggattatctgggcttgaaggaggggcagaaagttgataggttaagatggagggagtacatttcataataagtggtctagagaaaattcttgtgaagtactggaaaatgagagggcaaacaaacacccccagcgagtgaagcataccaactgagagaaaagtctgaggagtctgggctgggaccaaagtctcaagtccccagatggggtcttcagtacaaatgatattaggaggcacaggacaatgggcttgtttgtaaacctagcagcagcgagaggtttcacattgcagtcaggggccccaaactgcgctgtgaaactctcgctgcttatctgggaaggcgatgcctaagggacatgctgctt

SEQ ID NO: 529836 - DNA, 119 bp, Homo sapiens
acccctgtcacggggctagagaaagcatacgttctcatctagggcacacaggacaggtgggcgaggtggagtctgccagaaaatgtacatcctgtgcaggcagcatccagggctcaatg

SEQ ID NO: 529837 - DNA, 351 bp, Homo sapiens
cgaaatgcccgagaccctcccagcccggcggagccccgaaaggcccctgaggccctcagcccccacatgccctgtgctgcactcccaggctgcagaccctgagcggaatgtcggcgtcagatgagctggacgactcacaggggcgcccgatgctgctcgacctggagtgagactacaacgccttcaagcgcttactgcatgcctgagcccggagcactagaccttgcacagaatggcagaccctgaggcgaaggctcctggtcccctgtgcgccacacacgccgtaggcatgcacacaactcactgtctgcagatgactgcctggcgacaggatttggtgatagaacttgg

SEQ ID NO: 529838 - DNA, 629 bp, Homo sapiens
gagtttaagctcaaaattccggagttgaacttacctggctgagttaatccggcgattaagcccttacttgagttacgtaagttgatccggagtttaagcttaaagatccggagttgaacttgtccaagattatgggccgtaccctatgtgttcttctttactgccaacttaatttgtaattccagtccacaaacaggattatattttttcccagctgaatatccagaaacccctctattgaaaggtcgtttaaaaaaaatttgactgcttgaattcccaggacaatttgagagagaaagagagagagtttgagccagagactgctgattaagccaggaggacctgttggcgaccgcgagccttggccccagcctccgtacgcccgaccctacctccgtacgcccctgacctctttccttcccaggcccggccccgccactcccgagcccaccaaggccgctccactgaccacgcaatgtttgtgacttctaacaggactgccggtcaggatccggcttgagagacgaaggcggagctctggataagcgagaaggaatcggttacaagtctggataaagggggaactacgtaggtcaagtcaggactgcaaagaaactaagcgggctaat

SEQ ID NO: 529839 - DNA, 740 bp, Homo sapiens
  misc_feature (151)..(151): n is a, c, g, or t
  misc_feature (235)..(235): n is a, c, g, or t
ggactttttattggctccataagtcaagtttaattctttaaaggaaagcacactatttcagtcaaagccttggtaaaataaccagtttcttcaaatgtgtgctgttacaaatgaaaacagattcttattgcacttatgcaaataactgtantgtcataagtaaagaatactcacaaatagattccaaattctgtagaaatcaggtagttttaaaaacaaatatgctccaaatttngttcaaaggagtatactccattgttaaaagctgtaaatagcttaaaagtttcttgattttgaaaaacaaattatcagcaacattttaagcaaaaagttaaaaaagattacttcaaacttctattagtttagtccatgcagttaattcttgttctgcttgatattcatgaacatttcagctctccatgagtcctcgaagttttttctctagtttgatgtcacagtctccagagctatcagaaacatgcattcaagaaacacctgttaagagttttatagctgattataaaactacctctgaaaaggaccaaaaaaagatgaccaatgtctgtgaataatgaaaagttttagggcagcatagtcagacattctgttacctctggtaggcacacaataatttaacattaaaaattataattattactggattaacatacagggtgtgctattagaataatagggagtttcccataatttggggatacatactaattaaattattatac

SEQ ID NO: 529840 - DNA, 751 bp, Homo sapiens
  misc_feature (107)..(107): n is a, c, g, or t
tcagttgcaggctgtacggtccgggatttaggatctctgggcgagctcgcgggcgggctgtgggtcgcgagccgccgtgtggagctgctgtgtgcggtccccagtgntgccgccggacgactgctccgcccgcccccttggcgcccatggtcccgcgcgagctcgcgcacgcgcgcgcgcgcacctgcagaggcttgtttgaggcccgtggggactggtgcggtgcggaggccggtgctgccagaagtgtgaggggaggagcccgagcctgtcgactgctgcctgcctgctaagggagaggagcatgtctgcaactcgagccaagaaagtgaagatggacaccaaatcatgcccctgagtgcgaccaacaggttcctgttgcattgtacaatcatgtccttgatggtatacatatttattagcagaaaacttttaaatgcaaacactcagagaaatcaccaccttctacagagaaacaggaaacaggacaacttgacatctatgctaacctgtctgatgaaaaggcttacgtgtttacagatcgccttggaagaaataaatagacacaaattatcaatcaaagacttattctctgaatacttgtatagcaaaatcgtgcgtgaaacttctgtcaggataacatcgagcaaattctcaaacaggtatatggactctcaggagcattcttgactgccatcaataagggccatcgattgtaccatctcgccatgatagtaatagcctgtgccag

SEQ ID NO: 529841 - DNA, 260 bp, Homo sapiens
cgccgtgtctatctgccgtgatcgggcttatgctcatgtccgtcatggctggatgttggaccatatcttcatctacagtgggtcgggtgactcactagtgtcctgtgttagcgactcagcgactccgtcctcagaggcctggttgtcattatttctctcacctacttgccaagaatcaaagaatatctggatcaactacctgattttccctacaggatgcctcctggccttggagtccagctgcctcctgcaaatgtagg

SEQ ID NO: 529842 - DNA, 127 bp, Homo sapiens
aagctctctttactgagggtgctttagtttgtaggatgacaacctcaaactaacagggctaccatgtagagattgaggccagtccaggggacagcagaccagaatatggagagacttgcaatcatga

SEQ ID NO: 529843 - DNA, 277 bp, Homo sapiens
acgtcaggtgacgcacttacacgagcatggttacaccttcatatggctgacacgcgaacagattggacgttcctgaaaaaactaaacactacgagctatcatatgatacatgaatcccactgctaggtatatgcccaaaagaaaatgaaatcagtacatcactgcgatatctctgctcccatgtttacttgcagcacttgttcacaagagctacagatttggcatccacctcatcgttccattcacagatacaccgctcacgcaaaagggtcaccgc

SEQ ID NO: 529844 - DNA, 1478 bp, Homo sapiens
cgccctcttgtgtgccacgggagctatcgtgtctttgtcagtttgctggtgtcctggatatactgacaactccaattatgggattgcgttccctccagtcgcagaccctatcagatttggatattgtccttcatactttgattggactttacagtggtttcagcagtgtgctacacgtttttacgtgattcatataagaaaactggtaacctggttatttctgtgagacttagtgataactgcacggagaaagacaaacagtgtagcatacatcgagtgttagagaagatagactagacgttgtgacaatcactgtcgccgaatccattgtaccatccgcacttcctgaagaatctgaaccattttgctttggcctattgtagccggtattaacaaaactctattagagtgctcgtgagttggacacatgatatcaaaggcgtacgtaagcagctgttgtgaaatatactacgcttccctgcatattcaactcggcagttgtcatttcctggatgggcacttgtggcagtaccgacgtaaaaggacgtgcttaagaaggtctaacacagcaagaaacttgaatgtccacttcacatgaccagtcatcgcaatacccatttgcgtaaatggtgccgtcatactggatttcttttggggaacttaacgactcgaccatggaccctggacaggccagtacaaggtggacatgaagaagcgttagcgacgaggaatgtaacagggtattcataattgggtcacagaccataccagcgacacacgggggacgtattatcctccttgacaaaaggaagctttgaattgcccggagagctcctttaaagaaaagtatcctctccactaggttggctaagtatgatgggttctaaggacaggaaccacacgggttaacagggcagcaaagggggttatcccggcgtgagaatttgggcaaccaagtcttaacaattttcggtttaaacacgagaaactccaacaatttggcgtttcccccgagggcacttcaagcggtcacacggacttacatccagcaagacatcttcgggtttgtggtctcacaccaacgtggcacttaaactttttgacccttgtcaaaaggagcccgttcttgcccgcgggagtttacttaaacgcaacaaactgctttctacttatagagaaggacaatactaattcaattaatcaagaaatttacctactaaacaaattatagaataagtacaaaaattctatacacccagcgaattaattataccactagagagaacaacctacacaagacatcaactactatatatatcaccaccaaatatagttcgatgatttaacaaagcaaatatatacccgcaacatatacaaaaagaaaatatataataaagtagtacactaatcagaacataatacacaactcatgaaataaacaacagcaacaacaagacacacaccaatcagaaaataaa

SEQ ID NO: 529845 - DNA, 474 bp, Homo sapiens
caacggctgggttctaggaaaacccttttatacttgcgtgccccatctttttggggaaggtctttatggaggcaaaaggggctcattttttaaaatgggcttttcccgccctgtggccaaggaaggctttttctgattttctaacaaacgaatttttgcacacattaaattggggtttatcggcaacttacacacattgaaaaagacctatcgtacctataacacaatccacaatgaaaacgcaggaataagcgtccttgtaacaatattgtaatgaacggctgtgcagtaggcccaccgctgctgtggctctgaagaggaatagcttaccacgaacccttcagcatactgggaatctcttcctgaacaacgaatgtaaatatggtcaagtctacttttccgttcattcaattattttaagcatttgaatcatttatggtatatcctcaaaaatattatcctttggcagtgact

SEQ ID NO: 529846 - DNA, 102 bp, Homo sapiens
tacgactaatttctcaacacactgtaatttagcactgaactttgctactctactgtccaacctccttctcaacaaagtcaaatcacaaggagaacttaacct

SEQ ID NO: 529847 - DNA, 922 bp, Homo sapiens
agtggtggtcccggatgtgatcctgtgacatccaggtgggagtaagtactaagggagggggttggaactatggcagaaggaaacaccctgatatcagtggattatgaaagttttcgggaaggtgcgagggtggctgcttttgctcgattctcattactcagggctgagggttaaaaagtctggtgattggtaggctgggtccagtaacacttgatccgggtgcacatgttgcacgggacaaatctgctcatggttccctatctcacatggggtgcgtgattactgtcatggaaatgtgcgttgaacaacaacgaggaagctccgtagacattcacactgtcgacaatagcatacgttgaaacaaatgaggatagtcatcttgaagtgggatttactcaagatcttctaaatttgtaatgtaattgggctgaattttagaggtttctcataagataccactacaggggtgcttttggttgtcaattattataatatgacgattacgaagttgatgtgtgtgttaatattatgcattgaggtcaataaggattccttattactgttcatgacttgtttgagatgttattataatattaaccgtgtatgattgggatgggattacctactgctactacaatctcctatctcaaataaagaactgtcagaagcgttcataaagtgccttactgacctgtagccatatacttgtttccgaggtcgtggcgacgaggagacctgttcattgaccaacagatggggccagggcaccttaaggtggtacagtcgttaatggtggcccagagagacactccccagagaattggtcgggcatttgcactcttacaaactcgtgggcacctgttttttttaccacaaaccggggttcggctctaagaattaaacgaggccggcggctttatcc

SEQ ID NO: 529848 - DNA, 207 bp, Homo sapiens
gtggtcccttcctgcgcgtcggtcggacctgctcggatctgtggtgcttcacttgtacccgacctgttctccacacctttcctgctcctctctgtctctacgccccaccctgtgactgtcctgtggcacttctgccttccgttcttttccccctccttcctcgccacagctctgactcgttacggggctcctctcgcgtcgccctgc

SEQ ID NO: 529849 - DNA, 152 bp, Homo sapiens
ttcattagctcccacaatcctcggtctacccgacgcagtactgatcattctatttcccactctatagatccccacctccaaatatctcatccacaaccgactaatcacccacccacacgagcatactccccctaacctcgacacaactgata

SEQ ID NO: 529850 - DNA, 947 bp, Homo sapiens
tctgatgccttctcgttgtgctgtcagctgtctgctgggtgtgctcctggcggtcaagatgtgtataccggtcacactaagttgtgcctggcctcagcgctccccagcctcctacgttgaccgagaccacgtgtgtgacactgaggtgagtgtttcttattctccagtgaggggtaaggactagagacgatagttaaagacataagcattagcacacgctagctgctgtgagtagaagcaaatgtgatgcttgaactgagcttagtgtcatagctcatgttattcagtaacttactgagtcgcccttgttcacttaaaaaatattggtgggccgttgcaccgtgtgtcacacctgtaatcccagcactttaggaggccaaggcgggtggatcacgagggtcaggacgtacgagagcggccctgaagcacacaacgatgaaacccgtgtctctacgtaagacaatacaaaagatgagccaggcctggtggcaggcggccagtaagtcccagcctactcggaagacatgagacagcgagacatttgctagaaccctgggaggcgccagcgcttgcaacaagaagcccgagaatcatgccaacagatacccagccgggcacgaccgggccgcccgaaagacctactggcactgctgatactggtcaccactgtaaggactgaactgcgcggaggtagagatgacacacagtaatggtgtaacgattggccacggtggcgactgcgcactccgtgtaatctgcagcaactaccggacaggccacagaactgccctcacgcgaaaccagaggggcacagcaccaacgcataccaaccatggcaaccccgcccctcgccacacaaaacacagacgtccgaccacccacaatacacatgagccccactccaccacccctacacgccacacggcgccatacactccacatcacac

SEQ ID NO: 529851 - DNA, 226 bp, Homo sapiens
ggctatcacattatcgtacactggaagacataggaaccctctaacgtatcactatcaaggttagtcgtctatatctacttgagataaagatactgaaaattcagagtctgaagccaaatcctgatttagcacgttattggtagtcataagtgataagtgtgagatgctgcagggaaggcagatgtggtaacttggatatctctgatacgggctggataatgatgag

SEQ ID NO: 529852 - DNA, 122 bp, Homo sapiens
cagacacagtaacaccaagggcaggtgggcaggctccgccctcctcccctactccaggcccactgcaagcctcagcccaggagccacctagatctcccaagcacctatggtcctggtacctg

SEQ ID NO: 529853 - DNA, 657 bp, Homo sapiens
tcctctatgcagactagcaatcaagcaagaagtcaacaacatactgacatagtttggatgggtccccacccaaatctcaccgttgcattgtaataattcccacgagtcaagggtggggccgggtgcagataactgaatcatggggatggttccccccatactgttctcgcggtagtgactaagtcacatgagatctgatggttttataaatgggagctcccctgcacatgctctctcctgcctgccactatgtgagacatgcttttgcacctccttgccttccaccatgattgtgaggcctccccagccatgcagaactgtgagtcaattcaacctctttcctttataaattacccagtctcaggtatgtctttatttgcagtgtgagaacagactaatacaataagttgataccagtagagtggggtgctgctgtaaagatacccgaaaatgtggaagcaactttgaaaatgggtaacagggagaggctggaacagtttggaaggctcagaagaggataggaaaatgtgggaaagtttggaacttcctcgagacttgttgaatggctttgaccaaaatgttaatagtgatatggacaacaaggtccaggcggaggtggtctcagaggcagatgaagaatttgttgggacatggagt

SEQ ID NO: 529854 - DNA, 419 bp, Homo sapiens
tttacctattattagtccattttcattctgctatgaagaaatacctgagaccgcataatttataaagaaaaaggggtttattggacttacagttccacatggctggggaggcctcacaatcatggcagaaggtgaaggaggagcagaggcacatcttacagggcagcaggcaagggcatgtgccggggaatcgccctttataaaaccatcagatctcatgagacttattgactatcatgagaacagcatgggaaaaacctgcccccatgattcagttacctcccacctggtacctcccatgacacatggggattatgggagctacagttcaagatgagatttgggtggagacacagccaaaccatattcctatgttgtttctaacccttgcagtgacccaccagcaaagaccccaaaag

SEQ ID NO: 529855 - DNA, 239 bp, Homo sapiens
gccagactgggttttatcagaacgggagcagtttaacgaattccgggatcttaacaaggacgggaagttagacaaagatgagattcggcacttgattcttcctcaagattattattattcacaagcttaggccaagcatcttgtatattaatcagacaaaaacaaggatgagagagctaactataagaggggaatatatggagagactctgaacaaagtttgtgcggggagacaagcta

SEQ ID NO: 529856 - DNA, 138 bp, Homo sapiens
tctagaactgtagtaggcaagcagccagactcactgcaaagtgggatgtgcgattcttgacacagaaaataagtaggattgactctaagatttttgctttgagacaaatggtcgtagatatagaagagtgcacttttg

SEQ ID NO: 529857 - DNA, 125 bp, Homo sapiens
ggatcggcggtaatcggtgagctcggtgtcgggtaagggacccagtccatcgccaccaagcgccaggaatgggcagcataagggaaggctaaggaggactgcaacaggttagggccctggagatt

SEQ ID NO: 529858 - DNA, 879 bp, Homo sapiens
gttcgcccacaacccttccacaatttgcggcccccacacatggtccccctccagaccccccacccgcagggtttcaacaaaatggagaaccttcaaacgtttattctatcagccttcttcagtcaaattgctcggcatccccgaacgtttcaacacttctccccctcccgcgggggcccccactctcaatagcggtctaaggtcccacccaaagcgccccctgctcttgccaaacatgctcccacagacatctctcctaatacacgcattctgcctccctaatatcttcggcaacctcttgactgaacttcccaccagtatttctcctcaactttgagtccccccatctctccggccgtggcctttccaatcttctattgccggccacactttgggaccacacatcaaagatcttttaacttgcccatatactagctgtccacacccaccagacattggcaccccacataacaaccggggccgcgccacaaataaagaggtgacaacattacttcttcgttactcccccgccacgcattatgtgaggtcagtaccctcatctcccctctctgtggatggtccaccacccaacgttctctaaacatgtcccccacagtgtctgtccccaacatgttatactaacttccattacattcacacacagcttatatctacaggccgctttttctctgaatagggaacttatagtccacattcatcccccaggtgtcttgaagtatccttcctcatgtgttacacacgtctaacacgcaactcaattgcatcccccccctaactcacgcggtgttgccgtaatccccatcttttacccaccacatgtgtttcctccgtcccaaacacaaattcttcctcccaaca

SEQ ID NO: 529859 - DNA, 248 bp, Homo sapiens
gggaggtcacacattgactccctgagcctctgctctccaggctaaagagtcccgaggcatcgaggccatttctgctgcacacggttctgtctctccactgtccgcacattcttagtattcctccaggctctggcaggagactcgcagtgcacaccacacgtattcagtcttccaccctcttgcatacctccaggacagagagcttactacctccaaggcagctcctgctttggctgctctacttacga

SEQ ID NO: 529860 - DNA, 1041 bp, Homo sapiens
  misc_feature (1031)..(1031): n is a, c, g, or t
atgacacatcgatcacttgcttcatgatcatagtagaaatgaagccagtagtacctactgacaagggcaccgactcgagccatccataactgatctaccgtataaacgcatagatgaatacatctctctatttacctagtagagcgctcgcgtcattcataggccatatcgtatgcgaactctcgtaacctagtgattgaccaggtgagtgggcagcgtatgtaggcgaccgatgaaaaggcagcatgtcctaggggtgtgaaacagctcgactggtacaccaaggacttgtcctcacgggatcatccttgattaaataagcctcgtcaggaatcttgggactcgtcagacacgagagtaaagcatgatggctctttacctccaaatgaaacgaacttagggcttgtaccggcccccatgtgagggagtggacatctggggcggcaaacatgtatcttatgttctcctaagagtacaacgtaaaatgtggcttatcagtatgctatctgttgcagcttttatcttcgacctgagggagatctcgagtcaagcatgtggacacacaaatgaagtcctcatatagtagaagatccgatgcaagtgatatcctaaagactccatgcgagtgttgctaaggggaccgcggctcgtaatttgaactcatcgtatggagccactcagagtggttagcctcaatccacgtatagatgccaacgtcgggatacgagggtggctgcattgttagggagcactcgcgggtcgatgcaactacatgtcagttattgcctgaacttgacccagtatgtgactgcgtcgacgacaatatgcatgttctcgatcctcaatttgtcaacagagcattggaagacatctggaagtggggccttccgcagtttaccatggcgggggggcagaaccaggtgaaccacctcgccgctgggggaggcacgaaccttggcgggccagaagaagccggccacaagtcctccggcaaaaaggcgggggacaacataatagcgcgacaggtcccngcacactacc

SEQ ID NO: 529861 - DNA, 883 bp, Homo sapiens
gcgcccctccttctcctcgcagtgcctcagagccgaatgcccgagctgtcggcggagccagagccgaggggcctatgggttgtgaagtccaccgtgaatgatgaagtcatcaaacgttttgaatgattatgaactgtatgggaatcttgctacacaagaggagatcaagacgagaaagaaagtagtgctgcttgcggtctttaagacgatgtacaaatagacaagataagtggtagaatggaagcttatgcaaatatgtggtgggtgacatgtggtggatactgtagaggatccgtaaacatcttctcgtgaagtggtagctctgaatgatgtcgatagtgcttgtgttagtgatgtaacagtacagagaacaagagagacgtctatgtaaaggagaggaccgctagctaatttataatgtcggggctctggtgagaaggtgcgccttgttaaataacgcaagagtgagtttatgcctgagttctaggagagtgcattgtaaaatgagagcattttaccatggtagttaacatatggagttggcgagtaaaagtgggttgggacttggatataaaggacaggtcagaaactgggagagaaattggggaggcagtgtgagtaggtttacactttgaaatggggaaatcgtagttaataaagtggacccgtgaagtggccattctgggttcttgaagggagggtttccaagtttctgcaagtttcagtcattgaaataggtattaggtgtcggttagggtgttttcacaccttttcgaatggccttcaacccatggactgggggaaatctctatttgagaagcttcagggtttggttactggggactgggattttttaaccaggagggtgggttttaaaagggtc

SEQ ID NO: 529862 - DNA, 320 bp, Homo sapiens
gatccttgacataattcccttacctctgtcgacctgtgaaactgaacaaacagcttatctgcccctaatgtgaaatgatggtacagacatagaataacactacagtgattctagttcaaaatgaggaacatggagggataaagagtcactaacccaatatagtttggaaatggagctggacaaactacagcaggagtttcttagttaggatccacagcctggtactgacctctgtcctgtgggtcttactgtggctctctgctctgcatttctgaaccattattattacatttcccacaatcttttgcggattgctccca

SEQ ID NO: 529863 - DNA, 469 bp, Homo sapiens
ggcccgcccgtttgcctcttttctggcgagacctctggattgggctcgccgtcgtcttggagtgacgtgtgataagcccactgtaagggggtcccgtgagcctggttgactatggacagccaatcttatgaatatcctgtccctggtacgacatggctgtttcccgcgtggagtgcaagcgttccgtggacttgtggggagtcgtgaaccgaggtcggacgttcctcaacaaatggctcagctttccgtgagcgcctggaccactttagcggagaacatgtgaggacttctccaatgatcctgttcagcagcttctttgatgaccctgtgtctggattgaggaagagccctctatttggatcatggaactggactcccctacgaccaggcattcattgcggtagcacagctactccctgagcggcgactcagtcgccccagagcccccttgtgcccatcaagatggagg

SEQ ID NO: 529864 - DNA, 898 bp, Homo sapiens
ggccatctttccagcctcagtcggacgggcgccggagacgcattgctggaaggaacgccgacgatggtctgcgcagaggcagagccccaggatccagtctcagacttgtattggtctggtgatggtggtactggaaaaaggaccttctgtgaaacagtcatttgagtggtgaatttgcagaagaagtcatgtagctcagcctgtgggtgatgaggtttcatcacggtagatgtgtcctacagcaacagaggatctattaggttcgaatgtcatgggacacaggcgtgcgggagcaaattctggttggtacgtgacgagatgtgctgattgatatccgaaggccaggttgtggcatcgataatgttggatgtaaccatcgagagtttagttacaagaatgtgccgtagactggcgatagagatctgggtacgagtgtgtgaaatacatacccataggtagtggttgtgggaacgagaagtggaatattgaaggacaggaataggtgagagaggaaaatccagtgataataccgaacgacaagtaggaatcgttcagataacgcacagaccattatcttgacctagaaatgttcactaacgaacactgtgtgaaccaaagacccattccctgcgtgagcttgggcaaggaactgctccactgtggactgaagccattaatcttcgagaaaagtgcgggtgtggcatgtggtcgttgaactcggtcggtagacccgagctatagaaaggattaggatcaaggggtataagcgcaagagtatttgggcaaagggatgagtcaattgaagtacagaggacctttatagagtgttgggatctagaaggcaaagatgattcatcccgtgattgagggaattgattgagcatggtgaggaagtgaa

SEQ ID NO: 529865 - DNA, 1252 bp, Homo sapiens
ggtctctagctgtgtaacctcgtcagaaccgacacaccactggggcatacttccgatcaattcctccgaacgcggctccgagttcctcgacacgggtggaaggcgtccggcgagcactcgttgcacggcccactcgtccgtgcgttcaggcagctcgacaaggaacgtgtccatccgtgggtgcccaaactccattaattgccaatgaaatgcgaatgacgctcgaccactagtactgcaatagagtataattccacactgatcgcttggaggccacgagcgatcaaacacgcccatggggccctacatttatgcttaccctgtcaaggtcacctcgctaccacccataaactctcggtctcgaggatttctatttcgcgacctgtgcgaatgcagtgcttcgcatcgtggctaacgggtcgtagaggcgccatttttcgtaacccagccatacactgcccgcgagggaagaaggcagccgaccggcctacgtaaacggtcgtccaatgcagaggattgcaagacataacgcattgcgtgggcaagctcgccggcgtactctgtcacaggagagcgatcctagaacctgaacatttggcttggcaggtgcgaaacgtatctagaagctttactggagccagcactcgacgcaaaatgtcctttaggtccctaggaggtgcgaaggaagagttgcgcttgaacgcaatgtcacgatcaagcttaaaaagaaggcagggagcgcgaaaaggacgtgctccgtgtgtcatcggtcacctttggcctggtctgacaactccccctttctcgggaacaatctctccctgcgcataggtggtaccctatgcccgtaaggggcggaatgggcctagcgacacgctaatcgcgacgtaaggggaaaccaaagcggcatggcccaaccccaagccccacctttgcgcggcccagtaatccttcgtgttcttgtctccccttttttggccccgagggacaccttgaggctgtggcttcctttccgggcacctttccagggagccccaacgaacttgccaaacaagcggcgtcatcccctgtgggttcatttccacttgtttatacacggcccgggggtcccctttgccttgttagccctccaagacacttccgaagaacgcttggtttcctggcacggggttgaaccttgaattcacaacctagaataacaggggccaatccttcaagttacagaatgccaattggcgccttaagggtcacc

SEQ ID NO: 529866 - DNA, 142 bp, Homo sapiens
gaaattttcccatttgaattttttaattgcctggcaaaagctgaaataagttttaaaaaatcagcaaaaagatttggtgaattcattacaaccccgttatgtccctttttgattccaaaaaaagttttcagtaaacttttca

SEQ ID NO: 529867 - DNA, 166 bp, Homo sapiens
cctacgtcaaaggtactctcatcacccgatatctaagcggtttacaatgctgtacttcgcgaaaataggataagactaccatggtttgaatagtttgttttctccaaaactcatgttcatatttaatttgccccatgtgacatgatttgctcaccgctaattaact

SEQ ID NO: 529868 - DNA, 868 bp, Homo sapiens
  misc_feature (79)..(79): n is a, c, g, or t
actcaggggtgtttgtccggcggccagaaaataattctctcgtgttttgtggcggggggcccccccccccacccacaanttgcggaggtgctctcgcctcccccacctcaatgcgtgtgggggagataggccgcccacctctttcgagttgtgtctcgcgctgcgccccgcacacttcgtcgcggaggttagatgccctctcgctgtgctctccccccgcctgcactccaccacacagtggggcgaagaccattttggagaccccctcctcttccccacggtttggtataatttttctggggagagctctcccgccccacaaaatggtcgacgcgcaccccgttgtgccctcacacacaaggaggaaggacacgcaccggggtgaaaaacccctcgcgtgacaacgtgcgtatctgcgaagagggtgcctccaatcacaccccatggggcgaaggataaatccgccgggccagggagccaccccccccaccaagtgcagggagggcccgccccccctcgagtctctcttctgtagtagcacccgggggtgtttcaccgctcgggacaatagacgcactcactcggccacacacaccgtcgcgtccccccttgcagggtcacaccacacagtgcggttactctcagcacaggccgacgcagccccggagacactctcctcccccgaggataaggggtgtctctccccttcgccccgcacggacgcaaacaacaagacggcccccaatatattggccggccccccaacgacgccccgtgggtgaacaacgggcgccccgaggggaacacatgcgcaagcatcgtgttcacgaactgtcaaaaacttgggccgggtaaaacccacaaaaca

SEQ ID NO: 529869 - DNA, 173 bp, Homo sapiens
ctgggattatagatatgagccactgcatctggcccacatcactctttatttaaattgtcttatttcttgtctgactcctatctagattttaagtttctttgggatagagactctactattcagtcatcactttttttgaggtgggaggagaggaagaggtgggaggagaggaa

SEQ ID NO: 529870 - DNA, 264 bp, Homo sapiens
gcaggctgagggcaggtgggaagcaaacccggacggatcgcagcagcagcagcagcagcagaagcagcagcagcagcctccgcagtccctccagagacatggttccccagacagcaccttcccgggcgttctgctcctgttttttttgcattgggtttcctgggggggcgttccccccctggggagccccgttcagctcggatttgaactgccggttacaggcaactttcggactgcagtggacagcatcctgggccctcaggg

SEQ ID NO: 529871 - DNA, 355 bp, Homo sapiens
  misc_feature (54)..(54): n is a, c, g, or t
  misc_feature (82)..(82): n is a, c, g, or t
  misc_feature (136)..(136): n is a, c, g, or t
  misc_feature (151)..(151): n is a, c, g, or t
  misc_feature (160)..(161): n is a, c, g, or t
  misc_feature (212)..(213): n is a, c, g, or t
  misc_feature (217)..(217): n is a, c, g, or t
  misc_feature (241)..(241): n is a, c, g, or t
  misc_feature (269)..(270): n is a, c, g, or t
  misc_feature (274)..(274): n is a, c, g, or t
  misc_feature (281)..(281): n is a, c, g, or t
  misc_feature (306)..(306): n is a, c, g, or t
  misc_feature (335)..(335): n is a, c, g, or t
ctccatgccgccttcgccttggaacctgggaaagaatatttgatcatgggtctngatggggccacctatgacctcgaggganacccccagtacctgctggactcgaatagctggatcgaggagatgccctctgaangccttgccggagcancgccagcgnnagcctgtcccagctcaacgacttcctccaggagtatgcactcaggggtgcnnggtntgagggctgccctcccacctccgntgggaggaacctgaacctgggaaccatnnaagntggaagnactgctgtgtccgcttttcatgaanacagcctgggaccagggcatattaaaggnttttggcagcaaaaaaaaaa

SEQ ID NO: 529872 - DNA, 236 bp, Homo sapiens
  misc_feature (51)..(51): n is a, c, g, or t
  misc_feature (102)..(102): n is a, c, g, or t
aggggcaggcactcggggcgggaggcagtcttggcttaaccataaaaaggncggggaggggaaggggccggaactctttagagctcgtcctttgttctgaangcccggttaccatttcgcttgtgtcacccgtttcgggaatcgaggagaatccctgtatcagctggaaaaccgttttgggaaacttgttctccttttgaagaatcccactgctgcttggactaggactacctctg

SEQ ID NO: 529873 - DNA, 582 bp, Homo sapiens
  misc_feature (20)..(20): n is a, c, g, or t
  misc_feature (79)..(79): n is a, c, g, or t
  misc_feature (84)..(84): n is a, c, g, or t
  misc_feature (90)..(90): n is a, c, g, or t
  misc_feature (93)..(93): n is a, c, g, or t
  misc_feature (95)..(95): n is a, c, g, or t
  misc_feature (103)..(104): n is a, c, g, or t
  misc_feature (109)..(109): n is a, c, g, or t
  misc_feature (113)..(113): n is a, c, g, or t
  misc_feature (126)..(126): n is a, c, g, or t
  misc_feature (128)..(128): n is a, c, g, or t
gaccaaacgcaggaggaggngttctgcagaggtcacagggaagtcacagaacagtaatacgctagcaggggcatggggngtgangaacanaanangagagganncgttnccangcctccagagaanantcaaggccaaccaaagcttcccgggtcacagaaccaattcttttaccaggcagtaccactgctgtcatttcagcttctgggcactgggaggtgctgctcgaaagggtttgacatgagaatccaagaagaagatgcgggaaggacagaaggggtactggggttttagcatctggcacaggagttatgtgtaaataaccaaagggagaaaagtatgaaccaagatataatccaatcggagatgatgagaataacgaagttattacggaaatggtttagcttccccgcaggatcaggaaagtttgagaaaagcatctgcagctgagctgccagttcctctgagtcctcaaagaccaggccattttcttcatgtttcaccagctcatgtaaacacttgaagttcacagcacacacaggcaaacagcacccaaacatgtccaccaccttcatgggcagg

SEQ ID NO: 529874 - DNA, 947 bp, Homo sapiens
atagagtcggccaggtggctgcttgcttcctgctaatgtgggggacgtgagacagatctggaaaggcgtctccctcagatggtttgcatttaatgctttatactgccgagtctgggggctcgtcttggtttgtgggtgcagccatcctctcaccagacagggggagctccttccgctgtggctccagattatgggtatgccgggttccaggccgaccagcacttgggatctgatgggacacggcagtgcctaggggtgccaagtccaatggctcccaagtgggagtcatcagcgtgagaagatgccaatgtttcagtccacctggctgcacgaggcgacaaaactcccacacccaggacggctgtgatgatggtgtgccctcactgtcaaccctggtcgctggagtccccagcaactggggccctggtggggctgatgtctcaggtgtttactgtgctgctgcaactggtcgctatgccagcctcaacccatgtggggaccacggaaggcacactcccttacccccggtgtccggccggtgcggtcccccagacggacatgcagctgtggcgacctgcgtttctccctgggctgtgcttctgtagttagtccggccctggttcccttgtgggtcaaagccgcgttccatggcttgtacatatgtgattgctgtgggcaccccaagacccatgttagctggcgtccgaaggtacaaggcccgtccgattgttttaccgaggtgttgccctaggtctgtatgggactggcctgtaggctgccatacaaaaaatgtgtcttcccacaaaaaaaaaggggggtctaaaacacacgcacagagcaccttttataggcagctaggaaaaaacgagcgtactacagaacaagtagtacacactggcataaacacaccttaattaatttagtgtaacattcacaaatcacatcta

SEQ ID NO: 529875 - DNA, 696 bp, Homo sapiens
agctgagatcatggtactgcactccagcctgggcgacaaggcaggacttcgtttcaaaaaaaaaaaaagaagggtgcttttacacagtgatcctagtttactgaaatgggactgactccgggatatgcgtctgatagctggccactcctatcctatcctgttcctagccttggtctatttgggctgcttataaccaaaattaccattagaactggggtggattataaacaccaggaattgattcctcacggttcgtggaggctgagaaagttccaagaaacaaggaactggcaatgttacagcgttctggtgagggctgtattcctggatcgtaggtgggtgtttctcatgtgtgtcctcccatgacgtgacgacatgggcaaagcaggcgtctctcaggcctcgtagtgtaagggtactaggtcccattcgatgaagatgcagcctccctgacctaatcaccttccaaaccctcccttccttccttcctagcttccttccttccttcctagcttccttccttcctagcttgctgtgcttgctggcttccttccttccttcctctgtctctctttctttcttttttctgaggcggagtctcgctgtgttgcccaggctggagtgcgatggtgtgatcttggctcgctgcagcctctgcctcctgggttcaggcgattatcctgtctcgcgctccca

SEQ ID NO: 529876 - DNA, 172 bp, Homo sapiens
gaatataagctcgtaccagtgaatcgactcgggtatggaggatcatctagaagttgaccaggctcagcttaacgatatatggaggtcagcacggtgctcacgtagacgacggaacttgtacagggaggcatagcaccgcattggtagaatacacgtacgacctaggctccag

SEQ ID NO: 529877 - DNA, 320 bp, Homo sapiens
  misc_feature (292)..(292): n is a, c, g, or t
gatggaggacagccagagggacgaccggaccctacttctggtcccgccttcagacgatgaccatgccgttggcgacattggaggcgacatggttatcagcgcagttgacgctgacatcaagcacaggcgcactgtggccctgcagcatcgctgacagcagccttggtcgcccgatccacatcagagaagcgcacgcgacagcgttctcactgacagacaccacgcaggccccctggcggaaggcatgaggcagccaagatgctgcgcacaggatgtgagctctgcttagggnggaaactctctccagcgttgcgagcgca

SEQ ID NO: 529878 - DNA, 295 bp, Homo sapiens
tgagatcactgacgcgcaccaccacgcccagctagtttttgtatttttttttggagatgaggtttggccatgttgcgcaggctgatctcaaacttctgggctaaagcaatctgcctacctcagcctcccagaatgccggggttacaggtttgagccactgcccctagcctaagtttggctaagttcctgtttactacactctaaaattttaaatggaatttctgtttttgggtactaagggtttttggttggttggttggttttggttttggttttaggctccttggtcgtggct

SEQ ID NO: 529879 - DNA, 130 bp, Homo sapiens
agaatctattttcacatctaaaagaacagatagagcccgacaggtgatgcaccgtcgagtaaaaataataagaaaaatacatacagttgggaagggcatttggtgcactggtgagcacagtattttagaa

SEQ ID NO: 529880 - DNA, 962 bp, Homo sapiens
gtagtaaaacccagcccatgacccctaacaggggccctctcagaccctcctaatgacctccgtcctacctatgtgatctcacttccactctgtaacgctcctcatactaggcctatgaaccaacacactagccatataccaatgagtggcgcgattgtccccccgagacaagcgacaataccagggtccatcgacaacaccgacctggtcctacaatagaggccttcgatacgggcaataatcctagtattattacctcagaaagtatgtgagccttcgcaggatcaaactgagccttggtaccactcctgcctagttcatagccctaaattctgatggccctggacccccaccagggaatctcgccggtaaagtccccgtagacacgattccctggtccataaactaatccggtgaattagttcgccatccaggaagcattctatctaacttgatccccgcggttagatcgagctatgagcaaggatcgaggaccgaatataagcttggtgccctgctaatgattatttaactgagtcacgatataataccactcttaccatgacgtaagaatatcacaatggtgtccctatatcacattcgatgcatgtgtacaaaagtctttaatttaatatgtaggtttcacaggatggccacgtgcatcttgcacgtcactccatgttctacattgtttgccttcattactcagaggtgcaatcgtcctgtctaatgatttccctttttttcctaaaatcaagttcggtcgaacgcgagagtggcacctgtccacctcatagaaatacggaaacccacaatggcggaagtgcatattttgatacaaaactctgggctaccccaattccaccatacgggggccgaaaaaaaacggccctagagtgctgtgtgggtcccaccccccggtgaagaagtggtacactacaagccagagaatctcaaaagaa

SEQ ID NO: 529881 - DNA, 938 bp, Homo sapiens
gaaactgtgcctgctctgagagagtcgtgtgtgatgtgatgtcttcctgtgatacaaggcgtagctggggcaaagagaaatacggtgtggacctggatgagatcaagccctcctcggcccctgatctccagggcgtgcgcctgtttgctgactacctcgcccagcaatagtcgaaaggacgagatcgtggtcgagatggaccgagagataagcaggactgtggatcgtgaccaatattgcagcattcctgtcatcatggacgactcgcatctatctcgcacggaggcgatgaacccgtgatgtccgaccatgcgtgggcaagaatcaccagtggtggaacattgcctgggagatgctgccaagtcatgaacaagttgcgggatcctgcatgaagcatggatcgcgtggacctcgcccggaaggagctgaagagaatgcgaggaccgtgggaggaggatgcccaaccatcagccagttcgccaatgcgtgggtcagactggagcacgggatggtgaggaagcgtgaggatgcctactacatcttccaggagatgggtgacaagtgctcgcccaccctgtgctgtcaatgggcaggcggctgcacatggccaagggccgctgggagggcgtgagggcctgtgaggaggcgctagacaaggatagttgggctaccccggagaacggctggtcaaacctcatcgtcctgttgccaggaacctggggaagcccccctgaggtggaaaacccgatacctggtccaggagcccccatctggtaataagtatcttacgtcccacagagagaaagtagtctaaaattccggacagaaaagagcctaaccaaaacacgaaacaaacaaataaactcaacacaaataatactagtaacatacttatgaaagcaggtatatcaacaccaatatagggagtataaacccac

SEQ ID NO: 529882 - DNA, 285 bp, Homo sapiens
tcacttcgagcttgtacccgtgagccatgatcacaccactgcactccagcctgagtgacagagcgagaccctatgaaaaaaaaaaaacccagattctttcctggcctccccgttgcaattctaaacagcctcggacccattatcggtttggcggctggggggatctttaaaaaatgtaattcaggatcaggggcctcctttttaggaaggggagaacccccttccagggccttccctttgtttaaggatccagatcaggatcctcactggggcctcccagggcca

SEQ ID NO: 529883 - DNA, 485 bp, Homo sapiens
  misc_feature (88)..(88): n is a, c, g, or t
  misc_feature (96)..(96): n is a, c, g, or t
  misc_feature (176)..(176): n is a, c, g, or t
  misc_feature (355)..(355): n is a, c, g, or t
  misc_feature (368)..(368): n is a, c, g, or t
  misc_feature (442)..(442): n is a, c, g, or t
ctgactgtaagttccacaacagtagtaatatacaaacatcaagtgaagtgcctgacctatatttacaggttgacattttttgaatgantgtctganttttagatttaaaaagtattggccagtcgtggtggctcacccctgtaatcccatcactttgggagggcgaggcggggggntcatttgagcccaggagttcgggactagcctgggaaacatggtgagaccacatctctacaaagatagaaaaagtgagctgggtgcggtggcgcatgcctgtcatcccagctacccaggaggcagaagtgggaggttcggatgagcccataaagttcaaggctgcagtggagctatggtncttccagcctggnttgacagagtgagacctggaccctgttttccaaaaaatggcatattttaaatgtacatatattacatgttatancacaacaacacaacacattacaacaacacgtgtgtgtattata

SEQ ID NO: 529884 - DNA, 155 bp, Homo sapiens
agcctgcccaacagcagggaagccaagcacccatttatccccctgcccccatttgattgggtagttgaaaggggaacagtgccatgtaccacacaaatgttcctgtttccttgcatgggcatagggacccatcattgatgactgatgaaaccatg

SEQ ID NO: 529885 - DNA, 291 bp, Homo sapiens
  misc_feature (194)..(194): n is a, c, g, or t
cgtcgacatacagtataaacaagttgatatacgatgtgagcaaatgaggtgagataagggaggtaaaggcaaaaaaaggccatggtggcaaagtaaatacaatatagcaagtaaaacactggaattgtacatttgcaatggaagaaatgtgcaaagtagaaataaaaataatggggtgcataggagcaaaatanattcattaaatacagtagggaaagagctagttgtttggcctaaactataggtgggctatgtacaggtgcagtaatcgtcgacgcggccgcgaattta

SEQ ID NO: 529886 - DNA, 217 bp, Homo sapiens
gtagctgggactacaggagcctgtcaccacgcctggctaattttttgtgtttttaatagagtcagggtttcaccatgttgaccaggctggtcttgaactcctgacctcaggtgatctgcccacttcggcctcccaaagtgctgagattacaggtgtgattcactgtgcctggcctcagttgaactctttaagattattcaactcggggatcctctag

SEQ ID NO: 529887 - DNA, 257 bp, Homo sapiens
cagcaatgtatatcagccggtagtagcggcaccatcgtgagccttctcttagaggtggctggtggcaggaagctgaagtcgaaaccagcgctgggagtgaccagtgtggaccaggaggtccagtgagggccgggggtgaccaacaggaccagcatcaccacgtgcgacctgcgatttcttgaatggcacggggatccgtctacgagtctgacgctgcatggctatgcaatgcttgtgctactggcctgtctgtttta

SEQ ID NO: 529888 - DNA, 943 bp, Homo sapiens
aaggattacagtttctaatacatatacactgaacctcgctgtaggttgaaattaggtgtacctcgtgtgttgtggtacccacgtcttctaccaggtaggctgccggtgcgtgaggattcggattacgcgatgcatggactgtgttggaagtcgcggtgataatgtcaaagatagtgatcacactgatgatattctagctgttggaggaagagatatcctcatatagttcaaaagaatgaagtgtaagtgtatgtgtgggtgttcggtgtatgtgtaacgagaaaaatagagataacgagcttgtatgcgaattatttaatcccgaatagataatagcgtggagggtgagtacattgggggtgttctagttgatacctggttttgtaatcaattgctcttgttgttggaatcttcttgttgaaccatgtgatctgtgagtgtagtaagaggtcgagtatcgtatgatgcactccaaagggaattggcatgtcttagcatagatggtgtctgtgatgtcctatgatgagagcagcagcgacatgacaatggggcataggaggaacgttgtgacatgtcgaaggttcgcataactagtgatgacattgcttgtaagagagagagcgaagttgatatggtcatagactgggattaggtgaagtgaaggcatgggatcttagccctgatatgaacgtggtatacgagttgaattgtgtgatctacatggttacatcatcgagatcgtctcggttgccctcgattatacaccacatggaaaggtcatttcacatgtctcgtactgcagtttccgtccgaacttacatgcctttcagtgctttgatcaaagcttgcattcaagtggtcctgggcagggccgaccacatagtgggttgagatgccagctcgggatggtgacgggcagcctagcattgtgtcttgaaggccc

SEQ ID NO: 529889 - DNA, 237 bp, Homo sapiens
  misc_feature (25)..(25): n is a, c, g, or t
  misc_feature (92)..(92): n is a, c, g, or t
  misc_feature (217)..(217): n is a, c, g, or t
  misc_feature (233)..(233): n is a, c, g, or t
attgcggcacagggcgctggcggtngtccggaccttgagcgcccggaacaccgccctgagtcaccccctaccgctgcccctggagcccccgncccgcactccccggcaccctcgcctgaccttcccgcctgtcccccaggcacgggcgaaacgcagcgctgggcactctggacttctacatggcccggcttcacggagccatcgagcgcgaccccgnccagcacgagaagctnatcg

SEQ ID NO: 529890 - DNA, 939 bp, Homo sapiens
cgcgggcaacacggccagatgtgcgactggaagactggctggcgtccgtgcgtctgtctgggccgttaccgccggggcacaagtgctattgcgcgcccgacgctcgccggccctgctgtggacgccagtcttgcggagtacggcaaccttcgctcaggcgctccagttcgtgccggatacgcaggttagccttctggtcaacggcctgcgtgtggccttccgaggcagtcctctctagcccacttgctcggtgggacgctgtggtattgactgttgcgcagctctgttttgagcactgatgaagactattggggcatcgctatcttaatgcgagcatctgtgctttcagatggtgaacaacagaatcgagtctggacagtgccctggcatgaaggatcgtggatgagcagtggcgcgtgtccctattcttaagttgcctacatacatcccgaggagacatcacaatgactttaactaatattacaaggcccgtctgtcgcaaggattctagctcggataagcttgttggtagctccttgggtgacattgtgctagaacttgtgatgtcttggaaaactcacgagatcgaggaatggaaccgtgatgtgatcctgtgggagatgcatgagaaattatgcatctatgcgagatgtggtctttaactacctgcatgccacagcattccagggcacacctctagcccaggctgtggaggggcccagtgagaatgtcaggaagctgtctcgtgcagacttgaccgagtacctcagcacacattacaagggccccttcgaatggtgctggcagcagcttgaggagttgagcaccagcaaatgttagacctcgcccaggaacacctcggtgggattccatggacttatgcagaagaacgctgtgcccacttttactccatgcccgttcaacttggcattgaagatc

SEQ ID NO: 529891 - DNA, 146 bp, Homo sapiens
ccgtagagggttggggatatgtctgcagtgagatgaggcgacagctaaaacggccgggtcgagaaaccactgggcttttgcatgggtgtgtcctgggtttgttgtaataactgctactggaaaactgtgctaaacccaaaaacagg

SEQ ID NO: 529892 - DNA, 161 bp, Homo sapiens
cgcaatactattagttataataaacaaccctcaccacgtacatactcttcctaggaacaagcatatgagagcattctcccctgaaactctacacaaaatattaggtcaccaagaccctactactaacctcccggtactgatgaattcgagcagcatacccc

SEQ ID NO: 529893 - DNA, 267 bp, Homo sapiens
ctcgagctcggaccacagtgtatatctctgtacactacttgcaggctgagattgtccaggggcaggggtcatgcctgtaatcccaacactttgggaggccaaggtgggcggatcatgaggtcaggagattgagaccatcctggctaacacagtgaaaccccgtctctactaaaaatataaaaaaattagctgggcttggtggtacgcacctgtagtcccagctactcaacaggctgaggcaggagaatcacttgaacccgggagacg

SEQ ID NO: 529894 - DNA, 132 bp, Homo sapiens
tacccgagagggagacatggtgaagagaagtaatcaccctacagtctcattcccttaggaaggcagtttaccattcaaagagaagagttatctgtcagtaaccatattacaaggcagaaggctataggtatc

SEQ ID NO: 529895 - DNA, 808 bp, Homo sapiens
attaagatcttatggtattggtagcagatcctactctagagggtagattctatttatgatcgttggtctgtgggaacttagaatacagatgaaactcttctcttattatagagtggagtttatagagtaaaaaataaatagagatcccaaagccaaggaatgcattcagttaaggttctcataccaatgctggcctgcttgcattgcacattctgtatactaatgtaaacatttgttctacctgaaaatcaaaagcaagatgtgagctctttggctaaacctgcattgatatgtcaggcagcaaaactcagtgttgagattatcaaaagccttctaatatgcccttataggcaatcctgaagcattggttatcatcagggagatgtggccaggcgggtattccgggctccccctccaatctcctttatacacccagccccactcctcagccctcacttaattttagattatataagtagcctgtcaggaccaggcaagaggtgcctactggagggtctgggtagaagcggtaactccattcctttcccttggggtcccccaagaggtaataaaaacgtacctggaggagaatacgtcacggtgattgacactctgctgtatctctgactggtgatgtaggtgcagacaccgacatggccttgcgtagatcctgggggtatcagtaactgaagcttgacacaaggcattcttccctcgaagcaacagcatgcattaccaagacataagactttaactaatcgtatggcctagattagacaaaaactggttgaaagtcaaccatcggtca

SEQ ID NO: 529896 - DNA, 148 bp, Homo sapiens
ttatccccacacgtggcttcactggtggggggctgtgaccccacgggcaatcctgctacccgggcacgtttgtaccttgtgagaggtcctcctcagtcttgcgcgatgctcgtctacacccatgagccccacgtgcaaatcccatggc

SEQ ID NO: 529897 - DNA, 100 bp, Homo sapiens
ggtgatctagaggatcccaactcagtgtgcgagctgctggcgcccgtggcttgtgtgtgtggttcccttctggtgccctactcgggaggttgttgctttg

SEQ ID NO: 529898 - DNA, 836 bp, Homo sapiens
  misc_feature (123)..(123): n is a, c, g, or t
  misc_feature (412)..(412): n is a, c, g, or t
  misc_feature (421)..(421): n is a, c, g, or t
  misc_feature (441)..(441): n is a, c, g, or t
  misc_feature (469)..(469): n is a, c, g, or t
gagacagtttgaagttttcaaagactggctctgctgttaagaaagtgtacttaaagcggaggagctaagccacctgccaaaaatgtgcaaaggacttgcagcttgccccactcatgcctggangggccaaggagattaagatcaagttgggaattctcctccagaagccagactcagttggtgaccttgtcattccgtacaatgagaagccagagaaaccagccaagacccagaaaacctcgctggacgaggccctgcagtgggtgattccctggacaaactcctgcagaacaatatggacttgcagtttcaaaagtttcctgaagtctgaattagtgaggaaaaccttgagttctggattgctgtaggattcaagaagataagtccctgcaagatggtgaaaggaaagcanatttatgangaatcattcaaacggaggtnctaaagaggtgaatattgcccttactanggcatcacaatgaagaacctggtggaaccttcctgacagtttgcatggccagaaaagaatcatgcctgatggggatctctgcctcgctttgtgcgctctgagttttatcaggagttaatcaagtagtaattaggcaggtatgaattctctgtgagtattctcataataacctggtttcccataattaattttttccacagaggttgtcagtgtcccctggaaatccggggtggtaccttgccccgctggattttaggcgaggttttcccaattcgcgttatagattctcggtgggacaaagaactctctgggaaagaactcttgggacaccggcaaggtacgcatgtttggcccacaaggtaaactc

SEQ ID NO: 529899 - DNA, 517 bp, Homo sapiens
  misc_feature (130)..(130): n is a, c, g, or t
  misc_feature (157)..(157): n is a, c, g, or t
  misc_feature (191)..(191): n is a, c, g, or t
  misc_feature (258)..(258): n is a, c, g, or t
  misc_feature (299)..(299): n is a, c, g, or t
  misc_feature (318)..(318): n is a, c, g, or t
  misc_feature (472)..(472): n is a, c, g, or t
tgaagtatagatgaacagccctgtcccaaggaagagcgcaagccgatcatcagcatcttgctctgtgcagattcagaccgtgcactccattgcactgtgagagggctcatcatgcttgtgatgctccacnttggcagtgtgtataacctctccactnccgagtgaacttggtttccagcatcaccagtggntctggaagtgtccatgtctcctattctggtatcagtgcctgtgtgacaccacccacatgccttctcnttcctgtgcccgttccgtgaaccacctgtaacttcaatgtnctgcctggatagaaaccanttcacaggagcagaccagtgaggttgtaggttgctgcagggtgctggggtctttgaacggatacacagctctaccttaggtttggactcgcctgctgcactgtgaagctctccacaaccccgtagttgtatctgcagtaagtgtccacctcggnccgcctccgctccaggaggtccttctggctgttccaggactcgtc

SEQ ID NO: 529900 - DNA, 110 bp, Homo sapiens
gaggaaagcagacaattaccctaccaagagggcgggagaacatacaataggaataagggtgaccgatgttaataaccaacatatgaagaactcaaagccaattacaaaga

SEQ ID NO: 529901 - DNA, 244 bp, Homo sapiens
agataacgttttctcacattgagtttagaagatctgccttgtcggggaagccaaggtttgtatgtgagagtttaaatctgatgtgaagctcaaaaaaaaaaaaaaaaaaaaaaaaaaaaaaaaaaaaaaaaaaattcttgggtaataatttttggtttcaccccattttgggattaaaaaagggcaaaaaaaagcagtcccacagaaataaaacaaccctcttattataaactggaccattcac

SEQ ID NO: 529902 - DNA, 891 bp, Homo sapiens
  misc_feature (16)..(16): n is a, c, g, or t
agaccctgatatggcncagccagggtggtgagagagtgtgagcacgtttgtctgacccacctctcggggcttcccctacgttgacacccgttgccgagatgggcctctcttttgggcccactcaaatttaaatggtgagggcctaagcacacctttccgccccgtttcccttcccgccccagttgtggttaccctgccggccctctttttacatctttccgggagtttatcttcaagccctccttacttgggggcataactcctttgggaacgatgccccccaaggggtttctgatatacaaacgctttcgggtactcggacgatcagtatttccgccctgcgggcccgttcaccaccgattccagatggcaccacggccccttggcattcgcaccatatgagaaccccccccacggattgcggggtgttcacaaaagaagccccgagtgcgtgagtgtatgggtgccaccagaagaccggcgaattgttgggatagatggagtacatccaccacaatgtttgggcgagaatcaagaacacgcgtactagaaggcaagtcctgtattaacacgatcttgacggaaaccccatggtgcttccgaagattataattacggttagaatatgtgcaatcccgtcccgcggctctgtgcgagggcaacaccgctaccgcacccacgccctcataatcggtctaacaagatgggcacaacaattgcaggtagtacccttagacttcaaggagagttgttcaaaactggtttcaccatggagttatgaggaacaacccattcttcaaatagcggccgtctcccctggggcgacccctcagagagttcgggacttggattatttcctccaaaaaaacccccccgtttttcatagacaca

SEQ ID NO: 529903 - DNA, 499 bp, Homo sapiens
actcaagacactggggctgtagatcaacccaacaccactcctcttccaagaatcatttggacaggttctttgggaggaactccttcgtcttttaaacccacccttttaaaaaaaaaagggcaccaaagaaagacgtgaagaaacctgtggctgcggctgcggttgccccagcccgggcaccggaacctggcaccttgccccttgccccagccaaacccaaagaagaaaaaatggacctctctgccattaagatcgagttctctaaggaacagcaggatgaattcaaggaggcatttctcctgttggacagaacaggtgattccaagatcaccttaagccaggtcggtgatgtccttcgagctcggggcacaaatcccaccaatgcagaggtcaggaaagtcctgggaaaccccagcaatgaagagctgaatgccaagaaactcgagttggaacaatttctggctatgatgcaagccatttccaacaacaaggaccaggc

SEQ ID NO: 529904 - DNA, 902 bp, Homo sapiens
agcggggatagatcttcccggtacccgacttcccggttgacttgttgcggatgatcgagggcagccaggatccggtgaacgatcacaagaatggctggagtcgatctacttgtgtctcaaaagatcattgactgcagtacgcttttgacagagatcattaccccagaaccataacgcgcatggactatgtatccgctgaacactcctggacatgagaggcctcgaacatccagggtatggactgcctattagctgacgaatccagcaaggctatgcgactgtggactatacatacaaggggcgagatgtgtggcaaagctggcttggtggatgactttgagatgaagtacattgcgctgacggtacccgtgccagaggatacctctattgcccaggtggatgccgaagaaaatagagaatgtgaatatctagtactgagtgggtgattctctcaaaggccagtgattgtagaatagtgagaagagagatggagaagatgagagaacgtgtaattccattttgatcagatgaccattgatggacttgaatgaatgctttcccagaaaccaaagttagatcaagaaaaagtatcccctattggcctgcggcaaccaattgagaatttatacacaattgagtccaggaggaagctctggtcctgtattacaaaatatctggacattaaacaataataattataccaaaaaaatgaagatgacccacaagtatctcgagttggtcttcggaccaaagggggttgatctttgaaagggggggggccggaaagcaagggttaagatccgcggaaggggagggataaaatttgcagagccctggggggacattgatggcgaaagctgtaaccgggcgatgaagttgtaactccggctcactgttcctgc

SEQ ID NO: 529905 - DNA, 204 bp, Homo sapiens
aaaaaccgggggtttttttttaaaaaaacccaggaaataaatctaggaaaggggttttttaggttttggggtgtttaaaccccaaaaaaccccaatttggccggaaccagggggtgtttaggtataattccaagggggccgaatggggaaaattcccccccgcccaaaaagggccatgaattaaaaggcctgcccctttttcca

SEQ ID NO: 529906 - DNA, 112 bp, Homo sapiens
ctgactctagagtatccctccgagttcgcgactactagcttgcgcaattgtacctggatttatcatgttgcccaggtaggtctggaattcctgagctcaagtgatctgccag

SEQ ID NO: 529907 - DNA, 380 bp, Homo sapiens
ataatattaattatacatgtaaataatatacatataatttgtaaaatactaatatatagtaataacacagtaagggaagatggatagagctgtagagacacagatttgtatgcactatcgatgctaaggtaatcataattcaatctattttgttataaatttgaattaccaattttagtgtccatgttagctataaatatgtaactaaaattttaaaaaaaaatcagcatgacagctgaatagatgtgcctgcattcgtcaatcccatatgacggaatgacagaattgaataaacagctaagactagactggactgatgaaagggagaagtagaggatagcaggggagaggagaggtccctgtggttattagaagcccaa

SEQ ID NO: 529908 - DNA, 1077 bp, Homo sapiens
  misc_feature (318)..(318): n is a, c, g, or t
gaatgagggcggcgacggaggtggtgactgatccggagcccggcttgacgggatggctggggcacagatcggaagttggtagttagggagatctgcacgaagtcgcgcatcacgctggtgcaacgagtgagccagcgtaaagtgcaagacaaactctcgtggttgccaggaacatctgcgaggcatcgattgcgtcgtgcaacagagaagactcttttgcacctccagagacgagtgatgactagtctcaagactctggtctggctgattgttcaatactggtgaggaggacgacgtatcgactgatcacatctgaanttactccatgacacagatagagtcgggatctgtcgtgcaccggttcagaagattcggttctgattccaggtggacttcagggttatgccatgcgggagatatggccagcttgatgcccatgttcgcgagcagggccaatttgtatgtgggactagttcgtatagtgcttcggaggaacacaaacgacaaatctgtagagagctatttgacgcgatgcaacccatccatatttcgtgacttttacatccagagttcctgccgactgggggcttatttactgccttgggaaaaccaaacaatttgttccatcactatcgtggtcagatggaatatcccagcgtgttctacagctggtcgacgctatggtggtaatcaagctaaattaggagcgtgcatgctgcaaaagtaccaatacggaattcgagataccaggtagaaccgtttaaataggccagaggcctggatcggtggaccttggacattgcgagggaaacgcttatatgcaatgtgggcaccgtgggtctggataatttccacgtggttcacttgaaacacacacagttgtgagtggaagccccagcaagaagaattgtggctaattccgagcttctgggtaaataaaggaatcctgtcgccacggttacaaacatttcattgatttacacgagtcctttctttgcgggtttacaatcaccccattaaatatggcgtcccacgaggcatttccctagggtaacacggtattaatggcaagctatt

SEQ ID NO: 529909 - DNA, 868 bp, Homo sapiens
ggagagaactagtctcgagtttttgatatgtttttttttcgaaatggagtctcactcatattggccaaggcgtggagtgtgcagggggtgcgatcctcggctcacgtggaacctcgtgccctcccgggtttcaagcaattctcctgtgtccctcagcccttccgagatagtggggactatcaggcacgcacgcggtcacgcctagggacataatattcttgtggatatatattgggctacaaagacggggggtttcacacaagtgtgtgggccacggatgtggctctctcaacatcttccttgaacctctcggtgatttccacacgcgcctctcagccctccccaaagaggtggcgtggcgacatccacgcggtgtgtgtgaagcccccacgccgggactcccggtcccctacgagggtccccgcgctttacaccacaagacacaacggtgtgttagacctcccagagcacaggggcacagcggaacctacacccctcttccccccattggcccctgttttcctgctccgcgcaccttctcttatcccgcgcgtgcactctctgggctctcttcttcgtgtggcgggacgccctctgcgtgtgtgtgcccccccaacttcggcgggaaccctcctctttctccccccccctgcttcccccccgtgtgtgtccccccccctttgtctgggggcgtcgcgtccattaacacttgtgctctcgtgctcttcccactgctttccctccccatccttagcgggcgccccattattctctgactgttccttcccgctcgcgacccccccggggtgctcctccgtgggcaccccttcggcacccccacgggcccctcctgggatatctcccctcc

SEQ ID NO: 529910 - DNA, 311 bp, Homo sapiens
tgttatcgatgccacctacacatgggagaaaattttcgcaacctactcatctgacaaagggctaatatccagaatctacaatgaactcaaacaaatttacaagaaaaaaacaaacaaccccatcaaaaagtgggcaaaggacatgaacagacacttctcaaaagaagacatgtatgcagccaaaaaacacatgaaagaatgctcaccatcactggccatcagagaaatgcaaatcaaaaccactatgagatatcatctcatagtggcatcgataaacaccggtgtttacaccaaagtggcatcgataaaca

SEQ ID NO: 529911 - DNA, 860 bp, Homo sapiens
gttgattccgccccttggggaggaagtctttattttcttcgggggacccccttcagtatctctcctgtgtgaccaccctcgtttgtgtggcgcccccccccctttggtggccaccccttcgtcgcttatttaggggctctcctcttgagtgttgcttgttttggtccgccccccctctctggagagacctcctccttgttgtggttcccgcccccccgttgctgttcttctgctctcgcccgcctgtgatgtgcgcgcccccccccggtgagggagttggtctgcccccggcgcggtctgtgtcttcttccggcgcccctcctctctggtgaggagtgggggtggtgagcaccccactcagatggggtgtgctgctcccccccacccgatgcttttttgttgtggcttttctactccacacagatagcattctcctctctgttggtgccgccgccaccacacaatgttgtttgccgtcgctttttctctcgccagccaccaacctctgtggtgtgttgtatatctctctctctctctcccccccccccctcgccgtggcgagagctgatgagtgttcccccccccccggcgggggagtgcccccgcgctcggcgggggggtctctccccgccggtgtggtgagtcccccccccgctcgggggagctctcccttgttttgcatcttcttctctcttcttctgccttctctctcgtggccccccccccgcccagttttttttctctccctctttgctcagagtggtcgtgcgcccccccccccccctctcccccccccctctttttcccaccctttttcccccccccccccggggggtgtcttttttctcccccctaaagga

SEQ ID NO: 529912 - DNA, 110 bp, Homo sapiens
gtgccactagaaacagtgcatcttataccttcaaaagctgttacctgttctttaaaaaacaaagttgcttgttacttgtcctttgtgttttaggtgcagctcagtggaag

SEQ ID NO: 529913 - DNA, 352 bp, Homo sapiens
cctgaagaatacagaaagctctaaacgagtcgcaagagtaaccttagataatggcaagagagattaaaaaagaaaatgtgcacaaccgggcataaacacattgtggagtcgaagacagatgacaaccacacgagaacaaccgaggaacaagaccagggcacgagtataccacacccactgacaagcctagcaaacaaacaggcacagagactacagtggctaacgaacgagaggaacatgacaacaacaagtgtacacccataccacacgcaaaaggagacacacaaggtcacccaagaaacccaaggatcaaacagggagcaagaaacacgcaccaagaatcaagccaggc

SEQ ID NO: 529914 - DNA, 1069 bp, Homo sapiens
actttgttttttcttttttttacgcaagaaaagggaggaagtgcgcggcagcagcggcggctgtcctgcgtctggtgatctctgcagcccgcgtttgtatttgggggtactttcccgggatagcccggtatcggtctggaacacgccacccggccggggttgtaaaagggcccgccgttgtgcagtgcaacccagaggggggcgttccccgcgccaagatggtgcccctctccaagcacgggaccgttaagcccaagaccgcgtgtggagagttataaaaaagatctcgtattttaagaaacttaggatggatgtgctgactctgtgagggagtacttacgataatcccgacacgtgggacgaccatgaggttgccaacccaggatttccccatgccaagggaccatactgcgtatctatagaggacccaggaggggactgtttaaggttgccccaaggtggtaaggcgagcttgagaggcttgtggtcctcggtgcccacgtgaacttcttgaagatcttcttctttaattccctgctgttcccggccagccaggatagcccctagggtgtccgcccagattaggtgagctgctgtttagcccagtttgtaagcccccaatagttctgttctcgttgataccagaggttcttctgaatatttctggaagttggtggttttagttttctggtggactggagagtgtaatacccttgaccaataccctcgttgtaaagtgtgcttaatagagaagagatcccaccctttctaaagcgtgccaggacccagggcccgtgccgcccttaattgaccccacagtgagcttgatgtgccctccaggaagtctttttgcgccagcgtgtgcccttgtgaaagaccccccctctcttcgcccccccaagcgtgcgtgcccttggcaccactgaagccatttcagactgggccaaacccggtagtcatcccagaccagttaattccccgggcttggttaagatgctggtgtgataaacttgtttggatgagactttactttaaacccccttaccataaacttggggaactacccgtc

SEQ ID NO: 529915 - DNA, 458 bp, Homo sapiens
acatctctgtgcgggttcttgtatggatacaccttttcaactcctttggtaaataccaagcagtgtgcttcgtaaggtaagactatgtttagttttgtaagaaactgcctgtcttttagaatggcgtaccattttgcattcccatcactaacaaatgagagttcctgttaattcacgtctttcccagcgtttgctattgtcattgtgggttttggccattctgataggtgtgtaatggtgtcatattgtcattttactttgcaatgccctgaggacatgtggtatggaacatattttcctatgcacacttgccatctgtgtgtcttctgtgctaaggtacctgttaaggtttttggccccttttttaatcaggctgttgtctcactgttgagttgtaagagttctttgcatattttagataacaatcctttatcagataggtcttttgcaaatatatt

SEQ ID NO: 529916 - DNA, 882 bp, Homo sapiens
  misc_feature (15)..(15): n is a, c, g, or t
  misc_feature (81)..(81): n is a, c, g, or t
  misc_feature (90)..(90): n is a, c, g, or t
  misc_feature (107)..(107): n is a, c, g, or t
  misc_feature (147)..(147): n is a, c, g, or t
  misc_feature (173)..(173): n is a, c, g, or t
  misc_feature (216)..(216): n is a, c, g, or t
  misc_feature (227)..(227): n is a, c, g, or t
  misc_feature (291)..(291): n is a, c, g, or t
  misc_feature (344)..(344): n is a, c, g, or t
  misc_feature (365)..(365): n is a, c, g, or t
  misc_feature (374)..(374): n is a, c, g, or t
  misc_feature (377)..(377): n is a, c, g, or t
  misc_feature (386)..(386): n is a, c, g, or t
  misc_feature (389)..(389): n is a, c, g, or t
  misc_feature (398)..(398): n is a, c, g, or t
  misc_feature (437)..(437): n is a, c, g, or t
  misc_feature (439)..(439): n is a, c, g, or t
  misc_feature (455)..(455): n is a, c, g, or t
  misc_feature (540)..(540): n is a, c, g, or t
  misc_feature (572)..(572): n is a, c, g, or t
  misc_feature (575)..(575): n is a, c, g, or t
  misc_feature (627)..(627): n is a, c, g, or t
  misc_feature (639)..(639): n is a, c, g, or t
  misc_feature (647)..(647): n is a, c, g, or t
  misc_feature (651)..(651): n is a, c, g, or t
  misc_feature (677)..(677): n is a, c, g, or t
  misc_feature (684)..(684): n is a, c, g, or t
  misc_feature (771)..(771): n is a, c, g, or t
  misc_feature (838)..(838): n is a, c, g, or t
agcagagaacttatncgcgtcatttccttttttataaatgtgaagaggttcgaactatcctagagagtgcccatctaactnaaaaaatgnaatggctttggttaggnttgcatcttcagtacatgtgaccgtgcccactgagcttanttcagtattttaatgtgcaattgaantcaggtgtccccactacgatcattacgagtaagcggtgagganaaatagagaanattaagtattgaacattatatagatgcagctttttgttctgcatatgaagaaagatgaggatanaggagggcattgaggccacgaagagcttcccagacacccacggccatcagatnatcttcttcctgcaggcagtnccttctggnggnaggagctcngtntatcagagnataaaccaggagcctgaaagcagtcctgtgtctctgccntnaatcagctgttatttnttctctccccaagaaagggaaataggtctcagcagtttctgccatccatcatgaatcaatgaaatcatttcattaaaaatttttngtatgaatgtgcaaaattgccaactaggagtncantgggaaaaataaaaaaaacttagtttgtcaacatgatccatagacgagatgntcttcatgtgtnccaaaggnaganaggtgagaaaaaggatctagcttggnctctgtncctcaaagacagaagaggtcaggaagtccaatgggcgatgctcctgtagataaggcacaaagcaggagagctgagggtgtgcaggtnccatgccctgcatcaccaagaacccttctccctggcttgaaatctttggaaattcctggtttgagtnacagagaagcattgtcatgggctcagtaaccctgccacccctgt

SEQ ID NO: 529917 - DNA, 1112 bp, Homo sapiens
ggattcagttgtgggacccggagctgctgacccagcgtggtggcccagctgaaccggtgacacatctgtgcatgtgcgttagtggctctgggagcctgctgatggcctgtgcctcgtcctagatgctctggcgagcctgtctgcctgctgtctgtccccctgtcccccagtcatgcaaacctgccgcctgctggaagagctgcccccgatcttgggctgttatcatccgattggcgtcctgccttcagggagccatggcggaaggcaacggagcagatccttggtaccctcgaatccagccacagaacctcaaaaattcgaataggcccctttcacagaatgtaggtcaactacaaaaatctttaaaattgccgaaatatcccatcgggaattaggcaacacaggtgtgttccaacagttgaaacgaactaccagtgagaccttcgccgggtatacgtgtgattgacggcccaacacaggttggaagattcatttgagccccagtggtccacacattgatgacccttgatcagctcaaggtacattgcttacaaggcccctttttggaactttgatgtagcattcccggtacagtttgacacacgacatgcaggtatagacaccgacgaaggtctatcataattgggctacgacgatgaaactataatacttatcgtggactcgccgcacaccaaagaaccagcttatcaagacattaacttgcgacaagaccatgtgtgtgtagggtaacaacgtgaccgtgtgcccagaaacaccctgggcactgcacacttcacagtgggaagttcccccaaacaattttggaacgaccgtgggcagtattacattaggcgaaaaaagcttgccccccaatagatggcacaacagtgggcgagttgccacacatttcgcacctgcacatacttgtgagacgcgcgttagacagagcacggcgcatgtgttacaccacaagttgaatgatgtggccatctattcaaacgacaaaagaaaattgggacaccgtatattgtcccaaatacacccatcaaccaagagtcgtgtactcaccgtttctactgaaattgcccagaaaagcacagagaacacacata

SEQ ID NO: 529918 - DNA, 165 bp, Homo sapiens
agcagaatgggccagtggatgggcaaggagacaacccaggcccccagggtgttgagcaggggacagacccagctgggccttcggattcagacaaaaagcttcctgaaatggacattgattgattcccccccttgtttttattaaaacagactattataaagctta

SEQ ID NO: 529919 - DNA, 650 bp, Homo sapiens
ccacgcgtcgatgatgtatctccacactagcagagaccagagatcgaaccacccttcgacatgccgaaggggagtccgaactagtctcaggcttcaacatcgaatacgccgcaggccccttcggcccggattcttcatagccgaggtacacaaagcattgaggttataagtaagacaccgtcacgcacgtacaatgcttcctaggaggcaacatatgagcggcactctccccatgagactcgtacactaagcatattttggtcaccaagaccctacttctaacctccctgttcttatgaagttcgaacagcatagcccgcgattccgcgtacgaccaacgtcagtacaaccgtcctatgaacaaaagcttcctagccactcaccctagacagttacagttaatatgaatagtgttccttcgccgaaggttaagcgccgccaaggtttgttcagcccaggaggttccatgtgcacaaaaggggtcaagtttaatccccccaccgccgtccgagaggaacgctacaaagaagaaagaaacgaagagggcaccgaaaggagaagaaaaaagaatacagacaagagacaacaaggagtaaaatgaacccgggggagggcgggcagacgacgaacgagcgaatagtacaacgtag

SEQ ID NO: 529920 - DNA, 577 bp, Homo sapiens
  misc_feature (329)..(329): n is a, c, g, or t
tggaggccatcaaccttttggtggaggccttgttttacgcctcacatgtgcttgggcattggtgggcctgggcttttaaggtggcctcctgccctgatcagggaccctccccgctttcctgggcctctcagttgaacaaagcagcaaaacaaaggcggttttatatgaaagattagaagccgggaataaccgggctttttaaatgaggtaattccccctgtaaaagcatagggattttggaaccacctgttggtggcttgggacaccagtggggccaagggttttttgtcccgggttcaaatgagatttggctttcccgggtttttccnggaaaacccctgtttggggttttgggggtttgggtgggaagaggcccatctgcctaaatgtaccctgatagctttccaaagcccccgggggcctggtttgtgtgagggtgtggacagtgggggccgccttgggccggtttgggttgccaaaatgccccggggtgttgggggggggtttcagccggccccccccccttttttaaaaaaggccccttttgcccttttcaaataaaaagggggggcaggca

SEQ ID NO: 529921 - DNA, 375 bp, Homo sapiens
caaacctaggctggcatacactgagtaacaagcaaaggaatctactgcagggagaaggcaagaacatggaggagtaccctccctagaggtactcccaacaggcctaaggctgaaggtggaactggaatgttgagacacaccttgtggccaaccaggtcccctactaagcacaaggttaacactgaaaggacttagagctagggagagtacaggctagcagtgcagctatgatagcattactgggggcactaaaggtaaccataacaacaaccaaacccaagcccgctcacaacactgactaacctaactcaaattaccctactaaaagccttagaaacaaaacagagggcagcctataccaaggcctaaatatta

SEQ ID NO: 529922 - DNA, 235 bp, Homo sapiens
acatccaagcctgtgataaactctctcaccctaaaacaataaaaactcttagtccataggagcatgcactcctaaccaaaaaaaaaaaaaatttgtccagaagcccctctcaggtttattctccaaaataactttgtctttgattggtggagccacttttcagtgtttcttttctctttctttacttcttacatttgggtgctgaaaccggggatgggtgtggggcgactaaata

SEQ ID NO: 529923 - DNA, 990 bp, Homo sapiens
cgggaaggagacctggtggggactggggcggggcagcagccttgcgaagccctaacgcagcgctggggaggggggcgtgccgaaatggggggcgtgtgtgtcagggccgcgcaagcggagatggaatggggccctgggctcaagactggtcacggggtggagtgctgcctggggtggaccgcgggaagtgcggtggctggtggctcggcggagagtgccaccccacacagacgccccgggaggagcgcagcccagcagctgctggacgcggtggaagcagcgtgccagacggcagactccatggacaccatcgcagcctgcgaggagatgttacggcagctgggcagcgagagcccggagcccggctgatggcgggaacgtctcagacaaaccatggaggcagcacccaccagaccggctgtctccgacaggaggcggctttccacacaggatgctggcgcatggagctgcggagcccttgacgatacccaagcagagtaccctgacttctcatcccatccccatggccgtgtgtctggactcctgaaacaaactcccttcagtaaaggggccagatcttacacttggcagagggatggtacttgggatctcagcatggaaatggaagatcttggtagaagattggagtacagtacacaatttatacttgagctgaaaagcaagtggatgtgattagaaaagtagaagacaatgaatacccagtatggattaacccacaagacattaggggagcaagaaaacacaaggcaagggtggcatcgagccagaacagttggaggtccagggcactgtgcatattgaggggggcatcaaggggatgggtgggttcaaaagttgtaccagtaacacatagtctaagagggagggcatatagaggcccgcccgacacacaagaaccatcccagagacgaagcgtttgtcagtaaagaaggaaaccgttgacgcaagaaacaacaagacagcaaaaca

SEQ ID NO: 529924 - DNA, 208 bp, Homo sapiens
acgacaaggcgatcccagagtgctgggattacgggcgtgagccaccgcacctggcaaactttttgtatttttagtagagatggggtttgaacatgttggccaggctggtctcttaactcctcccacctcggcctcccaaagtgctgggattataggcgtgagccagcacaccaggcccttttagttattttaaattagcatatcctat

SEQ ID NO: 529925 - DNA, 851 bp, Homo sapiens
actgccgggtgtggtggcttacacctgtaatcccagcactttgggaggctgagggggccagatcacctgaggtcaggagttcgagaccagcctggccaacatgacgaagccccgtctctactaaaaatacaaaaattttccaggcgtggtggtgggctcctgtaatcccagttactcgggaggctgagggaggagagttgcttgaacccaggaggtggaggttgcagtgaactgcgatcgcaccattgcgctccagcctgggtgacagagtgagactccgtctcaaaaaaaaaaaaaaaaaaaaattaaattaaattaaaaattaaaaattgaaaaaaagaaattacttgatccggccagttttcttgaccctgtgttggtggcttctcttacgggttaaaattggggtttagttttggggtttttccccactggtctggacttagtatccatttccctgtggttctatataagtcagttgcctggctcatccatctggctttctagcttccagttatttaatggctaatgggctcgtctcccattcctcttgggtgttcgatgggtttcacccttcttttaaattcccaaaaagtagggtcagggagacgccttttatccggctttatcacctctttgagagatgtctgtatcatgcttttcatccctgttggcaccggtgacgaactcttgtttcccctgtttggaggtggccattgccctgggagggttgtggggcttggatccgagaggctgggttggatctatgcttacagcgtgttacctggggccttttcctaactcccccataaattttatggccctagcatttggttagggcccccggtggc

SEQ ID NO: 529926 - DNA, 480 bp, Homo sapiens
gcgtttaaatagcgacgatccatgcagcgtgtttgaatgcagtggattccatgcagcctggtaaaatgcatcctgattgaatgcagtggattacgtgcagcatgattaaatgcagtgaactccgtgcaatgtggtaaaatgcatcctgattgaatgcagtagattccatgcagtgaggcccaatgcatcccgattaaatgcagtggatttatgcagcgaggaccaaagcatcccgattgaatgcagtggattccatgcagcgtcactgaatgcagtggattcgatgcagcgtggcccaatggatctcgagagattgcagtggattttatgcagtgtggtgcaatggaatttaattgaacgcagtggaatccatgcatcgaggagcaatggatcccaattgaatgcagccgattgaatgcagtggattccatgcaggcgtcattgaatgcagtggattccatgcagccgtcggctacatta

SEQ ID NO: 529927 - DNA, 278 bp, Homo sapiens
ttcttcctctgcttcgtctactcattgtcagacctcctgctccccattttcctcattagcattcccgattagcaggggcgtctcatcccatggaactgcctcttaccagaacttccttcttctacctgaaagtccttggatggtgattacagagagctggtgtctacggactagcgtctagacataggtggggcacgaccggtgtatccgatgcaggggcattaaaaagcaacagcgcagcagttccaggcaagaggccagcacaaatgggcagcaga

SEQ ID NO: 529928 - DNA, 989 bp, Homo sapiens
ctcctttaatctctccacccttatcacaacacaagaacacctctgattactcctgccatcatgacccttggtcatactatgatttatctccacactagcagacgagccacccgaacccccttcgaccttgccgaaggggagtccgaactagtctcaggctcttcaacatcgaatacgccgtcaggaccccttcgccctattcttcatagcccgcacataacacaaacattattataataaacaccctcaccacttacaatcattccgtgagtgaacgaactatattgacgctacatcatctccccttggaacatctacactaaacatattttgttcaccaaagacccttacttcgtaaaccatccctgattctttaatgtaattcagtaacagcgataccccctggattcccgcataccgacccaaactcaataactaccttccatattggaataaatacctttcctaccacctcactcctacggcctacttacttaatatgatattgtctctcactacccacttatcggaaatctccaagcagttccccctcatataccctataaattacagacacaacagagaacattacaatcctcattactatttctagcctaaacaaactcaaaactacagaaacgcactcacagggcgcggtcataaatccatctcctccaggagtgcaaactctattcccactaataagcttttttgatagactgtcctacgccagcctcgctaacctcgacatttaacccccactattgagccttactgaagaaaactctctgtgctagtaaccacgtcctgctgattcgggtatgcaccctcctacttagcgggacgacaacatactggtcacaggccctcaaagtccctctacctctttagacgagacacacaagagggtcaagtgcacccagcgataacaactaaaaccttcttccaagaaaaacctcatagtttaactacacatttcccgggagaac

SEQ ID NO: 529929 - DNA, 663 bp, Homo sapiens
  misc_feature (489)..(489): n is a, c, g, or t
acaagatcagaagaggctgcgtgatcaccatctcgggacgcatgagcttcacgagacaactaagtccatggagatcgaggtgtgggtggacgccgaccctgtagtggacagcatctgagaagcgctaccgggccgccagtgccttcttcacctacgtgtcgcatgagccaggaaggcgggtcgctggctgtgccccaggtggtgcccgagagcagaggacgacgaagaagcgctttgagcgaaggcatagggcgagtacctgcagatgaaggcgaagcggacgagggctcgacgctggagtccgtcagcgccttagactctcgcatccttcctgcgcactggtgcctcgaggtagccatggtcatacagggcccagttgttctcatgtctaggcattatgaagttcgccccgccttgggccataaaccactaattgcagcattagagcagctgtgtgtgtgtcatgaaggttttcgctatcgacagtgnttaaccgtgtagcgtctcatcctgccaagacctacacaccagaagcttgagtttcatgatcgatgtccaagtatcaatgctacgacagtgttgtcccgagcgccgggagggcgtcgggcagaatagcctcgggaatgcttcctgagctacgctgtagggtatgggaagaagcca

SEQ ID NO: 529930 - DNA, 177 bp, Homo sapiens
acgtgagtgaagcctgacccgagctagcagcactgcaccgcctagaatctactctttcctgtgtaccaccctgcgccgctggactcacagctgtgcgatgagaggctgcacaccacattcaacaaagtggcggagtgtccaacctgggcagcagcacaacatcccaactggcagcaa

SEQ ID NO: 529931 - DNA, 100 bp, Homo sapiens
  misc_feature (95)..(95): n is a, c, g, or t
gaggatccccctgtcagtcgttcttggacatgtggtaagaaaggcaatgtagttgtagggcaaagggaacagtgatttttacgagtgtggaaagnctcta

SEQ ID NO: 529932 - DNA, 245 bp, Homo sapiens
aagctgtcattcttgtggtcgatctctagcaggatccccgcaatctatgctcgcaaggaactcatctcctgtcaacaatcttgagacgagctcttacaaccagatccttcccacatatcaagccttcagaccagaatacagtcctagccaacatcttgatcatagcattcttagagacactgaaccaaaggcacccagcgctactcataccagagtccagacctacagaaactacgaggctattg

SEQ ID NO: 529933 - DNA, 120 bp, Homo sapiens
ccagactcaatgtgtgtatatatatataaagcaaagagccacaccacggcgtggacagctgatatttcacccagctgctggcttgtgggtgtggctctttgctttatatatttatacaca

SEQ ID NO: 529934 - DNA, 973 bp, Homo sapiens
  misc_feature (38)..(38): n is a, c, g, or t
  misc_feature (97)..(97): n is a, c, g, or t
  misc_feature (120)..(120): n is a, c, g, or t
  misc_feature (122)..(122): n is a, c, g, or t
  misc_feature (135)..(135): n is a, c, g, or t
  misc_feature (440)..(440): n is a, c, g, or t
  misc_feature (557)..(557): n is a, c, g, or t
  misc_feature (590)..(590): n is a, c, g, or t
  misc_feature (610)..(610): n is a, c, g, or t
  misc_feature (619)..(619): n is a, c, g, or t
  misc_feature (709)..(709): n is a, c, g, or t
  misc_feature (723)..(723): n is a, c, g, or t
  misc_feature (732)..(732): n is a, c, g, or t
  misc_feature (759)..(759): n is a, c, g, or t
  misc_feature (796)..(796): n is a, c, g, or t
  misc_feature (798)..(798): n is a, c, g, or t
  misc_feature (814)..(814): n is a, c, g, or t
  misc_feature (823)..(823): n is a, c, g, or t
  misc_feature (837)..(837): n is a, c, g, or t
  misc_feature (911)..(911): n is a, c, g, or t
  misc_feature (956)..(956): n is a, c, g, or t
acacggcctacaatcatggcggaaggcgaaagccacanctcacatggcagcagaaaagacaaaaaaaggtagtcatcttttagtaaagaaacctganactggtagttggcttggagccanangatcgcttaagtncgggagttcgagatcagccaggataacaaattgagaccccccccaactttaaaattaaaaaacgaaagaaaaaatagctgggttttgtggctcataccttttatcctagcactttgggaggccaaggcgggttgatttccttaccccaggagttttataccaacctgggcaacatggtttaaaccctttttctactaaaacataaaaaaaatcagccaagttttttacccttcaccttttttcccatttacttgggaggcttaggcacaaaaattcctttaacctgggaggtaaaggtttcaaanatcatcccactccactcccacccttggttacaaaaccaatactttttcaaaaacaacaacaacaacaacaacaacaacaaaacaaaacaaaaaaaacctctcaaaaaaataaaaaanatttaaatttaaattaaaaaaaaaaattcttgntcttattgctcacacctgtnatctcagcnctttgggaagctgaggcagggagatcacaaggtcaggagatagagaccatcctggccaacatggtgaaaccagtttctactaaagaaggnacgcgccttttgtnccagcactnaggaggctgagccaggagaattgcttnaacccggggaggtggaggttgcagtgagccaagattntnccacttcactccagcntggcgacanagttgaactccgtntcaaaaaataaaataaaataaaataaagcaaaaatataaaatgttaaaaaaaacaaaaaaagggaaaaggagcngattgcctttgtgagtaacacttggtatttctgacactatttganaaaaaaaggaacactta

SEQ ID NO: 529935 - DNA, 654 bp, Homo sapiens
tgcactggttttggaggcgaagtttgaaatttaattccagttttgccacttgctacctgtggagtcttgatcaacataatttatctctgagtctggttttctcatctgtgaaatgggaataatagtaccagaggctgctgtgaggtccagataaggtcatgtgagacggttggcatagggcctggcacatggttggtgtgtggtcaagagtaactcttctagaaatgctttttcctcttctgccagagtgagtttgtctgtctttcttttctgtcctttctttcccttctttcccttccttcgttccttccttccttctttccttccttttctttctttttctttctttcttccttctctttctctctttctttcttttctttctttccttactttctctttctggcaggatcttgctctgtcccccaggctgtagtgcagtggcatgatcttggctcactgtacacttgacctcactggctcaagtgattctcccacctcagcctcccaggtagctggggctataggtgtactccaccatgcctggctaattttttgattttttgtagagataggatcttactttgttagccaggttgttctcgaactcctggctcaagcagcttctccctccacctcctaaagtgttgggat

SEQ ID NO: 529936 - DNA, 725 bp, Homo sapiens
  misc_feature (216)..(216): n is a, c, g, or t
  misc_feature (700)..(700): n is a, c, g, or t
  misc_feature (705)..(705): n is a, c, g, or t
ctgggaggaggagtaggactggaaaggaggtgaagaaggattttttacttacatttttatgtgtgttatataaaaagtaaaattaaggagagaaagattgagatgtcaccttttctttaaatacagacaaatgtagttacagtttgagagtgatagggacaacttagatttctttagataagggccaccagaaaggtgaaggaactagaaatcacnctgtataaggaatgtgagattgaggttattagtgtttgacctggagaagggaaatgggagtggggacagagagtgctgaggaggcctggaaactgaaatgaaaatatttgaaatgctatcaagaaaaagatgtgatttgtgccatgttgttataagaatagaactggaaacaacagtatacagttaatacaattgtttatgctataaaccagtggtccccaaactttttggcactagggaccagttttggcgaaggcagtttttccatggactgtgtgggatggtttcaggatgaaactgttccacctcagatcatcaggcattagttacattctcacaaggagtacacaacctagatcacgtgcatgcacagttcacaatagggtttgtgctcctatgataatctaatgccactactgatttgatgggaggtgaagctcaagcagtaatgttcaggcaagctactcactttctgctgtgcggnccagnttctaacagccaggggctag

SEQ ID NO: 529937 - DNA, 207 bp, Homo sapiens
gggggggcccccctttttttccccccccggggggggggggttttttttttttggggcccccccctcccccccctttcccggggggggggggggaaaaaaaaaaatatttattcgaaagaggagaaaatagttaagtttgtgtagtgaaaaaagataactaaagtaaattatagaaaaagtgatattaaaaagaagaaaaaaaaaaat

SEQ ID NO: 529938 - DNA, 1155 bp, Homo sapiens
  misc_feature (226)..(226): n is a, c, g, or t
ggcgagccaggattcccgatccagagaacgatggtcccagatgggatggagcccgtaaggcgtcatcgagagtaacatggaatgagattgttgagcggctattagtagtgacatgaacctctcggagtcccattcatccgaggcgatctacagcgatatggtctcttgagacaagcccgtctgtgcatccagccaggcgagccagttctaccgttggtatcaaggnggttatgcactgctgattgcttgcaagccccgaagtcgtgggaacgtggtgagaaacggtcaacgatatggcgcactactctgaatatctggcaggctacgagttgcaccacttaccgactcgtaacaaagtccaccccagagcccttgggctccgtaggctacgcacagctcggagcacatttgcgccatcgagtcgagaagtacgatgagacaggctgggctccatgggcaacgctaggagagaactagccagctggagactgacgcgtcgcgtgttacatgcgactcgtgatagtccgcgcggggcacccgaaacgatgcggatggcgtagaatgcgtgcagacaataggctcgccatgcgactgggaaaggcgtcctcgcacactcaatcggtggggtacgcacctgtgggcccggctgcgtgctcatacgaagtactggcgtctacgacccggcaagatagcgcatgttgcgccccgcaagagtaacacttcagacggaattgcttcatgtagactggagaacttcgaaccgcctgaaccggaacccttggtttacaagcgctgctggcggaagatcccacgaagtggcaccaccaagggaacttccttaattgggaacctatgttagttttcgccaagagaatatcgggcgtaccacacagcacatgggctaagaatgcgaaagcccactaatgagagtttaaggttatatattgtgggccgttcgaattcgaacggcagcccagtcggaaaacgtgggctccccttttttccatttggaaactttgcttggcccctcggaaagggcggagttggaactgcgcaacatatctgaaacaccgttatctcccacatggcaacggggggaagacccccccaaaatttctcggggaaatttcaattttggggtcccaaaggcaacac

SEQ ID NO: 529939 - DNA, 943 bp, Homo sapiens
gtggggccgggaagttccctttctctgcaggtcagaagtgctgtcagatgcgtggttctccagactcccagtgtctgtccgggactgagcaaagtttggtcaagtccgggcgctttgcaaccgggccgtggtgtgctgtaccactcgggtgatgccttgcattgccatgccccttgctggctcttgcccctccatgactttggtgtgccaactgagcacgggtgagtgcacaaaggtgcttgttgaaaaacggcgggggcccttgcaggttccccatggcacggatatgcagtgcattgctggtggacaaaaccttgttcaattggcagcaggaggcaggatagtggtcccggtttggaaaaggggctggtccacctgggtgaaagacccccacgttttttgagcagcaacatgggactgaacttggatgtggcccttgttggtcgcctgtctgggtttcccccaagtgggagtccccaccctgtgggtggaagttgagaaacctctttggggtggtttttatcccaaggcccccgccacgaatcgtgccaaccccaattgggtgacccaatccatggtaaaacaacttttccgttccccttttcaaaaaaccccgggtagaaaagggtcccccaagaaccttccaagccttatgaacttctcggcagcaaggccgaatttgttccacgcggattgaaccctgtgactttgcggggaaatatacgcgacgactttactccgacatcccgggtggtactacgtactttccccccttggaagaagcctggagccacttccctcaagtggaccaactgttgtgccttgttgcgaaaaagggacagtaaacccacattccaggtgtctccccttggacaacagctgggttctcgggcacctcatacaactggaaagcctaccactcctactgggccatttggttcag

SEQ ID NO: 529940 - DNA, 334 bp, Homo sapiens
  misc_feature (81)..(82): n is a, c, g, or t
  misc_feature (103)..(103): n is a, c, g, or t
atccctgcccccagggggagtgggattgtttccgcccctgtgcctaaaaaactggttattaaggtggggtttaaagattgnnaccccccagccgggggtgcantgcccccctgggaaatttttccaggcccccttttatgcccttttttaaacccaccgggccctgcccccccccctttgggagggggatggatttcccaagtttccccattagggggtttttgccccccttgtcaaaaccccccccaaagtttccgggcaggggggtcagggtccccctgtgggtcccacaaaggggttttttaccaaaaaaaaaaaatgaatttagggtgga

SEQ ID NO: 529941 - DNA, 1170 bp, Homo sapiens
tgaaaaaatccggggggcccagggggtgggtttaaaccccccttggggggggtgttcgatctctctctctctctctttttgtgtgtctctataaatttttgtgtgttttcgcgggttctctccgaagatgtggtgtggggaggggggggggtgcctctccatatttggtctccctccgcgacggggtatatgggaggaggtgtgtctctctctctactctatatatatagagagactgattttcgcgcgctctctcgacgagagacgacgagagagagtgctgctctctctacacatatactctagagtagaaatatatatcattatatatatatatatcgcgcgcgcgtggctgatatgagagaacaagagagagagatgtgacgcgcatcgacacagagagagagagagagagagaagagtgtctacaacagagtgagtgggagagagatgcgcaccggcgagagcgagagcacccccacgcgagaagagaacagcgcggcgggagagagatatactctcgcgagagatagacgagcgcgccacgagaaagaagagtgagatgtgctgagcgcgggcagaaagagaaaagacgtcgtaatagatatcatccttctcagcgccgccgcgacgaggacgaaacaataagaatcacagaacaaaataaggcgaagagaaaacaaggaggagtaaaatataggtggaggaggagtcgaagaacgaaggaagctgatagatgacggggacactacacaaggaaggggggaggaagtcgtgaacccgcaccggcaagagcgggagaagacacaagaatgaatggaggcggccggcgcgcaacaacaacgcaaccgcaccggaagaacagaaacagaagggaacgacagaacgcaccccccgccctactccccacatcaacgagagacaggaagaaggaagggcaggcacgaaaggcacaaaaaaaacgacggacgcgacaggccggtcggcccacaccgacacatacctgagtaggtgggagaaacgcacgaagggcaggacgcacacacacaacatagaaggatggacgataagatgagaagaagaaaggaggaagaacacacccacaacacaacaaccaaccacaggacaggaggatcaacagtatgaacgacatgcgagggaggattgata

SEQ ID NO: 529942 - DNA, 139 bp, Homo sapiens
ccacttccacctttacttaccagacaaccttagccaaaccattttcccaaattaaggtatggcgatgtgaaattgaaacctgtgcgcaatatatatagcatcgcaaggaaaagatgtaaaattatactccacgcataat

SEQ ID NO: 529943 - DNA, 369 bp, Homo sapiens
agcggggcttggcgcggggcggggcgtgcgcaggcccgcccgagtctccgccgcccgtgccctgcgcccgcaacccaagccgcacccgccgcggacggagcccatgcgcggggcgaaccgcgcgcccccgccccgccgcctctggcctcggccctggccccggggcgtcagtcgcgccgtgtgtaacggtggagcaggagagccgtgtaggaggacccccgggcccgccaagggccccttgaagtagccgatcgcaactggaactatatcgcttggtggtggtcgggctcccgggcgggtgtggcgctagcatgtgcgctgacgcatcccagctgactaccaggaatccacgtttgtaggacggactac

SEQ ID NO: 529944 - DNA, 231 bp, Homo sapiens
ggtcggaccttgtgtgtgtgcggtggtgctcgcgcaggatggacgcgaggtgtggcggtgggtgtgctccgcccagtcgtgcagctcctccttgttcgctacctcccttccggcttccttggcgaagaccaccttggccatggacacatgggcgacctcctccatgtggatcgcttccatgtgtccctcgcagaccttcatcaggacgtcccaggccttcctggtgaggat

SEQ ID NO: 529945 - DNA, 156 bp, Homo sapiens
cctattttttgaacaacaagagacatttctctaggagtttaagccagtcgttcatcatgttgtttcagggaagagtatactctgaattataatgtaatacccagactaatttatctcatcatggatactatttactataatttctggcctagctag

SEQ ID NO: 529946 - DNA, 548 bp, Homo sapiens
ttggggtcccccaaaaaaggttaagaaaaaaaggttttttttcccggcgggggccttaaaagttttttttgggtaacccctttggcccccccaccaaaggggggcccctccccggggcccccattttaaggttttttttggaagcccttgaaccccccggttttggggccccagggggggtttttaaggggggggggggggggccctttaaacccagggggccctccctttttgattttaaaaaaaggggtttttttggggggggaaaggggttccccccggggggccgggggcccccaattctgggtgaaaacccttttttgaaattaaaagaaaaggggttttgggtccctggggtttcccgtttcccaaaaacaaaaaaccctggcttttttcccctggggaattgggggccccccaccggaaaataaaacccctggggggggggcaaaaaaaagggttttaggtaccaaggcccgggcaaaaattttttccggggggccccccttcccccaaagggaaaaaaaaaagggggggcccttccctta

SEQ ID NO: 529947 - DNA, 250 bp, Homo sapiens
aatcaccagaagaacaacctctaaacagagtcaactataattcataactccagagattaccagatgccgaaaggtcacggcaggaatcttactaacaggaaccaagaccactcaccatcaccagaacccagcacacccacttcgcccagtccagggaaccccaacacacctgagaccagtggtcctcatactccacatgaccctcaattctaatctaactgcattcgccttttgttttcaaagtagacgc

SEQ ID NO: 529948 - DNA, 342 bp, Homo sapiens
ctcattcctgcggatctgcatgacaacattccgtggagcatctctggctcaggcgagtattctgaccatgctgtgagagctctgtctccagattcttgtagactgagcacgcttgagtctctgttggccagcagaatccttcccttcatccgctagttcttcgagctttgccaacagacagtcacctcgatcagcagtttgagcaacattctgtaaatgcggcgttaatacctgctagcaaacaaaagcagttcctgcgcataaacgtaagtatgtcctctggcaatcacataggagtacatagtcagacatgtctcctcattgtcatgtagagcagtgcac

SEQ ID NO: 529949 - DNA, 615 bp, Homo sapiens
ccacggacacagctgaggatcccgtggcatacatcgtaacacttaggattcagactaaggatcctctccacacgctgcctttgccacgctaaggtgctgtacgtcacgtggagtttgcagacgccatggcaagaccttcagcactgcttaccaccattgcatgcgcaattgatagctatactcaacgatcagccagagacctgtgactacccgaaaccaatgtgcaatacattcatactgctgcatgtattgattgagctaactctggaggtcccctgactaacctggctgaagaggtgattgtagtgaacaccatgactgtcacaggtgaaatttccatggccatacattatgatcggcttcgagagttcctgctactaggtgtgaggatggtgaccctgagtcccagcatccttgatgaactacagctatgggaacaatggtttccgatgctaatcatgatgaactcatccatattgtcatcctgggcttcccctgcacaccgggctgcttttgggccctgttgatgcgaattttgccatcgtggagcagatgtacccaacggtccgaaatgttaatgaacttgtcaaaccccacctcgttggcgtgccgccg

SEQ ID NO: 529950 - DNA, 375 bp, Homo sapiens
ataaatatacattgaaggtagatttaagggaaaaaatagaaggagataagctcaggaacataatatatacatcttgtatgttttgatgacatagaaataaattactaatttaattaaaattgaaggagaatagagagaaagggtaaaaatagaaaaaagttcattgattggtatataagcaataggtgagagtcaaagaaaccattaaaaaatggcaaaccagctgcgccaaaggaaaagtttaaaaaaaaactggcagaccaaggcaaaagtaaatttttaaaacaggggacacagaccccatctcattaaaaaaaaaaaattaataaaaatagccaggcatggccgggcgcagtggctaacgcctgtaacccc

SEQ ID NO: 529951 - DNA, 430 bp, Homo sapiens
gcggccgcatactactactaaattcgcggccgcgtcgacctaccacgaactggttgacgtcggattgccgttggttcttgtcaacggctactcccccagcattacggttccccagatcagtgacgacgatgtatctgccatggatcaggccgttgcgcacttggttgggttaggtcacacgcacctaggtctagccatcggtccgcgacgatacgttccggtgcaacgtaaggaacagggtttgcgggctgccgtggatcgtcatctcgagggacggggcagggtcaccgtcagcaatacggtcttctctgttgacggcgaggctcgtgctgccgttgatgtgctcgggcaaagggtcaacgcccttaattttgggggttccaacctgttggccttgggagctattttcgccgcaagggcgcaggggatt

SEQ ID NO: 529952 - DNA, 925 bp, Homo sapiens
ggatcccctgttccagcaaaggcatcaagcaggtccacgtagatccagtcttgcatgggacgcctggagacggtgacaagcagtgctgtgcacatatgtagaaaagaaatccaagcaagcatagagcagatattcagccgtctagaacgtctggagatttgtccatgctaggagccgcccctaacaaagaggcaaaatgccagacttcgggttgtaagcagttagagtatgatgtccagcacctggagactgtgctcagaaacttaccagcatcggcgtccggattgcaccgtggagtcgagcaggagaatgacctgcgatgaaaggagcggctgtctcgaaccttcaacagtagcgactcggatagcatcataacaactggacgagaatgactggagtgtacactccatcgcgtccagaaatgttcaccaggggcactggtgatgaccgcagtgatgaggaatgggccactagtattctaagatggacatgagcgagccagagaccgagctagaaggggagtcagccgaagatccttggacattgcgaacatgcgtggggcttgtccagcaccggggatgcggctcatcgggaagcgggcgtttcaggccaccgtactgaatgatcggtgggatgctgctgacctgtgtggcatgtcctcgggtgcagtacctgacatgagcagcaagctcaagggggggaccggatccacagctggaagggtgtgtgcgtgtgcaacaaaggggccaagggcgacttggaggtgccgctaccggcacacctgcgggggccacacaacgcagacaacacgggcgaccggcacaccaaaggcggcgcggcgggaagacggaaaggaagggacaaaggcgggcaacccgcgtgacacacaccaggggccacaagagggcgcccaccacgcggcact

SEQ ID NO: 529953 - DNA, 111 bp, Homo sapiens
taaaaatataagaaaatgcagcacaatctgatttttacttggtaccactttcataaatataaagtaacttaaaatatttgttgttgttgttgttcttgttttgccagttcc

SEQ ID NO: 529954 - DNA, 186 bp, Homo sapiens
catatgataaagagaaatagggacaggagttatgtagcatcaagtacttagttaagcactaaccaatccagggcagcggcaagggacaggactatcaggataagcaaaggagaaacgggggcgtggggtagccagtttcagactaattgcttcatgtacattcctactagctcctcctagaggtgt

SEQ ID NO: 529955 - DNA, 492 bp, Homo sapiens
gagttggaaccgtggagatgcggaaggaaaccccacccgccctagtgccccccggcggtccgtggagtggagtcttacccccagaatgcgcccgccgtgcctggcaacggccgttgtaggctgcgcgctcccggtccgatgcagtcgcgtctcctcggggtcctccaccctgagtgtgtggcgctgctgggccggctcctctctgggctttttcaagggacccctgtgtccgcccccaatcgaaggcttctgctccgcggcagtccgagacggcaggctgggagtggctgacctcacttgggctggggagagaggtatgctagtggcctccgattcaggtgctgtttgacatgtgggaactagatgagaatgagacacttatgtcagccaagttctgcaagtatgagcatgatgacactcgttgtctacagtcagggtcttgagctctggcacacaagctgtcagtggtagcacaccgacatctgcatcaag

SEQ ID NO: 529956 - DNA, 286 bp, Homo sapiens
aagagaggaatagcacctcgtggactgtaacgttttacgttttatgcgattatcgaggctctgcatcttaacaaagccctgtgcttgggcatggtgtggagtctaatactaatgtagcagatgatatcatttacggcggtgagaccctttgtgacagtaggccttatttctcttgtccttccttacggagagcgattggaagtagatagaaaccgacctggatcactccgtgtctgaactcagatcacgtaggagtttactcgttgaacaaacgaaccttaactag

SEQ ID NO: 529957 - DNA, 988 bp, Homo sapiens
  misc_feature (459)..(459): n is a, c, g, or t
agcggagtaacgtctttgccccgggccgagaccgatccacacaccatctccctgtgcctccggttcccaatcttcgcattctctgctagacccatcttctcagtcggcacgctcgccgccagccgcgagctgcccacaagatgtcataccaggtccgaacgtgactgccacttgcgctacgtatatcagaagcaccttcagctagacgaacgaaaatcaaagatagatgacgtgtggtgtgacgataattgcggagttgatacgtaggacagaggtctcgtggtaacacgatgacgcgaaaaggtctccttctagtacgttgaatgacggaacccgttggccatgcacgcgagctgtctagcgcatggggcggctttctcgctaattctggaatagcagagtccgtcgagggctccatagttcgacatgagcgcacatacttggctggtaagtacattnggcaagaaatgtgggtgcactatcggggattatctggttacattggcttatcgtgtcgaatacatactatcatctcagtcagtgggtgcggtgtagtcatcatctccactggagatgagactctaggtcgcgaacatcatacaacgtcgctgtatccagagtaaaatcctacttcatattgacctgtgtatcgatcgttagtaagccgtcgctggatatttatctatagcgtttgagcctacgtgttcatctcctaacaacttatagttaagtcgtcacatgtatatatcgtggaactttcttaggaaagcggtgccattggttcttgctcatatggcactcgcaacagttaggaacggctcggactcaccgatccacattagttgccaccaggtgtcacttgtacagaatgatagcgctattgggcctgattgaacgaacggacttgctgaaaggtttccagatagtgctattaatctcagcatgtaagggttgggccacctaacttaaattggccatttactgcccg

SEQ ID NO: 529958 - DNA, 367 bp, Homo sapiens
cccccccccccccttttggggcccccggcctttattccctgggggggttttgggtttttacctttaacaaaacgggggaaccgggccctggaaggcccccgggctccccctttgatttggtttcggccccgggttggcagggccgggggacttttttggggtgtccctgggggggttttgccccttcccgggcgccgggatttttaccgggtttaagggccccttttttggagggaaattttttccccccttggggccccctggggttggcaaaaggtttttaaaaaaaaaataaggttatggctttacccaatttttcccccccgggggggggggttttttaaaaacccctaaaagtgggttgcca

SEQ ID NO: 529959 - DNA, 2050 bp, Homo sapiens
  misc_feature (1916)..(1916): n is a, c, g, or t
gtgtgcgtggagctggagagcggaccccatgatgatgccctgatgcagccccacctgcctgacgcctgtgcctagttaccatcacacccctgggatggatgccgcagctgccgcagccggccccagatcaccagtcacctgcaaaccagtgatgcatgctgaggcctgagacccatgcaagccatgccagacagaaacacacagcaacggagacagaaaacagaaaatttttgcagcaagaacagaaaacacaaaaggcaagagaacacataaaagagcgcccagacctgagccatcccaggcggacagacgtgaatggacaccccgaccactctcgcacatccaccaactcccgtgccacgcgcccacccatgcaccaggacgagatatatcaacacgacacggctcaatcacaacaatacagaaaagagataaccacgagcacatccccgaacaacaacacatacaatcgccgacacacggatacgagacgccaacccgcgacattaacgggaacagaccaaacgacacaacgagagcgaacacgatgaccccaccccacaccgcagacaccagtggcgcaaccgatagcataacccccacacacgagacttggacccagctacccaagggagacaccgagtcagaaggagccccacgcgccagacacccacacaatacgagaccagtaaccgcgcaacgcgcaccgcaagctccgaacgacacgacgcaccacgaagcagagacggacgcgagaagaagagcacacacaacaggcaaaccgaccgaaccacagaagacagaacgccgccgagcgcagaaccgcgacccaaacagaagcaaccacagccgcaacacaacccaaggccacgccccacggagccagcagagacccgaaccgaccgagcagacccgcagaaaaacccacggcaaccgcacaaaactgaccaccgcggacgagcagcgtagcgacaagacgacagcaacgactcacagacacgacgaccgagcgacagcaaccgcacgacgcgacggaccagacacgagaagagagcagacaccaagaactagcacgccagagaggagacgacagagcgaagcgagatatcacgagacacgaacgacgagggacacacggacaaacacgcacacacgacggacgcgcacgccagacgagagctctgacagccgacgaaaactgaagcagcagagacaccacacgagcacgccacaccacgaatacacggacaacacggcagcgcgcaacgaccgagcaactctgagacaacccagacggagacagagagagcgaaagccagaacgacccacgcgaggagacggacaacgcagacaccagagaacaccgcggccgccgaacgctcagcaagcgcaacgccggcagacaccgagacgcccgcctcgagcagaggcaatacgagcaatgagcagaacgcacatgacactcgccacgacggagatgcaacggatcagaatgaggcacctgaccacagcactacagatggagacgagagaggcagcagacgcaggacaggacgagacgaagagcaggacgagcaacgacggaagcagagacagagaacagagaagagacagaggagacagacgacaacgaccacaaacgaaggctgaacaggacaagacaagacaacagacacacgaacaacaagacacagacgacgaacagcacgcagatcgacgcaagagagacaaacagacacgaagacgcatgagaagcacacgccgagccgaaccgatgacgcacaacgacagcagccacgaccatgaatcgacgggaagagacgagacgcaagcgcgagcgacagaatgacagggagagagaagactgagcggaacgaagacagagcagcaggcgagcacagaagaccgagaacganacgacacgacaggaaagcagacgacagcgacaagcggaagcgaagcgacgtagcgaccacgcccgcacaccactcaaacacgagcactcgaatgacacagagagcagcatggactaggcgtaaccactacgcac

SEQ ID NO: 529960 - DNA, 270 bp, Homo sapiens
atgattagaggatccgggaggaggatgtggtcaacaccaaaagttaggtaaggagctgagaaatggcactagatgaacaattctggtgttcgtggtgaacaaatccacagtatactgatcttattctacggtggggatcgggggggcagataaatgggcaaatatgagaggattatagaaagaggttggtggggggcacaaaagttggagtggccagtaaggtcagggagagatatcagaaaacatttagttgtcctcattacatgccat

SEQ ID NO: 529961 - DNA, 125 bp, Homo sapiens
atgagtaatcagacatagatctatacacaatcaccattcgactaacaatatagagactagagatgagtacacatagtagagattagactatgacatactctgtgagagaggacattctgatgctt

SEQ ID NO: 529962 - DNA, 676 bp, Homo sapiens
tacaggcatgagccactgtgcccagcctcaatggtgtttttttgaagtttttataatgctgtttttttcaaaaataaagatttcacatgagtttaaaaaatgaatttaactcatttttaatgaatttgtgatctcttatttcacagtataccacctttagagatattaatgactttcttggttatcatttgatatgtaaataaactcatattttaatgaaaataataaattactattcttgtgatcttagtgctcatcaaaagtagaacttagaccattcagtttacagctaatcttccagattgctaaatgaaataaaattatttttctatttagtaattcattatgaaagataaggaacctgagttttccctttttcatatgccttatgtctgacaacacattttgcacaatattctctattagaattttcttttcttttggtctagctctgtttggttatccctcttactagatgtgagcagccgtagcaatgtagtttttgtcccattcactcctctcaggcatgaatccaccttgtctaggagagctatgttctcaaaagtgaaagcagcctgtttgacaagtactgacatttgaaaatgctataaacctctggtggtgagatactgtttgaataatcttgataagttaaataccatgaattgaagcactt

SEQ ID NO: 529963 - DNA, 164 bp, Homo sapiens
ggtgttggggttccactggttcagccggcctccctgctggggcatgcacaggttctgtcgtctgtcacacccagcactccagccagccattccagcatcccaagctatcccatccatgcacatgttcttgcatcagcatttatcttggccatgcctccacaggc

SEQ ID NO: 529964 - DNA, 848 bp, Homo sapiens
ggagaacgccaccgatttgaggaagcccagtacaggttgacaagttggtcgcggctagggctccgcttggggaggggcaataggtttattacactggatctctgaatacccaggccccctccaccatggccatgccggggtgggggccggggtcgtggccggggaccaggttgaccttcgacgtggaggccgtgggcattgtggaaagcgggtgatgctttgtcactcccacccgaccctgacagccttctcctactcttgtctacttcctatggtgttccgcactcgaggttgctctttgccctcaggctgaggaaggggaatctgtgcctggcagttgatagcacatgatgctcacaggatgtagcgcatagaaggtggcgtcacacacatcatttcatctcggcacaagaccatggtcactcgctaaggcatgagatgttggagcggttgagtatccatgagcaatatatcaagaatggttcatgtgtccagtaatagagtaatgctcatcagtatgtggggaacccttgatctggctggcgtatagcttcgggaatggtaaagatggagaattgcgggaatattggagtaagggaacggtgttacgaattgcatgtctgcctccgggaggaggcgacatttaatgagctgaagtaagatagtgaaaggaaagctactttctcaaggtaattgggagtataccctatatactctgtgttagtgaagagaggaaacgtggataagatggaagttaggggatagatgcaggctgatgaaaaaggtgagaactaaagaagtaagagaaagggtaaaacacgaacgagaaacgttaaattgggaaagaa

SEQ ID NO: 529965 - DNA, 862 bp, Homo sapiens
ttttcgagaattatatcttggcttgttcctgtggcagccaaactttgaagctaatttttgactatgactaaggtcatgctccaaggttttgattaccgttccgggagccaaccttgtgaacaagtttggttacacccctttgtggataaaccagacaagacttaaaccacatgttggaggaaaacgttcccttggtgtttccactgctgtaacattggctgggataaaacaactatggcttttcagctttatcagaggtgaccctagtggaaattacgggggatggaaggccacatgcattggaaattatagcgctgcaactgtgtccatgttgaaaccagactattaagaaggagaaatgacccttgaagtccgcacttgctttagctatccaagtacttaataagaccctggatgttagtaaactctctgctgaaaaagtgggaattgccacccttaccagagagaatgggaagaccgtaatcagagtttctcacaaccaaaagaagtggatgcacgttgatccaaaaacacgaggaagaagagagcccaagctgagcgtgagaagaaagaaaaagtacacgaaagaaaaggataaatagaatccagagattttattactcactttggggcacccctttcacgtgtaaaagcacgtcctactcttccaaccaactagggaggctttaactttttttaactggtgccgtgggaaaataggacattacatactgaattgggtccttgtcatttctgtcccattgaatactttattgtaacgatgatggttacccttcatggacgttttaatcttccacacacatcccctttttttggaataaaatttggaaaatggaaatta

SEQ ID NO: 529966 - DNA, 133 bp, Homo sapiens
ggtctgatctttgattaagtttgtaataacaaatgcaagtgaaatattttatggatctatttgaaaaacatctgtaaaagactggggtgggggtgggaggccagcacggtggtgaggcagttgagaaaattga

SEQ ID NO: 529967 - DNA, 336 bp, Homo sapiens
  misc_feature (5)..(5): n is a, c, g, or t
  misc_feature (11)..(11): n is a, c, g, or t
  misc_feature (28)..(31): n is a, c, g, or t
  misc_feature (43)..(43): n is a, c, g, or t
  misc_feature (138)..(138): n is a, c, g, or t
  misc_feature (153)..(153): n is a, c, g, or t
  misc_feature (158)..(158): n is a, c, g, or t
  misc_feature (160)..(160): n is a, c, g, or t
  misc_feature (165)..(165): n is a, c, g, or t
  misc_feature (192)..(192): n is a, c, g, or t
  misc_feature (195)..(195): n is a, c, g, or t
  misc_feature (199)..(199): n is a, c, g, or t
  misc_feature (207)..(207): n is a, c, g, or t
  misc_feature (214)..(215): n is a, c, g, or t
  misc_feature (247)..(247): n is a, c, g, or t
  misc_feature (270)..(270): n is a, c, g, or t
  misc_feature (272)..(272): n is a, c, g, or t
  misc_feature (274)..(274): n is a, c, g, or t
  misc_feature (278)..(278): n is a, c, g, or t
  misc_feature (280)..(282): n is a, c, g, or t
  misc_feature (284)..(285): n is a, c, g, or t
  misc_feature (287)..(287): n is a, c, g, or t
  misc_feature (297)..(297): n is a, c, g, or t
cccanacacanacttctggctcccccannnncctctttccgtntctctgactaggaaaatgtgatttctctcagtttttgccatctacaccctcaggttaaacccatgagagaatggaggaagatgaactgggaaccnccccagatcagtgtngactncngtatnctgacagctcttgtctattctcagagnctncagnttgctttncaaaatnncgtccagaggccaggcatagtggctcacaccngcagttccagcgatttgggaggntnangtgngnnnannanttgagacagnagtttgagaccagcctgggcctcatagtgagacctcctt

SEQ ID NO: 529968 - DNA, 1432 bp, Homo sapiens
  misc_feature (39)..(39): n is a, c, g, or t
ggcgtcttgctgcgttgggtaagtgtaatctcacacccncgctgcgcttgtgtttatagagtcgcgcccacccccgcgtgctgcggtgagagcggcggctgtcgtgcggttcgtcgatagttacgtctactgcacctgagggcggctctctcactttctgttccggtcgcttcagcacgcacagcgttaggttgtaatcgagccgtcgcgttgtgtgtggtagtcatacacgaggagtagtagtggtgtggtctttccgcccggcgcgggcggggtgttctttgatagaagagcgctctcttcttgttttcggggctgccgccaccggctgtggattagtgcacgcgtttcttccttcgctactccccgcgctgcgctagtgagtagatgtggtgttttggtgttgcctctctcgcgtctcgtttggcccgggtggtggctaatctttctcgtgctctcattagggtgtttggtgtgggccccccactcgtctgttgtggtagctgactgcctcctccgtgttggtttgactcgaggagagggttctgggggtcgtggccgcacgggtatggtcgcgcgtcgcgtcgagtgtggctcgtcttctttgtgttgcctccctcctctttgttttgacgggagcgatttttcttgctagtgacggggtgttgttctcccgccggcgcgcttttgtttaggagaggtgtcgttctcctcttcggtagtgggtgccctgctagataaacatcttgtcatacagcacacgcgtttgtagtatcgacgcacaacttagtgacgtcccgcctcgtcgcacaccacaggtgctggggggggggaacaaatagtgtcgagatgacgcacgtatgaatgctgcgtccgttcagttgggagggagagaacacttgtttgctcaaacagacagtcgcgtgtgttttttacacaacggcgaggagtaggggggggggcccctctttttgtgtccccccgcgctctgtgtagttgttggtcacgaccgtagtttgttttttttgatcgagagcatgtgatagttgtcgtctttttgccacgctcgttcacacacacctgtggtgggtctctacgaggaggtcgcgtcagtaagtttgtcttgttaccacctctctttttccacaagggtggcgccacgaaacagatcgattgtgttgagtagatgacacccccgtccgccatcaagttgtggtcccgcgcggggattaaagacgatctttacccaccccgtggggtgatcttggagctattaaagaaatgggtattatttggggaacccccgccgagggttgagcatggggagggaagaatttataaaagatatcccttttttgatggagaggggggggaatttttttttttttttttataagaagtgtgtggggagaaagaagatttataaaacaca

SEQ ID NO: 529969 - DNA, 236 bp, Homo sapiens
gcaagctgcatcctgctggtgtctctagaggtatcccgcgttacctgtcctctttgtctggagaagtcaggactcccagcgtcattgcttgtcgcacatttggtctgacgcgcatccccttgtgagtacctcacctccccatatttccatagaccatgggttaccgacgctcgatcttctgtaatctctaggtcagtagctagtttccgtgtggtgaaaagcccctggcgattcat

SEQ ID NO: 529970 - DNA, 2079 bp, Homo sapiens
  misc_feature (1398)..(1398): n is a, c, g, or t
ccggcagccgcatgatttattttgccggggtctcttataagggtgtaagcaggcaggactcaggttggagggtggataaagatatgtatcgtagactcaacaagaggttctttgtttgtcacaccgactaaacactactggtgcgcgcgggtgggtggacataagagtagaccagtacgttccccttctgttgtcgagatgtatgctcgcgggcctacatattattagggggagtagcccacaactaaaagaagagacaaatagtttggtcgttgggaagcacacacaacccggtggtgttgttgtaagtagatagaaagagagagttttggggcgtaaagtatagttagtgttggtagtaagtactacgtactcgccctgggcgtatagagtgtgtgtcagcagagtagtgagtgtatgtgagaaatacttgtttttggtgggatagtagaaaatagacacgctctcttgttgtgttgtaagtaactcctcaccgagatgtagttcccctatctaggagtggaagtccccatccaaacgtggtggggcctacgatttgcgttggagataggggtggtggattctctaaaaaagaatgagtgttttcgttcgttgttttttgttgtaatgaaagatgggaaggaagtgtccttgcgtgcggatgggtagttggttgttcctgaccacgaatataagtttgtaaggtgtggtatgagattgttgtgttcgacccaccttgccgttgtggtggtggatggagaattggttgtgtgcctaacgagcttggggatgtgtgttatagtcgttcggcgtaagaataagtagttgtttgactcacagcgacggagtggttaattatgccatctcgcgcttctgcgtggtgcattgatacgttgtgtctacatacttccgtgcgtcatcatcggcgtgggtggtgtgtcatgatactgctccttccgcgtgacagacaacactacaagaatgtatggtgtggtggtctgcgaccacatcgggggtgggctccgctcaactattattatgatgttggctgccaacgacgacgagaccaacatcatgagtgttgatgttgttgaagaaggtacgtcgttcatccatctcctgcgtgatgaggagtgtggttgtcctctctagtagggttctgttctcctcccggttggggggtggttttgtactcctggtggggctgtggtgtgtgtgtggtggtggtgttgttgctgctgctgaggttgttgtggcggtggttgtggtggtcgcctctcgagatagtataattccgccgcgtctacccactacttctccatcagaagtgtcctcctgcgcgaggatagaatgccctcctcctgcttgagatattgtggtgctcgcgtgcccgcggcnccaccactgcacaaggaggtgtcgtctcgcactctcatatatttgtctccgcgggatgattagtaaaatagagttgtagtagtgttgtgtgattattattctactagtggagacccctctccagcagaagaggagtgggtctcagacgacactacaagtattgagcacctgttctgataatataataaaattagtgttgtgtcgtccactataatagatatagtgttgagtatagtccacacgacacacgacacactgtgtggggtatatagacacacacttaggagttaaatagagcggttttgcgcccatagttattgtgtatctcctgtctccgcctgagaaggtttttcgtctgtgtagaggaatagatgtataaaaagacgcgtgaataataacccccagagtgttgtagatttgtggtaaagatccatgtggagacgttctctatgtgggtaaacgccacatatgagttgtgtgtggaataacacacctggggacatcaaacacacacggggcgtgttataagttgttacagaaaaccgtgagatgtgaatatatgtgacaccaccccagctcaccaaagattgtgtgttttatagaggctcaggacgctttctccaatataggtgcgcctcatatagttaataagtgctgaatgttgtgtgtgaaaaaatataa

SEQ ID NO: 529971 - DNA, 106 bp, Homo sapiens
  misc_feature (93)..(93): n is a, c, g, or t
cttttaatcatgttctactccaaaaatatcagcctgatgatgaatttccagcctccgagcaaagcctggcgggcctcacagatgatgactttnttcatcttcttgc

SEQ ID NO: 529972 - DNA, 972 bp, Homo sapiens
agcggggttcgcgcgcgcgcagccccgcgatgcgacatcttgtggctggctgcctagcagctgaagcctaacgctacctcgagttatgatgtttgacggccatccctgagggatcagggtacacgctgtgccatttgtggactgtcagataactcctgctgacgtcagaatcttgccgaccagaatgctcctcctgttagcttgatgtatcatctgtaccttccacgtacgtcgagttggctgagtgcattgcgtgtttacgtcctccatcgatctgtcaaaggccctaatgggtatctgtaggcgtcaagtggagtacgacctggcgaaacttagactccttcatgaggcaatgaatctggatatgtcatcgcatctttaccttgcaagcgtaagatacttgtgtcgcaacacaaacatggggctgtactttcaagtcgaatacaatcgctagagagccgtatactggggcattgcaaagttccgtggtactccaggggccctagcaccaattgcactacgcttggttccgcattacacttctttcctaggaccaattacttgttccttcttggttccccattgtatccgtttcttggccttaacatcgttacaaccgcgttcgactctaaaggagggcgtgacaagagttgtctgaacaattccaacctggagtgaaatttctattcccaaatatttgcttttgccatggggtttcagtgttgccagtttgcatggcaaggtcgcattgcgggggtcacacatctgtacgaacaggggtaggaaggggctactcccggggtagatgagtcccgatcttcaaaagcttgcagggaatttgaactttcccttaaccggggggtttcccgccctttaccattcccatggggtcccttaggggtgggctcctattcctccccttgggacgcacttttcttccaaactgggaggtatcatccttatggttcgatc

SEQ ID NO: 529973 - DNA, 100 bp, Homo sapiens
tcgcaaggatgagaaattgctctgacatgactcactttctcttctgaagcaattccaagttcacttctctgcccactgacagttcctcatcccttgggag

SEQ ID NO: 529974 - DNA, 652 bp, Homo sapiens
  misc_feature (46)..(46): n is a, c, g, or t
  misc_feature (61)..(61): n is a, c, g, or t
  misc_feature (66)..(69): n is a, c, g, or t
  misc_feature (72)..(72): n is a, c, g, or t
  misc_feature (75)..(75): n is a, c, g, or t
  misc_feature (80)..(80): n is a, c, g, or t
  misc_feature (87)..(87): n is a, c, g, or t
  misc_feature (89)..(90): n is a, c, g, or t
  misc_feature (94)..(94): n is a, c, g, or t
  misc_feature (96)..(97): n is a, c, g, or t
  misc_feature (106)..(107): n is a, c, g, or t
  misc_feature (117)..(117): n is a, c, g, or t
  misc_feature (123)..(123): n is a, c, g, or t
  misc_feature (137)..(137): n is a, c, g, or t
  misc_feature (139)..(139): n is a, c, g, or t
  misc_feature (151)..(151): n is a, c, g, or t
  misc_feature (175)..(175): n is a, c, g, or t
  misc_feature (178)..(179): n is a, c, g, or t
  misc_feature (181)..(181): n is a, c, g, or t
  misc_feature (184)..(184): n is a, c, g, or t
  misc_feature (196)..(196): n is a, c, g, or t
  misc_feature (205)..(205): n is a, c, g, or t
  misc_feature (213)..(213): n is a, c, g, or t
  misc_feature (219)..(219): n is a, c, g, or t
  misc_feature (221)..(221): n is a, c, g, or t
  misc_feature (226)..(226): n is a, c, g, or t
  misc_feature (228)..(228): n is a, c, g, or t
  misc_feature (232)..(232): n is a, c, g, or t
  misc_feature (238)..(238): n is a, c, g, or t
  misc_feature (245)..(245): n is a, c, g, or t
  misc_feature (263)..(263): n is a, c, g, or t
  misc_feature (265)..(265): n is a, c, g, or t
  misc_feature (269)..(269): n is a, c, g, or t
  misc_feature (283)..(283): n is a, c, g, or t
  misc_feature (286)..(286): n is a, c, g, or t
  misc_feature (293)..(293): n is a, c, g, or t
  misc_feature (298)..(298): n is a, c, g, or t
  misc_feature (303)..(304): n is a, c, g, or t
  misc_feature (323)..(323): n is a, c, g, or t
  misc_feature (377)..(378): n is a, c, g, or t
  misc_feature (380)..(380): n is a, c, g, or t
  misc_feature (386)..(386): n is a, c, g, or t
  misc_feature (392)..(392): n is a, c, g, or t
  misc_feature (413)..(414): n is a, c, g, or t
  misc_feature (430)..(430): n is a, c, g, or t
  misc_feature (445)..(445): n is a, c, g, or t
  misc_feature (449)..(449): n is a, c, g, or t
  misc_feature (475)..(475): n is a, c, g, or t
  misc_feature (494)..(494): n is a, c, g, or t
  misc_feature (523)..(523): n is a, c, g, or t
  misc_feature (525)..(525): n is a, c, g, or t
  misc_feature (530)..(530): n is a, c, g, or t
  misc_feature (547)..(547): n is a, c, g, or t
  misc_feature (551)..(551): n is a, c, g, or t
ccccacgcagggacgccagggttccctcccaccccgtgatcaaganacggaatcggctgcngatgnnnnaancgnaatgngcccctntnnaaanannttccccggnnatctaaaggnaggatncggctgggaaaaananaactggaatttntcgaaggttgatggtccgcagggntgnngnttntaggtggttttnttggttccnctggtgtntgtgtntnttttntntttnttgttntccttanattatttttttgaacttntngtanaggtccagcatgtnggngcccccnatgcnctgtnngaagttgggccacgcttcnttgaagaaggctttgcccccctttttttttttgttttttttttttttttttttnntntttgtntttttnttgtttttttttttttttttnntttttttttttttgtnttgttggtttgtttntttngggttggttatcatgttggttatggngttatggtttgtgcgattnttcagctcatcacgatgtgcgtgtttttngngtttnggggcatgctcttgtgncgtntcgtacacgccgaagtaggccgcccggtagatgatgatgccctgcacggtgacactgaagctctggtacagccccggatgccgtcggacttggtgatcttc

SEQ ID NO: 529975 - DNA, 100 bp, Homo sapiens
gccccgtctctatcgtgttctttccagtgttattttcagctgttcctcatcgtgagcctgaaggcctcgtagcttgattctccttcttcccacgggatat

SEQ ID NO: 529976 - DNA, 962 bp, Homo sapiens
tgataaggatggtacttgcatatggtgaatatactactgtgacagtttccgcagaaatcctatttcagtggcaccaactattagtggccatggcagcaaatgccaaaccattattagtggcacatcagcagcagacatctcacaagagcaccctaggttggttatctatcgttattgtttatctcttgttttttccccgcttctcctgcaatcagcagggcatggaaggcagggtcagggaagttcatgaattactccttccagtagtagctctgaagtgtcacatttaactatcagtctattgttttacaacatgattctagttacaatgtagaagagagaagaacagaggacagtgttcaacgtttgtaaactacactgatttagaaatttagatgttcattactatcagatagattctgaggtattcgactagactctgctactaattgatctgcctattacgttgaccagaggatagaacgcaagggctgaaataactacgggccttatagtaacaacaaagacaatacggacacgccacatagtaacacgagcacagtagacgcaccagcgaggggaagatatgaacgcgaacacacagcctcacctagacatacacacgacaacgaggcaccctgccatgacacccaatgcacccacaggaacgagcaaccacaaaacccaccgtcacacaccggcaaaagagacaaacaacgacagaccaacaacggatccagtgacaaatcaggacaagcacccgacgagacaacacgccaagccaaacaccgcgcacaccgctagcacatacaacgcgacacaaggcgacctagaactaatcgagacagaccatcggccaaccagacaccgcgagccagaccagacagaagcgggcgatagacacaacaactgacataggaggaccaccaaaccaaggcgacacaaccaacccacgaaaggca

SEQ ID NO: 529977 - DNA, 448 bp, Homo sapiens
tagtgttctgaggatcccgtatgctccagcagcggggtagcgatgaatccaggtcaggactacgatgaaggagcagaggaacacgggccaggtgtccctgggccagctccaggctgtgggtgacctatggcttcccagcgtggggccacagaagtaacaggggctagaggaaacttcaccccagagttgctgtcagctaccaggtcctcacctaggagaaggccaccccaacctccatctggttcttgcattgccaaggtacctctcactgtattcttactggcgagaagagaatctaaagacggtaggtgtagagggctgtgggtctagacgactccagatctccagatctattgcacagacctgaggttgcaagcctagaatgagctcagaagccagcaggccgtagagagttggtgcatcggatctagtgcagaatacaaggagg

SEQ ID NO: 529978 - DNA, 687 bp, Homo sapiens
  misc_feature (585)..(585): n is a, c, g, or t
atatgaaaagaggatacagaatgattttctacagtctttgctatggttggtaagttttaatcaagttgtgtaatttaacatctagtagattttattataaagctttttatttgttttttttttttttttaaaaaaagggtaagcaaaaaactgggaatataggataacggaaaaggtctaaaatatacttttagtcagagttccagaaagtgaaggggtagagagaagtggggccaagtcattattataagaggcaattaggacctctacagaacgtgaggaggagggtgtcagaagtttagccgagaaaaaaagagagattactttcaagaaaagaagaactctttagacagtgtgatagctagttttcccaacgaggtgacaaccaattagacttgggaagtgatagcttataattggccaggggaaattacctatcaacggataatggtaggccttgcaaaaatttttttcagtaagagtgtgaattgtgagaaaggggcaccagcagagtctcagtgaaagaaagtcccaaagggtcgattaaaggtgattttacctattcagagacccagaagggacgtngagcaaaacaggtaaataattacttgattaaacctaaggtgaattttaacgtgtgttaagcaattattaggtcttataggatttctataacaacacaaattg

SEQ ID NO: 529979 - DNA, 1191 bp, Homo sapiens
  misc_feature (463)..(463): n is a, c, g, or t
aggcctagtctgcttctgtttatctgcctgtctccgccagctgcctcctcttcctccttcgccaccgccgccaccgccgccgcctgcccgcagcaccgctagcccctcccgccatggccgccgccggcgcccggctcagccccggcccctggctcggggctcctgtggggctggcctgcaggctctagcttccaccctggggcctgcctgccactagctagcctgctagctagctagctagtatcctagctacctagctagccgctctaccgccagcttagctaggcctggcagcccaccgctctggttgcctctgctggtgcagccctgcactagccctgttgcctggctttgcacagcacctgtccacgtgttgtcccaccactttgccctgctccttgctggtgcagtcagctgcacatcaggcttggtcagctgtgacgtcctcgtacgtcccgtgggncccgtgggtgtctgtgtgacaccggggggtcccgggacagccctgacccggtcctgaccggccgtgcgtttcaccctcgtgtgttctacttcgcttgtgtcttccttgtgcccgtgcctaccggccccgtccgaccagcctcgggcgtccccttccccttgaccttccctctttgggtttgccggttacactgtcagacttgtcacgggggggacgccgcttcgtgcgggttgccatgtggtccgcacccttgggacaccacactacccggtagcccttggccgctttccctatacagcgccctgggagggcagtggctaccttgggcccacacccagtgccggcgccggtggcgccctatccatcccggcctttgtgtttgcccacattggggactgaacccctgggcaaggtttggcaccattgtggctcagagacctattgtgccccccgtttggatcaccttatcgccctacggtatctttcccgccttgtcaggccaagtcctcccgggggcgcacgacgccttggaccccccaagcgctcacgtcccggggcgcccccagcatcctacccactgtgatggcccgtcggtgcatcaattgtatggccggggatgcactgacttcacccatccctccccacgacttttatcattgttacatgtggccgggccatcagactcgcgaccttgtgcttgcgtgacatgtggttgctggaactattac

SEQ ID NO: 529980 - DNA, 361 bp, Homo sapiens
atcagctccagcaccgttacgaatctgatttctctgatcaaccaaattgtggaagatgcggctatcgaagatctccgatatgccgttggtcaactcagtcattgagcgtcttcatgcttcccaatcacgtttgctcaacggagataattctgcactcgcagttttgagaaagctcaatagtcttaatagggctggtgaagtggttttttccggtttgatgtgctttggtgtttatccccagcaattcttcccgcagttgtttatcgatgtggcgaagcaccccggacagcaaaaatcggcagatccagaagtacggtttgatcatcgcaaggtgtgtgaaggccacatcaaaggtcgacgc

SEQ ID NO: 529981 - DNA, 107 bp, Homo sapiens
ttctagaggatcccaggggaagcttgctcaggttgtgaggctttctttcaacaagaagaaagagcaagagcaaagactaaaagacttcagttgccaagttgcgtgtg

SEQ ID NO: 529982 - DNA, 180 bp, Homo sapiens
gtaatggtggaggaggtggtgatggtagtggaggaatgtggtaatggtggtggaggaggtggtgattgtgggggaagaggaggtgatggtagaggaggaggaggtggtgatggtggtgaaggagttggtgatagtgggggagaaggtagtgatggtggaggaggaggaggtagtgatggt

SEQ ID NO: 529983 - DNA, 308 bp, Homo sapiens
acatgcagatactgacatgtcgcagatttatcagagtcgccctagtatactgcagaaggaggaaacagatgagctaaaacgggttgatgatccaggtttgatgctcatggtcttcaagctgccgatactgctgacgaatcaccattacctgcagccatcgctgttcgtgtacccagaggagtcgctggtgattgagagctcaaccctgctcagtgctctgctcatcaagtgtctgtagaaggaggttgcagcattgcgcagatacacacctcgcagatgacgccgatgtagtatctgctcgacagcca

SEQ ID NO: 529984 - DNA, 529 bp, Homo sapiens
  misc_feature (17)..(17): n is a, c, g, or t
  misc_feature (54)..(54): n is a, c, g, or t
  misc_feature (62)..(63): n is a, c, g, or t
  misc_feature (83)..(83): n is a, c, g, or t
  misc_feature (134)..(134): n is a, c, g, or t
  misc_feature (146)..(146): n is a, c, g, or t
  misc_feature (178)..(178): n is a, c, g, or t
  misc_feature (187)..(187): n is a, c, g, or t
  misc_feature (231)..(231): n is a, c, g, or t
  misc_feature (250)..(250): n is a, c, g, or t
  misc_feature (253)..(253): n is a, c, g, or t
  misc_feature (369)..(369): n is a, c, g, or t
  misc_feature (371)..(371): n is a, c, g, or t
  misc_feature (462)..(462): n is a, c, g, or t
ttttaaaaagagtaaanggttttttttttaggcagaaattaaatttttatcccnaaatcagnnggaaaaatataaggggcaanacaaaaagatgtatgcaaacaaaaatgttttaaatcaggtcagatatttgngggaaaatacgnaattaatgttaagagcaagtagtttaaaatantccaggaantgagaaacaaaacaaagcaattgtgggttttgagttccatatanttttagcaagtaagggggngtnttgcccctatatattattttcccggattccactccctgttgtgggaatcgcgcccacccccatccgtgtgttgtagccactcacggtttgcatcaagagtgttttttgtaactgcntntggacttgggacagtgagtaggatcaaaaataaataatgtacatgacggggaagggaaaaacctgttggagttgtttccagccagccacgntccgggccagcatgttggaatccagcgtggagcagatgcagtaaaaatgtggttggtttctgtgtgg

SEQ ID NO: 529985 - DNA, 726 bp, Homo sapiens
  misc_feature (365)..(365): n is a, c, g, or t
gacgggcccgaatcctcatgtgaatggtgcagttcctaagccggagcggaggtagaggcgggtcggactatccccttctgatcctccagatgccgacgggctcaagatcagagcatggccagagcttgacggacttggcgggacggctgcccgccgggccctggggcatgggctcggccctgaatctgtctggctggtgagtccgggcgtccgctggcctacggatgctgcagcagaaatcatgtgttcaccgtgcggaatgcgcaggcgacgaccagaagctcatgcttctatcaagttcggatcgggtagaagatgcacgtgaggaccatcctataccatgtgctctgacgggccgttcattntgcacgagactccactatgtgtttctcagatatcccactcttatcattagttgtaactattaccgggagacgctaagaatcacctcgaaaacatagattctcactttcgcacccgttagcagggcgtcccagaatggatccctaacaagaattgtggtggtaaacttacttctcgccatggcgtagctagttagttgcttcgagcgccaatatttgccgtcaggaaggcatttcgcttaggaccagttgttatccgaagacgacgccataggggggtcgtgggtagcctaaccggagggaaagcgaagctggtttgcccggtccaatttgttcaaacggagggtgtcctccaagagatgtg

SEQ ID NO: 529986 - DNA, 184 bp, Homo sapiens
ctaggctttaaaattttctggagttgatcatagccaatagttaaacgcggtaaacccaccacataagggccaatttcatactcgccatattgcaaaatcagaccttcagtacccaagtaataattgttactcaagctaaacttccacgcttgctcatattcatcgacattggtcgctaacttag

SEQ ID NO: 529987 - DNA, 480 bp, Homo sapiens
  misc_feature (179)..(179): n is a, c, g, or t
  misc_feature (239)..(239): n is a, c, g, or t
aagcaggagttggcctaaccggaggagcacttactacgtgactgtctctatagatgtacctgatctggacattgcatataaatgatactcggtaatatgaggtcttgggtgccgtggcttctttcacgttagcataatgtttccagaggtcatccatactggtactatatatgtatcanggacttgatttcctttttatggcgtgtataagtatttcagttgtataggatataccacangttggtttattcatctagtggatagacatttagatggtttccacctttggacggttaggaatattgcagctatgaatagtcatgtacaatttggtgtttgaacacctgtttttcagttacacatctagagtggaattccggagtcatacggtaattctgcttttaaccttttaaggaactgccaaactgttttctacaaccactgcactccagccgggacgacagagcgagactccatctc

SEQ ID NO: 529988 - DNA, 1000 bp, Homo sapiens
agcgggctgcgcgcccggcccgtcgcggacctctccgcgggcggagaccctgtgcgtctcccagcgcggctctcgggcatcagtgctctactggcgaccgcctgcgtggccctacggtagatgatcctggtcgctctcgcgcgtgctgtcactggtgtaggggagcacgagaggcctcgctcataatccatggcccgcgccggcggcaagctcatggcgcacgggcactcggatcactgggggccaggctcctgaggcagagacagatggaccgccccggacgccccgagcaagggaccaacgcagaggacccgaggtacttcagcgggacacggctcgactaggatagtgagacatgctgtctcaccgttcgcccgagacgacgtgctagacgctttcgctacacctgccttcgtgatccacgacgcactcgtcggcctcggtggctctgacgagggtcgaatctgcggaaaggcgaggacttcctgacttgagtcgtctgggcgaagaggtcctcgcgtcgtgacaggttgagaggctgcctgtgacttggacgctgactgagatcctcgtcgaggctattcatggctacgtgtgtggcctagggccatatgtggcttagcattgcctccagtcgttgccattgtgagactattccattttcgggatagaaggaataggagcaattgcaccttcagaacgccctgcatgagaggcaggaggggagcaacgattgaaatgttactgtgggcagtgtgacctcgtgagagacgaaaaacaagaatgaagttcgtgtacagtgctcaaggcacgaatgggcagccattgggtggaagcttgcttgcatgagactcttacaaagttttcctgggaccatccaaggtgggtaagttttagagatgtgggaaaatccgagaagaaatgctaaaaagaggcaaagattgctattcactgttgattggaaggcgcaaaggaatatattaaggccaagtggtggacc

SEQ ID NO: 529989 - DNA, 600 bp, Homo sapiens
ctgagctacggatgctgcgattacagatgactgatcggcatataagttgcgcagaacagtaatttagatatatgtcagaaactagcctgaacacaccaactgcacctaaagttacgctctgatgcatcgttgacataaagaatggagtcctgctcttgaaggactctaacaccacagttcttggtggtgaagaggagacaccttattgagaaatgggagatacagagaagcttatcagaacacaatataggcaatgttggaactcgacgtggaccacagtcttttgggcctcttggacagaagtgtgtatcttatggtccaagtggttagcatagaactagagcgaagaaatcattgcagatacagtgcctgcgtgactagcaaagaaaatgtgaatttgtcaacgtacggtcgtattgtggaagtgcaagagcatgggaccctgacattgaagatgtgctgggggtttagaagttactcaattggctgctggtacccggataggggaggtgtaccgcacgagaagttaccgaatttgtcggacggcaatgggcgttaattccgaagcaattgaggaggtcttatgggttggcccccttc

SEQ ID NO: 529990 - DNA, 512 bp, Homo sapiens
  misc_feature (400)..(400): n is a, c, g, or t
  misc_feature (419)..(419): n is a, c, g, or t
aggaaaccccacactatgtaatactatgctaaattttgtgtttatccttctctggttttcttcagagctttaccaaatatttgtattggtaagaaagtattgtttggttttgcatgtgttatagactgacttgtgcttgtgcactgccccctccctccctgtcaccatccccaattcgtatgttgaacccctaactcccaatgcgattgtagagagggcccttaggaaggtaattaaggttaaatgaggtcatagggagggctctaatccaataagaccagtgttctcaggagaagatgaagaggcaccaggaggcatgcatgcagagaaaagccactctctgcgtgcagagaaaagtcatatgcaagccatggagagaggcctcaggagaaaccaactntgctggtcccttgattcgngaccttcagcctccaggactgtaaaaaaataaattttctgttgttaagctacccagtagatggtattttcttattggtgcactagcagactaa

SEQ ID NO: 529991 - DNA, 152 bp, Homo sapiens
agactgatggttacagtcaatacagagaatccatgtcctggtggtggtcgttgctaatagaccacacaatggagaacacttaccactggaagaccgatacgtccaagaaggctactgaaccgagacaccccacaacgtgtccaccctccgtc

SEQ ID NO: 529992 - DNA, 146 bp, Homo sapiens
aagattggagaaaccccgtctcggctaaaaacacaaaatgggccgggacgtggtggcgcatgcctgtaatcctagctactcaggaggatgacggggggaaaactcacttgaaccccatgacggctagtgggcgttgggggtaccga

SEQ ID NO: 529993 - DNA, 115 bp, Homo sapiens
ctagatgcttctccatgaggtctctcctggtgtcaccccagctcccgggagtgactctgaaatgttatttgagcactgtgcagaaacaacctaacagagcaggcttggctgctgt

SEQ ID NO: 529994 - DNA, 787 bp, Homo sapiens
ggacagtgctgacgctacaaggctcggagctccgggcactcatacatcgtgagttggtccttggacccccggaatgtagttctctacttctatgctcttgaatttctctcttcaacatgtgtagcatatgttgctggccagagacaagcgtgtgtgctatcttgaggatgagatagtatggcggttgagttattcgtccaaccgtactctggtggccattgctggattttgcctgttgtatgtatactaagaccacgaagtatgatgaaggactctactggtacgtattgtgaagggagatcgtttgcatcaatgtttgatgaaatgaatacatatcagaagtgctaagcaggatgttaaaagcaatcgaggtcacttatcatcctgatgaatcatcaaaagaaatatgatagaggctgttacttagaagtccaggaagatgttagaagaaattactgaaatatgaagcatctgatttaaagtagtatgactcaagtattcgatattgtgccggaaatatatcagttcaaaccttacgtccaccacgattgtgtaacctgcacagaccacaggtcaggccacatggcttgaagcacagtgaccagggaacctgggagacggccgacggtgcaattccgtggattatccgctggggcaaagcctcgttccatggacatcggctccactaaggtgcgcgtcaacaagatccgggcttttacttcagttcaacacctctgcacagcttacccagacaattccttactctacctgtgccctccgatggggc

SEQ ID NO: 529995 - DNA, 453 bp, Homo sapiens
  misc_feature (22)..(22): n is a, c, g, or t
  misc_feature (31)..(31): n is a, c, g, or t
  misc_feature (68)..(68): n is a, c, g, or t
agggaaagaatttataatttangggcaaggntaaattcccacgttccctttaaaaaaactcctgtttncttttaaaatacatttttttttcccattaaaaatataacaacaaaatgtggtctctatatacaatggaatattactctgccttaaaaaagaagggaattctgacccaggcatggtgcctcatgcctgtaatcctagcactttgggaggctgaggcaggagcatcactggagcccaggagtttgagaccagtatgggcaacagggagatcctgtctctacaatgaatttttaaaaattagccaggcatggtggtatatgcctgtggtcccagctactcaggaggctgaggctggaggattgcttgagcccaggaggtcgaggctgcaatgtgtcatgattatgccactgcactccaccctgagcaaccgagcaagaccctgtctaa

SEQ ID NO: 529996 - DNA, 1823 bp, Homo sapiens
  misc_feature (318)..(318): n is a, c, g, or t
  misc_feature (369)..(369): n is a, c, g, or t
  misc_feature (475)..(475): n is a, c, g, or t
  misc_feature (642)..(642): n is a, c, g, or t
  misc_feature (1065)..(1065): n is a, c, g, or t
gatttaccattccagaagggacaagaatatcttcgagttgccggacaggagtagagaggtgcggtgtaggcaatctgcgtccacatgggcctttcagcgagtggactggcgatgttccatctcgcagccctcgcagcgaacactgaagacgcggtgcacagtcgttcgagagacatcggacgacatgatgaataggagaaatcctcgcacatgatggagctcctagcctatcccatgcgtacacgtggtaacatatcagcgagcacagagttgcgtgcaatcgcgtccttgcgcaacacgatggcttacgcattggcnccttctcgcaatacgatgaatcgatggagacattggtctacgatagctagnaggggcacgatggcgcttccgtctactggatgccggcgatgcctcctgtgtcgtgctgtgtaaccacggagaaataaaccaatcttagacagtcggactttagacnctgacgatgacttcaaggcacagtgagtctcgcaggcgcgcctagggtttggactggaagtctgtcgcggaagcgggacgtgccggtaactcgtgttgtatccactgattcacaaactcctgagaatcgcgcacgcacagggggagtggggacttggactgtgatgntgactgacgccccagtggagtgcaccagccacaggcgaaactcctggcccagttgggtaactggcgcaggagactccgtgggacaagacagggagcactcaaagtcgtagaacactcgtctgcggtgactgtcattgacgctctctgtcaacgggaacttggcttcactcttgtccaaatgcagaccttcctagggaccacaaatctacttggggcgaccctatgcatatggcacacgtggaacatataacgcggtcaacattttataccagttgcgccatttggcggatacacacccggtaaatagaaatggaacattttgggcccattaacccacatattggagaacgaaacccattgggggtgtcccgccgtttgtgggcatgtttgggcaaggaccgtttggtcctttggggcaatggngaatcacagatggtgcccaaagaacggcaccgccgtctgactgtcccctcggggaatttcgtacggggaacccactgcggcgcaggcaaactccgccggaacttcctacttcggaatttctcggtttcccggagagacattggattcggtggacaaacctttgtaagaacttctgctggtgtgaaccccttatttttgaaacgcccccggattgggcagggcatagacgttaaaaaccactgtgaggtggtcatccaacacaacaagagcgaacctctctggtgggcccatttgggctcagcgtattgtgaaaacttttgtgcgaccccttggaagatccgggcggggaaaaacggagaattgggtcacacagcaacctctcaattgtgaaaccaagtgcaccccacaacagattgctgtcatgcgcgaggagtctcacaacaccgataaacgacggggaggaaaacaaaaacgataaagcgacaccacaccgggggccaaacaaagagacgggcacagaaaaattagagaccaaacgagagaagccgacgaggcctacctagtcaaacaaacaaccgtatggggtgaggagaccgaaagaacgatcgataggacattgcgtaaagaagccaccgcacggaagggggctgaatcaaacactgttaccaccgcccccgcggttacatcacatcaacagcgccgctgtaggacgaacgaccaacatgagagggtgcacacaatcgagaacgacgacgacg

SEQ ID NO: 529997 - DNA, 195 bp, Homo sapiens
tttttctttttaaaaaaaaaaaatttagggggtttttagaccccatgtagatttttaatgaaccaaaaatttaacccccaatatttaaaaggaagcccgaaggaattttaaacccttgggcttcccatttttttttaaaaatccccaaaaaacccaaattggcccctcccctaaaaaaaaaaattgggccgtcca

SEQ ID NO: 529998 - DNA, 138 bp, Homo sapiens
tggcattgatggctcaactctcctgacctcatgatccgcccgcctcggcctcccaaagcgttgggattataggcatgagccatgtgcctggtccaccttggcctgtatagtaacacctttccttgggctcagcaactt

SEQ ID NO: 529999 - DNA, 111 bp, Homo sapiens
cctgtgttgcatttgggcatttaagggtaaatttctatgacccttaaatgcccaaattgcaacacagaattatttttccaatttcaaagagactgatggagatgaagatga

SEQ ID NO: 530000 - DNA, 673 bp, Homo sapiens
ctccattacgtgctactgatgcatcgcttgctggatccacataagtacagatgcgacaatgtacagcacatatgtgaagaatggtaccgtcgttgacatccacgtatagatcgggcagcatctccgagtacctgagccaggacactgtgtctgtgccctgccagtcagcgttgtcagcctctgccctgggcggtgtataagtggagaggcaggtctttggggcggcaccaagcagccaggcatcgccttcatcgcagccaagtacgatggcatcctgggcatggactacccccgcatctccgtcaacaacgtgctgcccgtattcgaaaacctgatgcagcagaagctggtaggaccagaacatcttctccttctaccagagcagggacccagatgcgcagcctgggggtgagctgatgctgggtggcacagactccaagtattacaagggttctctgtcctacctgaatgtcacccgcaaggcctactggcaggtccacctggaccagtgtggaggtgggccagcgggcttgacctgtgcaaggagggctgtgggccattgtggaccacaggccttcctcatggtgggccggtgcatgaggtgcgcgagtgacaggcctcgggccgtgcggtgatcaggcgagtacatatccctgtgaagggtcacctgccg

SEQ ID NO: 530001 - DNA, 518 bp, Homo sapiens
gtgctgcgtgagatctagaggatcccggggggggctatgtattgggtagtcgcggcggcatatggtagcggagctcgaagtcgtagtcctggacctagttgtcgaaggcacccaacacacgtgcctgccctctctttcagctccaggtgccgctcagctcgtcggccatctgagtgagtgtcacgattcatggcataggctgtactccccatctgcaatagtatttgggctccacttcactgatctgcaagtttgcagggtgttgcaataggggtgcagggcggaccggttactcttcctgacatgcagtgagacatatttggcattgaagtactctatcatggctcgagagtgctggtccatcagtttctgagccagaactgaggcgccggatgggaacgctctcacagccaatgaggtgatatgtccatggggcacatcatctgggtccccttccattaaggccaggacataacccacaatcttcccatactcgtccacagacatgtacgagagct

SEQ ID NO: 530002 - DNA, 337 bp, Homo sapiens
tctgccttgggctcagctatagctggggctgcagcagcagacaggagcagctgtggtggcagcagccacaggggcagtagccacgaagggcagatggatcagccaagaaggccttgacctaagcaggacgtgggccggtgtacatcggtctccacagatcaggccaggactcgttagtacccgttgactaagtgaatggggtactgatgcaacaagtgggtatgcacatctgcagaccgacactggaaacattgcggacacacctcgcaggaggtcggagactgcagagcttccatctgtgagtatcaagcagtacagggggggaaccatctagagt

SEQ ID NO: 530003 - DNA, 339 bp, Homo sapiens
tgaattaggaaggatcaaaaaaaaggctttggggggagaatttagggcccccttggccctttagggagcagaccttccactgccattgtcctgtgagccgccaaaaaccccaccggggggccggcaggtcccggtttagggcagcccagggcccccattctggggtcctcacaattgcctcccctagggcggttttccagaccctcctccttttttttccccacatcggcccctggtgttcccattttggggttttcaagtccatgaacagaaattgtggcattttccccaatggtgattaaacataataaacaatccagaaaagcagttttgcccaga

SEQ ID NO: 530004 - DNA, 519 bp, Homo sapiens
atccccaacgccatccagatctgcacggagagcgagaagcatttcttcacttacctttggggcccgtgaccgctgcttcctcctcatcttccgcctactggcagaatgcactgcttgaaaagacgctgatgtccccgcgagctctggcacctggtgcatcagtgctacggctcagagctgggcctcaccagtgaggatgaggactatgtctcccccttgcgagctgaaactggtctggggacccccaaggaagtgggacgatgtgatcagcacctgagcgacaatcacactccatcgggggcagctgaccgcagccaggagccaagccacagtgggttcgcgccgaggcacatagtacacagcccaaaacttatccccgagccagccagcgaccgcagaccatggggcacaggaggaccaacggaggagcaggtagaaagccagaccagacgcctcctccagcacagacagtgaacccggatggactgaagaccccgagccacagagccccacacagac

SEQ ID NO: 530005 - DNA, 108 bp, Homo sapiens
tgtatgaagagaaatcaaatgagaatctaattccagcttggatgccagttactcttgtgacttggaggaagttctttaactctgtttggtattggagtttacagagag

SEQ ID NO: 530006 - DNA, 279 bp, Homo sapiens
tttttttttacccccccaattcccctgggaccccccccccctttttttttcccccctttaaaacccccgggccctttcccccccccggttttttctttggccccggggggggtttctttttttccccgggacccccctttcccctttggccctttttggggccccttttaacccatttttttccaaaaaaccgggttttgcccgtccgggttttcccgggtttttttccccccccccccccccccccggtgggggggggggggggggggccgggtggga

SEQ ID NO: 530007 - DNA, 724 bp, Homo sapiens
ggtggctttgagaagcacccagagcactactgcgagcaggtctggctgcagatgcctgggctgctcccatcgccatgcagatctacaagaagcacctggaccccaggcccgggccctgaccacctgagctgggcctgggctgggccagctggcctgctgctgcctgcaccgccgggccaaaaggaggcctcctatgacccaggtgtacgagaggctagagaagctgcaggcagtggtggcgggggtgcccggacatttggaggccgcctagatgtatccctccttcctccgtcaggaggaactccctacgtgtccagctactggcatgagctccacagtggggctgctccatggcagccctggcagcgccaatcatggagccagtgcccaggcatgcagagacagctgcagagaggcccaagcagtccgtggacagtgactagagcctaggcgggctctctgctgcgctgcgctctggacacttgacctccaaagctgcacctctggacccagcacccctcaggaggccggctgtcctcagggggactacggcagtgagaatcgagctgggggaggtggacccaggatcccggaccacaggcgtgaaaaggactggcccttgtgcatgctctgcgaatcatcgtcgtcaagagccaccgcggattatcatccaaccctggcccgacagaagatggtccacatgctggccctgtacgagtgatgg

SEQ ID NO: 530008 - DNA, 453 bp, Homo sapiens
cttagtggctggcagaggggactcttttccccagtgactcatatgctcctttttttctagctgaatttcagttttattttcagctccaatcagtggcaatagaggaatccgtgtgctttatttctcctgctccacattcctccccacagtctcccagaggctaacattctcccatcctccaaagagaagaaatccacagcccagagcagagcaggcctggtggcttcatgacagtcatcagtgtggccccatctactagtgctctccaagtccagcaatgtgttaacccttacaggcattatcccatgtaacccctaacagccctaggaagtagacactactagtacctataattcacaggtaagaaaactgaggttcagaaaggcaaagtaactggttgagggtcacacagctaagaagtcgcaaagccagagtcgaaaatattcaaaacca

SEQ ID NO: 530009 - DNA, 333 bp, Homo sapiens
ctctccacaccatgattccttcaacaacatgtttcaagctttcccaggtagggcacggtgtcctacagaaaaactttgggtttgtctttcccagcgtcttcctgctgttaacagaagggagggcacttttggtacgggtggccatggaatcaacccattgggatgcgtgttgtacagttttaaccaggtggttgaaaggctcattccatgtcctggttgcccggcccatgggagtgcctttccggatctattttcgtaggttcattacgtatgtagggttctcatttccttcagtttatttattttctacataaaatgataggttatacctta

SEQ ID NO: 530010 - DNA, 350 bp, Homo sapiens
tgcctcaccttgtccctctcctgtctggtaaatccaccaatgagacttgaaaataggcggaaagcaatcagcaaaaagaacagagatctcaacagaggcatccagtttgcatggcggacccctggcaggctctgatggggatcctctggatgagatgcgagggtgagctgaagagaggactctggataaagtccaagaaaaaaagcaggtccctccccagctccatgcagccaagtgatggcaaggagacacctggcagaagctgggactcactctctggagatgctgagccagatgcacccctgcatttggtaccccagacacagctggacggggtgggggttgcacta

SEQ ID NO: 530011 - DNA, 442 bp, Homo sapiens
gctggtgtactccccaggaaattcactgtccagcctcttatcatatttgtcgtgggggaaagacaatggtcccgtaaagtgattctgatcacactccttcaatgtcaaataaataatctcttgaaactggctggatttgcaaaccctaagggaattatgagaataaccctgtccacggttacaatccagcccccagccctgggcgaaaagcccctcactcctctttaccaccagagagatgagaccagaaggccctgattaaacactcaccccttcaggagaacccagagttatagaagggatgtcagtggcgctgagcagtagctttaagtcccagaaaagccttttcttactatgcaaacccactcgtgcctggatgcccactttacattcgtggtggccgcctccaccctggcagaacccattctgagcacagatccca

SEQ ID NO: 530012 - DNA, 365 bp, Homo sapiens
agatgatcgacgtcatcggggtgaacacagggcaaaggctacaaagggggtcaccaggtcgttggcacaccaagaaagctgcccccgcaggaccccaccgagggcctgtcgcaaggttggccctgttatttggggccatggccattcctttcttcgttttagggccttctcttttgggcacgcgcttgggcagaaagggctacccatcacccccactttggatccaacagggaggtttttttaagagttggccacggctatccttatcaaggacgggcaaactttatcaaaaacacagtctccactctactatttcctctcttacagagcatcaaaccccctggggggcttttttcactatggtg

SEQ ID NO: 530013 - DNA, 166 bp, Homo sapiens
ctgctgcgttgacgtgacgaccgactggaacctagacgtgacgactgcacgctgacacgtgacgtgccaatgcaccactctgctgacgtgacttcacgaccctgaacactactgaccgacgtgttggccacggaatgcttggtgactccttggaccggacgacgcc

SEQ ID NO: 530014 - DNA, 658 bp, Homo sapiens
  misc_feature (570)..(570): n is a, c, g, or t
gcaacaagagcgaaactccatctcaaaaaaagaaaagagaaatataaggtgttcaccatgattctgatttttaaaaattcttttgaaaatatgggtattaatctagaagaaagactgaagagcacatcaataaaatattaatagagatttcctttgattatgaatgatgagtgactgtgtcttctttataattggtattgtttgtaagtttttatattatataatcgaaatgtttaagtgcttttggttacaacattcattgttatttattctaggttttcaacaaatacttttgggctttactacagcgtctataaagcatagaaagggttggcatatttagactgcttaccctagggtgggagagaatacagttctttctcagagagatgttcgtaatacaatagctgtattcttcagaggctgagtgtagttgctgcggaagtgtttgactatgaggccccctggggacctgaacatccctgactacacagagggattagactgttcagtttttgccttggctgggtcctaacctatgtgaatgtagctgatggtgcatataactanactcattaagtgacgggtatcggtagttctgagcagttatgtgggaggccgcacgctagcaatgctgttggggagagtgaatgcgggg

SEQ ID NO: 530015 - DNA, 104 bp, Homo sapiens
cagctcggtaccctgatgtgcgatcttgaatatagttggcagagaccacatcgcaataagcatgagtttagtcctccatgtagaaaccagatacactaaactgt

SEQ ID NO: 530016 - DNA, 852 bp, Homo sapiens
  misc_feature (27)..(27): n is a, c, g, or t
  misc_feature (155)..(155): n is a, c, g, or t
  misc_feature (180)..(180): n is a, c, g, or t
  misc_feature (182)..(182): n is a, c, g, or t
  misc_feature (279)..(279): n is a, c, g, or t
  misc_feature (309)..(309): n is a, c, g, or t
  misc_feature (401)..(401): n is a, c, g, or t
  misc_feature (412)..(412): n is a, c, g, or t
  misc_feature (487)..(487): n is a, c, g, or t
  misc_feature (616)..(616): n is a, c, g, or t
  misc_feature (620)..(620): n is a, c, g, or t
  misc_feature (633)..(633): n is a, c, g, or t
  misc_feature (642)..(642): n is a, c, g, or t
  misc_feature (647)..(647): n is a, c, g, or t
  misc_feature (695)..(695): n is a, c, g, or t
  misc_feature (702)..(702): n is a, c, g, or t
  misc_feature (738)..(738): n is a, c, g, or t
  misc_feature (740)..(740): n is a, c, g, or t
  misc_feature (755)..(755): n is a, c, g, or t
  misc_feature (787)..(787): n is a, c, g, or t
  misc_feature (845)..(845): n is a, c, g, or t
tcgcgcctagctgcgctggtaaaactngctaacgcgatctatcttaattagccacccacagctgctaccgccgccccatccccagggaccacacagacccaggggacaaagaagggcgcgggagacagcggctgaggaagcctttactgcggggnggccggaggatcgccgagctcaggntnccccaccgcaccgcgcccggcctcgtcctctgccccaggcccggccccgcccccagcctcggccccagcctcggcctttgccggaacgtcgccgaanacttcccggtgcatggaggtgacgtagttngagccgctggggtcgtccaggcgcatccgcagcaggggcaggaagcgctcggtggtgaagtagcgcagggtcggcttcggggcgcgcaaagngtgaggaaganctccgccacctcctcagggttctgcgccgcctcgcgaaaaaattgcttgctgtgggcgaggtattggtagaagcngtggaaggtgtggatgtacgtacagtccagcacctcctctgggctgcccaacaccttctccatgaaggcggtgtgcactgggccgcactcgatcaggctcaagctgctggccggagagcaacgagtagnaggnggcggacgcagcnaggcccagncccanccccaccccagtccagccccaccacgtcccggccccgaccgcgagcanaccgctngctgggaagtgaggcggaaggcgctggggataacananatttgaacgcgggtnctgccgagcagcctccaaatcatctgagctanagggagcctggtgtcagattcgatctacgggtcctggcgctgtgtgacttgggcagtnactaact

SEQ ID NO: 530017 - DNA, 129 bp, Homo sapiens
cttagttagttggcatgatgagcgacggctgatgttcgatatactatatgggatagggtgtaggtgtgcttgagggtagaagtggctaggcatttttatcttagagcgaaagctatatcactgcgcccg

SEQ ID NO: 530018 - DNA, 174 bp, Homo sapiens
aatttttttccccccatgcagggggggctttttttgggccaaggggggggccggtcctttccccccccaaaatgtgttttttttgcccggaaagaccccccccccttctggggactgtttgggggggggggtggggccccccgtgttgttttaattaaaaacctcgggccggga

SEQ ID NO: 530019 - DNA, 138 bp, Homo sapiens
tctagaggatcctccagaggacaaggaggcagaggcacaatgaggatgaggagttggctacaccttcctgtgcaggttgaaggcatgtcgtggggcctcctactgggaggctagaagcatctccatcgattttagcag

SEQ ID NO: 530020 - DNA, 383 bp, Homo sapiens
cgcgtcgaccccgtcctgtggtctgcctcagtttctctctctctccttctgtctctgcctctgtctctgtctctctctgcctgtctctgcctctgtctctctctgcctgtctctgcctgtctctgtctctctctgcctctgtatctgcctctgcctctgtctctgcttctgtctctgcctctgtctctgcctctgtctgtctctctgtctctgcgtctgcctctgtctctctgtctctgcctctgcctctgtctctctctgcctctgtctctgcctctgcctctctctctgcctctgtctctgcctctgcctctgtctctctctgtctctgcctctgtctctgcgtcgacacgcccgcgaatttagtagtaatagaatagacc

SEQ ID NO: 530021 - DNA, 293 bp, Homo sapiens
gctcgaccgccatccgactaccgctaaacctgccatctgaacctcacgtgtcatgggaacctcgtacctatatgcgccggctcattcaaaaaacgtggtctgaccccaatatctcaccaatatctctcttcaagggaacgtggtaccgatgcgccccaggtcacccgagaaccagatgccggtcactttgccgaccacatcctcatcggccacctgagccatgaagcggctgtcattgctcacatcgcggttgtcgcccaataagtacacatggcctggctcgacgcgcagag

SEQ ID NO: 530022 - DNA, 862 bp, Homo sapiens
tcttgttgagacttttttaaaactgataataatgctgaattatcttaaggtgagatgttaagcccacttagtacttatcaagtgtaatggagcttatgggtagaagaacatgtctactaattacaaaaaaaaaaaaagaccttgcttggcaggctaattccttaccatttccagaaaaaatgggtgtttggaacaactcattggcctggcctcgggaatctgataaaccctgggcctctggatggtttcaagcctggtgtatttcccagtacctaaatttcccctggaaatttggatacacttcggagggaggcactgctttcctgccgttgacgacaaacaactacttctgttggccatattcacgtacccgggggcttatctcacatcaccggattcggatatccatgtcctttccatagtcgtatttggccccgtcaagcttacaacacacttaacacaagattcccaaaatgccgtcgtccaacccggggctcccatcacccaggtttggatttccgcaccgccttacactctgcgcaacttggacccttcggtgggcctccgactttttctaaccgggcacgttccctcttcccatgtcggtggcactttccttctcaactttcgttttttagaaatttaccccaacttgaaaagattgttggcaccatcgtccttctttgtctcacatatttggccacgcacacaccatctgttccgacggttgatactcaccaaacgtcatatcctgtacacaccacttccacctgctaccaccccctcgacactcattctactcccccataacccaccgacgcatcacaccagtccgcagccctccccccaccccacccgtcaa

SEQ ID NO: 530023 - DNA, 278 bp, Homo sapiens
tctatttataaagaggatcccctgctggcactttgatatctgtgcttttaaaattagatttttctgctttgcctctgtaccttccttttccttgcacacagatatacagaccatgacatatttaatgtgtatattaaagattgctttcattctctgaatgtttttcaatcactctctaatagttaatttgaacaaacatgtagaaaaattaagactgcattaacatatttgcttcttaattcacgtaacattaatatggctggccacagtgtctgact

SEQ ID NO: 530024 - DNA, 731 bp, Homo sapiens
atgggaccaggagcccgccacggggccaaggcaaggcgggggcttgcggggccaaggcgggcccgggccccgcctccggtggaacgccctgggacgagcctcaaccccgcccggtgcaccgccgagtcaagggaggcaggtctcccacccgagtaatggtgggacggaggaataccgggcctaaaaagcccccgcgggagccgcaagccgggaacgaacgctctatgagccacagacgaactcgaagggagactctttcccacaccgccttcccgggagacccccacctaacgagcgaacttcaggtgcttcgggaggcgccctcctgccgaaccccacggtgcccacccaccacccgtagacccgggaagaccctcgggagacaacccggctccaggtccggggagcctcccctaatgatgggcggctaactggagggaggctgtgaggaaagaaaggggtcggaggagaaggaggagaccccacacaaggaggaggaggaagaggcctactaacccgcccgcgccgcccccgtaactcggaggaccgaactcggcaggcgtcccgagatgcgccacggctcaacagaagaacttggccctgagtcgggaaaatttaatcgtctgatttgacgttttttacgtagcttttgtatttttttttttaatttgaagggacactgatgaagcctgccatacccctcccgagtctaattaaacgtataatcacca

SEQ ID NO: 530025 - DNA, 179 bp, Homo sapiens
ctcgagtgcgaggtggagtggactaccacgcgtacaacggtctcgacactggcgcgcgttgaactgcgccttgttcgatactcgaaccagggatcgggctcgccctcaagggacaactgcaaccgctagcagagcgccttgcggttgtcggcatcgtcgagcaccttcttcttgacatg

SEQ ID NO: 530026 - DNA, 194 bp, Homo sapiens
caccccccggtctttcctttttttgttcgggggggcccccccccccccccttttttggccgtttcctgggatttttttggtttcccccccgttccccttggggccccttttttcctttttcccccccctccccagttgggttccggggtttagttttttttttttgattaaaaacttatttcccaaaaaaaaaa

SEQ ID NO: 530027 - DNA, 734 bp, Homo sapiens
aaaatggcaataccacaccttcgcacttttttaacaggttatgccaccaaagtagcttctgccgcctgggtgaaataagaaagggtcccgtgccccgaaacgattggtgggaccggcatgcagggtttccccttcaagcagggtgtctttgcccatgtccgtgtccgccggctcatagtacaagagcattcctgttcagtcgcaagtagccctgcagaaagaaagagaaatccagtttgtggctgcattgtgtatgcgaacatgagcgttcgccacttggctcttgtaaaaaaaggaccggagtatactcctggcgtgtcttattttacagtgcctagccgcctgggcccccaaagagctaacagaatccgcaaacttgtcaatccctgtaaaacagataatgtccgccagtatgttgtaaaaaagcccttcaataaagaaggtaagaaacctaggtccaaagcccccaagattcagcgtcctgttactggctgtgtccaacagctcaagcggcggcggattgctgtgaaaaaacagcgtgccaagtaaaataaaggagaggctgccgaatatgtttagcttttggccaagacaattaaggaggctaagtagtagcgccaggtacaaatttctaaaagacgcaatctttcccctttgcgagcttcaacttctaagtctgaatccaggcagaaataagattttttgagtaacagatcaataagatcagactctgc

SEQ ID NO: 530028 - DNA, 180 bp, Homo sapiens
tatatagtgatatatatatagacctatcttttctgacgccatctttccatagggactgttagctggaggctggagtcttaccaaacatatggaaagagattagcttctgtccttcaggactacttctagatttcctagacgtgtcagagaaaatccccacacttctttctttaaaacatg

SEQ ID NO: 530029 - DNA, 496 bp, Homo sapiens
tcgtgtgtctctatattcactccatcacttcgtacaagtgtactatggagacatattcactaaaaaatctcgtacgaatccattgataataaagcactgtatcatacatttactgctttcggtaagcatcctttcagtgtaagtgtggttcgcgatgaaaatggttccagatggctactggattcgtacactttgagacgcacgaaacagctgaaagagctattgaaaaaatgaatggaatgctcctaaatgatcgcaaagtatttgttggacgatttaagtctcgtaaagaacgagaagctgaacttggagctagggcaaaagaattcaccaatgtttacatcaagaatttaggagaagacatggatgatgagcgccttaaggatctctttggcaagtttgggcctgccttaagtgtgaaagtaatgactgatgaaagtggaaaatccaaaggatttggatttgtaagctttgaaaggcatgaagatgcacagaa

SEQ ID NO: 530030 - DNA, 313 bp, Homo sapiens
agcatactatgggtatgacctggcgtttctcaaagatcacaaagatggaggggtcggacacactgggcacgcagctatcatagaaggcgttgctccagccctccttggccggcggacggacaaaggaggcattgcccctgacgaactcgcccaccagcacccgggccaggaacatcgtgtgggtctgcgtgtcggatttgctgtagtggtggaatatgcagcatctcgggcaaagtagctccccttgccgtaggaagtgccatgaacaccacagacccgccagtcaaagttctgctggcagatggcgtccaca

SEQ ID NO: 530031 - DNA, 164 bp, Homo sapiens
tcccgtacacatacttgacacaactggttttattcccaatgcctcttacaaagaatcgttccatgggtggcaggaggggtgttatcatggtgtgatgcaccgtgacttgttattcacgatgtagtccagtgttccatctatcacgttatatacctttcgaaaaa

SEQ ID NO: 530032 - DNA, 494 bp, Homo sapiens
gcatcacacagtgtgtggcttcccagtgtatacgtgttacgtgacactatactgtaggctattaagtgtgcaggagcattatgtctaaaaatgtacattccttaattaaaaataccttattgctgagaaatgatagcaatcacctgacccttcagcaagttataatccttttgctggtggaaggtctcaccttgatgctgacggctgctgacttaccagtgtggtggttgctgaagtttggggtggctttggcaatttcttcaaacaagaacgataaagttggccatatcagttgactcttccctttaggaaacatttctctgtagcatgcgatgctgcctgacaacattttacctacagtagaacttctttcaaaattggaggccatcctctcaaactctgccactgccttatcaaataagttcatgtctatgctgtattctttgttgtcatttcaaccatgttcacagcatcttcaccaggagtggtgttca

SEQ ID NO: 530033 - DNA, 194 bp, Homo sapiens
ccaaagaagtgaaaaatatgtacacacaaaaacgtacatatgaattttcctttgtttttggagataaggtctcactctgtcacccaggctgaagtgcggtgccataatcatggctcactgcagcctcgaactcctcaggctcaggcgatcctcccacttcagcctcccaagtagctgaggcaagagaatggtgt

SEQ ID NO: 530034 - DNA, 710 bp, Homo sapiens
  misc_feature (40)..(40): n is a, c, g, or t
  misc_feature (101)..(101): n is a, c, g, or t
  misc_feature (116)..(116): n is a, c, g, or t
  misc_feature (159)..(159): n is a, c, g, or t
  misc_feature (217)..(217): n is a, c, g, or t
  misc_feature (269)..(269): n is a, c, g, or t
  misc_feature (276)..(276): n is a, c, g, or t
  misc_feature (300)..(300): n is a, c, g, or t
  misc_feature (334)..(335): n is a, c, g, or t
  misc_feature (353)..(353): n is a, c, g, or t
  misc_feature (386)..(386): n is a, c, g, or t
  misc_feature (400)..(400): n is a, c, g, or t
  misc_feature (444)..(444): n is a, c, g, or t
  misc_feature (446)..(446): n is a, c, g, or t
  misc_feature (485)..(485): n is a, c, g, or t
  misc_feature (492)..(492): n is a, c, g, or t
  misc_feature (516)..(516): n is a, c, g, or t
agaaaacctctgcgaggaaagggaaggagcaagccgtgantttaagggacgctgtgaagcaatcatggatgcaatgaagagagggctctgctgtgtgctgntgctgtgtggagcantcttcgtttcgcccagccaggaaatccatgcccgattcagaanaggagccagatcttaccaaggttgcagcgagccaaggtgtttcaacgggggcacctgncagcaggccctgtacttctcagatttcgtgtgccagtgccccgaaggatttngctgggnaagtgctgtgaaatagataccagngccacgtgctacgaggaccagggcatcagctacnnggggcacgtggagcacancggagagtggcgccgagtgcaccaactggaacnagcagcgcgttggnccagaagccctacagcgggcggaggccagacgccatcaggctgngncctggggaaccacaaactactgcagaaacccagatcgangactcanagccctggtgctacgtctttaagngcggggaagtacagctcagagttctgcagcacccctgcctgctctgagggaaacagtgactgctactttggggaatgggtcagcctactgtggtaacgcacaggctcaccgaattgggtgccttctgactaccgttagaattcatgatcctgataggcaaggttacacaaccagaacccagtgccagcactggg

SEQ ID NO: 530035 - DNA, 215 bp, Homo sapiens
  misc_feature (25)..(25): n is a, c, g, or t
  misc_feature (32)..(32): n is a, c, g, or t
  misc_feature (108)..(108): n is a, c, g, or t
  misc_feature (119)..(120): n is a, c, g, or t
  misc_feature (148)..(148): n is a, c, g, or t
  misc_feature (208)..(208): n is a, c, g, or t
  misc_feature (214)..(214): n is a, c, g, or t
ctcaagttcacctaatcttgggcanccaattntcttagagaaaggccagcgctttcaccctgcgagatggcaaccggtctattggcaccggtctagtcaccaacacgntggcatgtctnngggggggaggaatatcaaatggggttgngtgtgcagatctctgctcagcttcccttgcgtttaaggcctcccctagccagggctcccncctgcnt

SEQ ID NO: 530036 - DNA, 318 bp, Homo sapiens
cttcagcccagtagcagtggagcaggccctgtcctgccctcccagcaataaccacctccctggaggccagctgagatgcctggctacttggcaccagggacttcctgacaccacagtcaattaattcctcaggggctgtggctggagaaaaggtgcccagcccccaccactcctaagctgccccccaacctctctatggcagagcggcagggcgtggaaatgtccatagcctgatggggattgcgtatgatctgtactgttataatcacaaccattttgctaataaaacacaacctctggatggtgaaaacacatcga

SEQ ID NO: 530037 - DNA, 183 bp, Homo sapiens
tcttcgtgtatttatcggtaactcgagggtctcaagggtgccacgaaagcatgtccaccttggcagaattcctgctcgtggaaactaagtcaatatatgactagaatagctccaattggggggagaacttgtaactaagctgatgggtaacgaactgaggaacattaaagttgcgggtttaca

SEQ ID NO: 530038 - DNA, 244 bp, Homo sapiens
ttctttctcattcttttctttttctttcctttcttctttccttccttccttcctttctttttatctttctctctctctctctttctttctttgtgggtttcactctgtcccccaggctggagtgcaatgatgcgatcactgctcactgctgcagccttgatctcctgggctcaagtgatcctctcaccttagcctccctaagtagctaggactacaggcatgcacccccaagcccagttaatta

SEQ ID NO: 530039 - DNA, 135 bp, Homo sapiens
tcctttatccaagcagtcgggacacggtgggttagagggatccctggccagggtgaggggatctgaggaactatgggccgaggtttgagtacagagttggcgttgacttcggttcgactgcttggattacaagga

SEQ ID NO: 530040 - DNA, 1164 bp, Homo sapiens
  misc_feature (274)..(274): n is a, c, g, or t
ctattctctacaaaccacaaagacattggaacactatacctattattcggcgcatgagactggagtccataggcacagactcataagacctccattattcgagccgagcatgggaccagacacaggacaaaactatctaggtaacgaccacatctacaacgttactcgtcacagcccatgcatttgtaataatctctcttcactcgctaactaccccactcactacactcgcgacgcgcttcgcgcacactgactacgttccaacataaataantcaggatgacccccgaaatatggcgatattcccccgcactacaccaacactcaagcctctcctgaactcatataacacatcacacatcatcatacacatacatccatgacatcgacactcctgcataatagataggaggcacgagagacaggcaacaggcttgaacagatctaccctcccctctagcagggcaactaactcccaccctggggagcctccgtagaacctaacccatcttcttccttacaccttagcaggtgtctccatctaaatatctagcgggcaccatcaaaatcacccatacaacaaaaaactatatacaaatataaaaaccaccaaagaacaataaccacaaatacacaaaagccaaatacttacgaaagaatcaagacctaactcccaccccgcccctacttctccctatctcatcacagaaacaaaaagaaggagataaaaaataaaaaaaaacagcgacgctctccacacctactcacagaagaaccacgaaggcgcgaaggaagcaccacaaaaaatccccacaccatcaaatagaacaaccagaccaaactcgcaaaacaatcaaaaaacaaaaaggactcacaaaaaaacaacacaacaagacatcataacaacggcaaaaaaagaaaaactgcctcaccacagaaaagaaagaaacctcccataacagaaaccatcaggcaccaagagacaccccatcaaccgcgacctgcgtcccgccctctctcctgcaggcccatgcaataacaggacaaaccaataaggccaccacagcacccccgccgcccgcgccgccagccctcgccgcacgcggccacaagcccaccaaacagaaacacacacccccgcacacccccccgccagccgcgccg

SEQ ID NO: 530041 - DNA, 103 bp, Homo sapiens
atctggacactatgtcatcaattatattaggaactcctagacagcaatgctaccgttgcatacttccaggcagagtgacagatgaactgtgactggtttatag

SEQ ID NO: 530042 - DNA, 1634 bp, Homo sapiens
  misc_feature (339)..(339): n is a, c, g, or t
cgcggtccctaagtataagggacatctgtcaaacaatgtctgcagcgccgtctctgtggtaagtagccagagactggcacatggcatggcatggcagtggtagccctgaaggcttaccatctgcctagcctagtgtagagcccgaccttgaccgttcgtgcactgagactgcgtaggatgtgtgccatcaatgcgtatactaggtgatcaattctcatcaagagagtgagacaatatcgactagggagaatcttgaatcatggaatagagactctcacaatgaggcagcagtggtagaaagagcgttcatgtcatgtgtggagtactcgtatgtgcacntatgatcgcccaaactttcaaggagcctgcatgactggagtagctccagttggttgatttactccatcctaggaaattcagctgggttaccaattcaggtgtactgggcgggcttgtgatagcttattagcctgaattcgagcccaccgtgagggaggaacctgggatcccatatcactgtggaatggggccccgacgtaacaccagctttctcttggggaatagctcgttcttcccttatcaccttgcgaagaaaatccccattgtgggccttggctctttgttccctgggccgtattggaacatccgtaaagttaatcccctagggaatggccgttgcacatgggggttacaccccatatgcgggggttttggaagccaatctcacatagccccttctcatcccagttgggcattggggcgcactcctctttaataaggcctggaagggttcctaaagcgtttaaccacatactttttgtcggctcggtcgttgggctgtgagaccttccttaggcaaagttgtggataccccctcaaagtgtgtggccacaatgtgcggtggtggaccgagtcttatgccctaaaccacctccaatttgtgctattcaaaagcgctctccgcgtgtgcagggcggtccacccatagcaggggctgtgggggtacccgcaagcgaggcgctgagcagcgagagagtgcaatttgtggcaaccggccctaagggggctatgtcttggcccatgcgttgcacgtgggagtcgacccagtggtttgccactacggtatcgatattaccggcccccatgtggggctatagccctgggtttggcgctgtggcttccctgtgggaaccgccacgtacgtgggggcgatctcccgggagggggggccccttgctccgccagagggccatggtgggcgcacaaggccgttggcgccggcgtgggacccacaacaggcggggtggtggatagccaagggggagcaggggaagacccctatacacgtggtccgtaggcagtgaaacgacgcgaacacggggggatctacccgacgaggatccccacggaggcccatcatgggagccccctgtgtggacggcggcagcaccaacaaacttccgtggtgttgcacccgcgggggaccacacaggagagagacgagcggccggatagcaccaccaacacacgagaggggcgcactacagctgaggacaacaggggcgctgcaaccaaatggtggccgcgcagggaaagagaccgcccgactaaacccagcctgccactacagagta

SEQ ID NO: 530043 - DNA, 802 bp, Homo sapiens
tgcgctgtggctgactgggaacgctagagtatcgtcctagaggaagtgggcagcacccctggagcgctggcccatatcatggcttacactacctagtggtcgtcgataccacacataactttgtacggtgattgtccaagagaatgtcttgtccgtcgttgagccaacctatacaagcccacgaaagaacgatctttgagggagcaagattgggttcgaatctgcagacgctcgatgcgagcgattaccacttgaacgcacacaatagttccttagcaaatttctccgcataaccaaggtgagcccactttgatgcccccgtttctctggcatttggacactggcgttggaacatagcagtggcattaggaggactacctagtgtcttcctcaatggcccgaagtcgacactcaatgcgttgcaatgaggacaacggctccgatacttctttaccccgtgtactgtgtcacacgagggcctaccgatggtcaaccctttgaccggaacttggacgtttgtaatccccttgcatgccgacggtggtcgcgatcctgtaagcatacacaggcatttccgtgtccgcgacctgtgatcacagacggctcccttttgcttccctttggggcatctttcctacgcgacttggttctttaccgggtacacttgcgtggccgggtattctacgtgtacccttgggttccgcatgggttgtggtcgccgcgactcatcgggttcgtcccttcgcgtccgtttcttatttccatatccctcccccgctcgttggcctttgcgttctacgcg

SEQ ID NO: 530044 - DNA, 396 bp, Homo sapiens
  misc_feature (268)..(268): n is a, c, g, or t
  misc_feature (273)..(273): n is a, c, g, or t
  misc_feature (303)..(303): n is a, c, g, or t
  misc_feature (305)..(305): n is a, c, g, or t
  misc_feature (325)..(325): n is a, c, g, or t
  misc_feature (327)..(327): n is a, c, g, or t
  misc_feature (329)..(329): n is a, c, g, or t
  misc_feature (349)..(349): n is a, c, g, or t
  misc_feature (354)..(354): n is a, c, g, or t
  misc_feature (375)..(375): n is a, c, g, or t
  misc_feature (381)..(381): n is a, c, g, or t
ccttctctccggaaagagttcaagagttaagaaccttgctgcaagtcatgcccttccaagtgcagcaaccccagcccatggagattgcctcttttaggcagttgctcaagccatgttttatccttttctgaagagtagtttagaccaagccaattgcagaaccacattttttggttcccaggagagccccattcccagcccgtggtttcccgtgccgcagttttatattttgcttcaaatcagccttcaggtttcccacagcatggcncctgntgacacgagaacccaaagttttcccaaatntnaatcatcaaaacagaatccncncnccaatcccaaattttgtttnggttntaactacctccagaatgtgtncaatanaatgcttttataata

SEQ ID NO: 530045 - DNA, 107 bp, Homo sapiens
ggtcctcccttggaataggtaataggagggcaagagaagggctaagggccctccctagaggccgttacacaaccatacaaatatatccaagagtacatatcaaaggg

SEQ ID NO: 530046 - DNA, 313 bp, Homo sapiens
cgtctctagcaggatcccctcacacgctcttcttacatgaatctgtgtcttgggttaactccactttgttgaacttccactgaaggcttatattgtcttactgctgctccaggtatttttgtttggaacatctatcacagtagggcacagctgtttattgtattagcagaatcgaccgatatgcttgtggccaccagaaagttttacggtctttcaagttgtatcaaatgcacctgcagaaacgtttaatgtcttctcaggatgccaagttggagcttaaatgtgacatcaaaccagttgcaaatagtgttca

SEQ ID NO: 530047 - DNA, 1266 bp, Homo sapiens
tgaaaacacgggtaatccaggtttattatagaaaaaatgccaccattactctttatggaatgcaagcgccagcacgggcccctttctctccaaagcacagggggcaccgcagggcaagggggcaccaaagggcaaggggcctccgctcccctgtggccagagagtgcacgggagaaccgcctgggcgctccactataccatattcaccatacaggccaggaaacccctccctcggagcgccctgtgggggctccagagagtcgtctgtgtgtctcaacaactctctctgtgtctctccacagaggaaagaggctcttcacactctgtgagagaggcgtttgtgcgcggctcttgtggtgacaacacaccctctctggacacttctcatgaaggacaaactctctcaccaagaggcggaaaaaagtgtgtgtgccacacaaaaccacgcgtgtctcaaaaatagagcggcaaacaaaagtgtcgttccaagggtcctcacacaaaaagtgtctccacaccacctgtggtcgttgtggtgggcgcctccccacaacaaacgacccctcttaatgatcgcagggcgcaacacaaaagaaggccccccccctggtggtgctcttcctggttgtggggcgcccaccagaaaaaacgcccgccctcgctgggggggggagaaacccacccaacaggggtcatttcatgtaggagtggtgttagtgtgtcgatccaccaaccaaccatgtagtaattgtttatttcttcgtcctccccccaacaacaaccaagttagtttttccaataaagaggggccgcctcttactttcttcctgacagtaaaagccgcacacaatatatttcttcactacagcccgcactattggatagacaaagtgtgccgcttactttctatacgccaggtagggcgctccccttacacagcagagggggaggggcggagatatttacacccccccctcattagttcaccacaacacaagaattggttgtgcgtgtcccaaccacgacaaggagagagggggggcgagatatgaattcacattccgcacaccgcaagccgatgtaattaacatacgacgcgggcgtagcattttatactcgcagcacaacaacaaacaacaatatctcttcctgcgcttctagtatcttttccccggcccaggacaagcgagtactttccccagcgacggggggggggggggcgccccatcatagtaattgataggggcgggggatcaattataatac

SEQ ID NO: 530048 - DNA, 508 bp, Homo sapiens
  misc_feature (337)..(337): n is a, c, g, or t
  misc_feature (375)..(375): n is a, c, g, or t
  misc_feature (407)..(407): n is a, c, g, or t
tgtagaggaccctgttgctaggctggagtgtaatggcgctgaatagctcgctgcaacgttgacctcccaggctcaagcaatcctccaaccttagacttttgagtagctgggactatagcgctatgccaccatgccctgctgattatttgcatcttttatagagatggagcctccccatgtttcctgggctggtctggaactcctgagctcaagcggtccacccatcttggcctcccaaaatgctggcattacagcggtgagccacccaggtggcaaaccttttaaaatatttatttgttttgtttgaaacaatgtctcgttgtgtctcccaggctgnagtgcagtggcacaatctcggctcactgcaaccaccgnctcccaggtgcaagctattctcctgcctcagnctcccgagtagctgggaccactggtgcctgccccaatgcctgggtaatttttgtatttttagtagagacggggtttctccatgttgtgcaggctgatctca

SEQ ID NO: 530049 - DNA, 102 bp, Homo sapiens
agtctacttagagtaaaccattacctgtgagaggaagcacacggaatgaaagcagtaacacggaagggtacacaacccctcaacctatcttatagtagtacc

SEQ ID NO: 530050 - DNA, 1006 bp, Homo sapiens
tggagacggagtctcgctcggtcgcccaggcttggagttgcaggggcgcgatctcggcttcactgcaagctccgcctctcgggtttcacgccattctccgtgcctcagcctcccaagtagctcggactacaggcgtcctccaccatgccgtggctaatatttggtatttttaaggtaagacgacgggggtttcaccggggttacgccgggatggtctcgatctccttaacctgggtgatccggcccgcctcggcctcccaaagtattggggattacccgggttgagccaccgggcccgggttgcaaattaatctttcttttttctcttttttctctgagacagagtctcgctctggtggcccaggcttggagttgcaggggcacggatctcggctcacgggcacgctccggcctcccggggttcacggccattctccggcctcagtttcccggagtagctggggactacgggggcccgccaccaggcccgggttaacttttggggtttacagtagagacggggtttcaccgggttagccaggatggtctcgatctcctgaccttgtgatctgcccgcctcgagctcccaaagtgctgggattacaggcgtgagccaccgggcccgggggggaaacccgattttggtgctaacatcttaacttggtgataaatctcaaaaacccctgacatagtctccgagatctgtaggggccaggttaccttggggaaaccggtatctaggggccaatccatctcttggcgcgggtcaattgtgcccccccacggacaggctgtgagccatggctcaatgttttagcccctatatgtgtgtccccagaaccacgccttatgggtggttcacacagggggattctcttctccccaggagaaaaggctgctcgcacacctgtggtgccacctttgtccattcggtggcgacataccccctgggtagaaaaagagatgttttacccagaacgagagccctgttgtcacagacaatagt

SEQ ID NO: 530051 - DNA, 141 bp, Homo sapiens
agaacatcctctttaacccagttcccaccctcacagtcagaggaaaggagcagtggcttccggttgaagccaccaacgctgatccacggccaagcccccagcgcaggtctgccaagccagaagcccaaggagcagcagcgc

SEQ ID NO: 530052 - DNA, 352 bp, Homo sapiens
gtggtgaacagctcccaaaaggattactttgaaaaaatagttttgtggcttttaaataaggggcatgttatcagctccccttagttatggcccaggcctcccacggaaggactttggggggagggaaagtcccgtgcagaatgcaggggagtcaacagggtcggaactttccaaaaaaggaggactgctgtggctgaccagcctgttttcctatgagcccaaaagacccaggcatagctgcaaaggaaaaaccacccaaaaatgtgtggggaggggcaaaaaaaaggggctgccccttggattttggaaagtcaaagccttttaacaaggaatgaacaggaataaaagccca

SEQ ID NO: 530053 - DNA, 255 bp, Homo sapiens
  misc_feature (17)..(17): n is a, c, g, or t
  misc_feature (79)..(79): n is a, c, g, or t
  misc_feature (88)..(88): n is a, c, g, or t
  misc_feature (145)..(146): n is a, c, g, or t
  misc_feature (188)..(188): n is a, c, g, or t
cgattctcctgcctcancctcctgagtagctgggagtataggcacgtaccaccacacccagctaattttttgtattttnactagagangggtttcacagtgttagccaggatggtttcgatctcctgacctcatgatccgcccgnntcggcctcccaaagtgctgagattacaggcgtgagcactgtncccggcctcaaaatcttaagaaaaggttcttttgggtgcatggagttttacatgggaataaattagt

SEQ ID NO: 530054 - DNA, 100 bp, Homo sapiens
tagagcaccccacagacaaatttatgcgaccaggcagaggctgtagatactcatatttccaattgggagggaggactcgcttgatcttataatatcgagc

SEQ ID NO: 530055 - DNA, 890 bp, Homo sapiens
aaagatttgctagagctcagaagtactgctggaatatgctgtgcaatggggcttggcgagtgatgatgatgtatgcccatgctgcccaggaatctacagaaaggctcttcaaggtacggacgacaggctgcgaattgctgccgttgtaatgacagtagtccatgtattgttcttggccatgatggccactagagcagttcctagtttagcgtcttatcttcagcctagtgcgaggagtcacaggtttttagaggcagaagacgttggttattgtatggcaatatgatccatgaaatctgttgtgtgatcatgattaattgaagtcattcatcagcacgtctcaaccagtgacattgtccggcttatctagattcaatcgtctctgagtatatagggctgatgttagcaagaccctaaaaatgtccattgaaccctgcttcaaaaaatgaaaacaccacctctataaaatgtgtactgggaataagcttggtatcttacatacattaggggaatgttaacaatctgtaatgtcggacaaacagatgatattacttgtataaaattataaatgtcaacttgtaaataaagataggcagaatattctaaatagaaacttacgttttgtgtttcctcagaatagacccatgtaacattctaactgggggtgaatcgaaagactttagtcaattaacttatctcatattaaatatcccttaagttactcctggcgcccttcttaggacggggaacccttccgatcgaaaggggtccggctctttgtaagcgccagtggtgggcagcgggggtgtccaaaactcgcgcgcggggggaaacctcgggagcaaaacgggaatacaagaggcgaacgagcggactcatcggtgctggcg

SEQ ID NO: 530056 - DNA, 509 bp, Homo sapiens
  misc_feature (350)..(350): n is a, c, g, or t
  misc_feature (359)..(359): n is a, c, g, or t
  misc_feature (361)..(361): n is a, c, g, or t
  misc_feature (443)..(443): n is a, c, g, or t
  misc_feature (498)..(498): n is a, c, g, or t
  misc_feature (500)..(500): n is a, c, g, or t
  misc_feature (502)..(502): n is a, c, g, or t
  misc_feature (508)..(509): n is a, c, g, or t
cgggagtgcttgagggcctgggctttgggcaggtccagggttttttcatctcttggttcttttgttattcctccctgatgtattcaggtcgtttgggattccttttttcacccctgttgtcccttcttgaggttttggttgtcaaccctagagttcagttggttttccgaaacggtctgtaggtccccttttcgtgctttttcttttattgatccgcgactgtaatcttccgcgctttcccacggggtttttgtgccctaatgtcgtcccagattcttgtgcattgtgcagatgtgactcatgtttgtgttctgggtaaggggagctttacgacgcccttgtcgtagaanggtgaattncnaggggggctgccggggggggtgctttttttaattctcctccaattccccccccctcttgttgttttgtgtgccaaaaagatncggagcataatcttggtgccgttcttcctccaacccctgggtttcccgctttttntntncggatnn

SEQ ID NO: 530057 - DNA, 194 bp, Homo sapiens
tgttgactagtgtcatagatatgtgatgtttgctgggatggcgctaatgaacccaaccaatatacggaggttgagaccacatcgaaccccacagtgccactgggagagccagccgagtagccagaagaagcccaacaaaatgaaactccggtggaataaatcaaatctggaacatgtagtcatcatctatccac

SEQ ID NO: 530058 - DNA, 339 bp, Homo sapiens
tttttttttttaaaaaaaagtccgggggggggttccccaagggcaaaggcaatttcatttggttgggaggcttttaaaaacacctttaggttaaaaaaattggggttccccccccccctaagggggtgggggggggcggttccccccaaagggaccaaggtttttttttaaaaaaaagtgggcagttcaaaagcaccccttaaaaaaaaaaaaaggggaaaagtttaaaaatttgtttttaaaaattaaaacgggggggtattttttggaaaaccccaaggtttgggcccttttttccccaaaaaaaacaggccctttttaaccccgggttttggggga

SEQ ID NO: 530059 - DNA, 314 bp, Homo sapiens
  misc_feature (212)..(212): n is a, c, g, or t
ttcatcatggctggagacttccgtgaatataccctttcccaggagggatggacctgctcataagagagaatatagctacaaggttgtcagagctagagtcattaaatggaaactggaaagggggcatcgacagaagagcaagcctaaaggaatgctgctgagaagatttctgtgccaatattgtcagtaatataatctccagtagaacccangttcttacctttagagtcttagagtgtgctctgagattcgggacgtcatatgaagactctgatcatacgatactcagcgtcggatgcagacgttattactag

SEQ ID NO: 530060 - DNA, 150 bp, Homo sapiens
agaacagacgacgaacacgctctacaaagcctcattctaagctgctgtagtctctgtcaatgaaattaggactctatagcgcggtccacagaaatcatgacgcctcaggttgtcatcccacgtcatcagtctatgcagcaactcgcttcc

SEQ ID NO: 530061 - DNA, 833 bp, Homo sapiens
cgctgtagctcacgcctgtaatcccagcaccttggaggcccaggcgagcagatcacaaggtcaggagatcgagaccatcctgccaacacggtgaaaccccatctctaccaaaaatacaaaaattagctggatatggtggcacatgcctgtaatttcagctactcgggaggctgagacgggagaatggcctgtaccctgaggcagaggtggcggtgagccaagatcgcgccaatgactccagcctgggcgatagagcaagaattcatctcaataaataataactttcattcattcatttcttgtgctatgtagactgaccagaatggattctgtgggctgtgcaggtaaagacccataaatgatgtactgtggcattcaagggctccactgtggtgtgggtcttgggttaatatctctggtcccatctgccaccattccccagcctagtacctttaccctccagtgaaaagatctctctccctcttccatactctctcagtggcctctgaccctgtgtacaggctgacagatccatatttatttcacctcttgtcatccacctcctcggggaagcttctgtgattttcccaggcagtgtgggttaccttgcctctcaatctgtatgtccacagttctgtgggcagggcatatggtcgtacgatcatgtctctgccagtatggtggtcatgctggatctcagcttgggaggccagtaggggtcactgaagcagagtcagcccatgcaatggaacctctataaataaataggggggggggcggaccacaacggggcgggaaactaatgacagggggggaagagctcacggagagcc

SEQ ID NO: 530062 - DNA, 821 bp, Homo sapiens
gtatatggcgttgtagggttgttataattttttatttttatgggctttggtgagggaggtaggtggtattgtgttaatattagttgggtgatgaggaatatgtaaggagtatgggcggtaacttactgggtggggcccatacggtaggtattctagttgggggccatttaggttttaggcaattgcgaggtaggctacgagctaacgcccacacacacaaagacccaaaagcacaagacaaccaagccacgaccacacaacccacaccacacacaaacaaaaaacaaaacacaaaccacacacagcccccacaacacaccaccaccccaaccacaaaccaacccccaaccaacacaccacccaacacaccaacgacacaccacacgaccccaagctgaggagacaaacaccacaaccgacaacagaccacagcaaacaacaaacacgacgccacaaccgtccaaacacagccaaaggcacacaacagacacacacacccacggctcacacacccggacaccgacgcccacggacccaacacaacccacggcagcacgacacacgcagcacccacgaaagcacacagccgccacaacacaacggagcgcccccgcgcgccccaccgagcaccacgagcagagacagacgagccgcgacacgacagagcccgccggccgacaacacaaaggcaaccgagcacaccacccgacacaaaagcgacacgaagcccgccaggcgcagacgcggacagacccagagcgcgcggccgccgcggcagcagcgaggagcgagagacgccacgcccacgccagcggaagcgc

SEQ ID NO: 530063 - DNA, 936 bp, Homo sapiens
ggtcgtggccctggatgctttggcagctcgcgactgattgctggaatcactcgaatgattcttctgaggctcttcagagttctcctctgcccccattcggtcatccgtctcagtccactttgcggcatggaacatccgctgttagcagtcgaggtggccagttcaaagtaaagggacactcgactcctatccagaaccccccttgtgtgagaccaccgagttacgaagaactacaaatctaatgcgaacagagcagtctgccatgggaccttgctctgagtgcgtacggtctcagaggtagtcatgccaatgaagctggaagaagtggaggcgtgttatctaaggctacaaagcaagtgtttggtaaatgccaagatcaactgaactacgagtttccccagcacgttgcttgagactctcttgacaggagtccctacacaatttcggccatgtcagtcggacaaagaaaccccccgagggccctgaagcgaacactaagagtttgccagagttcagactcttggtttaatttctcgttcagcggactttaagtatgttacagagcataaggttatgaagtttttcagaaataaaacattgcactttcattacactgtcaaaatgttctctttagctttccttgaagttcccaacttttgccatctaatttccgcgtgacttggtctggcaaaaaaaaatcaataatatacatacaaaccaataatctgaaacaccttcttctttgggcccgcctctggggccctcttaaaaaaacgcctttttttacgaccaatttccgcgtttgttggccccccggggcccccagtagtgtgcatcgggtgaacccattggggggctcacacgtgggtaacccacaaggggaaacccctgtgggacgtcgtccaagagtcggttgggaatctcttacacaatcga

SEQ ID NO: 530064 - DNA, 503 bp, Homo sapiens
atcaatttgttcaaccaatcgctactgatgtcctcccactctgtgccaggacttacaataggcatcaagtatagaatgtgaatgaaatagacacagaccacccaaagcagtctactgggaaaaattagcaacacacaggtccatgagcgaatacatatgtaattataaatctcgagaggggctataggaaccaataaggggatactgccttcacttagaggaagtcagcagggatggcttgcttgaggatgcatcagttaagctgatacttggaggctgagaaagagccagccataggaaggctccatgcaacactgcagctgaggagtagcacgtgcagaaaggcaactgaggcagcaacgctggagaggctaacggggagctggagttgataggggaggggttggcagggactagattgtgcaggacctggtggttcaggtaaggagttcactttcattctcggtgcaatggaaactctagatattttaagctggaaagtg

SEQ ID NO: 530065 - DNA, 226 bp, Homo sapiens
ctagttcaaggcagatgggtcactagtcattgcacttttgatggtaggaggggccaaatataacaacttgtacttcatcttggaagggatgtcttaacatgccccacacctctggacccataggcatttcactgaggtggaagacctgcattttatcagatttgtttcctgcactcttaacacacaaatgtcttaccagtaagtctggagtagttgctgcttctca

SEQ ID NO: 530066 - DNA, 423 bp, Homo sapiens
  misc_feature (13)..(13): n is a, c, g, or t
  misc_feature (63)..(63): n is a, c, g, or t
  misc_feature (95)..(95): n is a, c, g, or t
  misc_feature (209)..(209): n is a, c, g, or t
  misc_feature (322)..(322): n is a, c, g, or t
  misc_feature (380)..(380): n is a, c, g, or t
ccaggctggagtncagtggcacggtctcggctcactgcgacctctgcctcctgggtacaagtnattctcccgcctcagcctctcgagtacctggnattataggcaagcatcaccacgcccggttactgtttgtatttttagtagagatggggtttcaccatgttggccaggctggtctcaaactcctgacctcaggtgatccccccgtntcggcctcccaaagtgctgggattacaggcatgagccagcatgcctggcctgtgaacgcagaattcttataaggtgtttagaacagtgcctagcacctaataaacctccagtnttagctaatttgtttattctagggagaattttaagatgtcggttctttgacaaatganccatcacatactctgaggtcattttctaagtcaccattcaaag

SEQ ID NO: 530067 - DNA, 132 bp, Homo sapiens
gactggtgaaaaccctgaggacagaggtggaaagatcgcgtgagctgggacgttgaggctgcagtaagccataattgtgccactgcagcgcagcgctccagcctgggcaacagagtgagactcgtgctccaa

SEQ ID NO: 530068 - DNA, 244 bp, Homo sapiens
  misc_feature (158)..(158): n is a, c, g, or t
cacgagcgcctcaagtagctgttattacaggtgcgtgccaacacgttcgggtaattcttgtatacatagtagagatggagtttcactacattggccaggctgccctcgaacgcctgacctgcaggtgatctgcccgcctaggcttcccaaaacgctgngattacaggcgtgagtaactgcgcctggccttgagtgatgatcttaactggcatgctgtgaaagagaatataggagtgcaggctta

SEQ ID NO: 530069 - DNA, 185 bp, Homo sapiens
tatttacgtctcttctctgtctccgtacgggtaatcgaatcataagataaacagatcaaacgtgcttagagctacctcgtgacactatgcagtatggttggaagacctgtggttcaacctcgttgtctctttatgttaacgggatttctgcattaaatgactgcccccttgttagcgcgtgcggt

SEQ ID NO: 530070 - DNA, 555 bp, Homo sapiens
agccagttgtacgtcggattaccgggactcgttggttcccttaacctccttcctgggaggggtgggattgggagtggtcttggtttcattacttggaccctttccctaaaagacaagggaatgccttctccacaggccttagctcaaacagggaccgatcttgttcttctccagtgttggacacctaatttgcacatcaggactgtcatggaccatggtgcaatgaagtgtgaagactggagcactcatcacccacggtgggttcccaatggactctccagtctactgagggaataccaccagtctaccactgggtctcactttgttagcccaggctggagtataagtgccctgatcacatgcttgtctgcaaacctcaaagctcccatgctcaagcaagcttcctgccttcaacttcccaagtagctgagaccacaggcatgctccatgacacctgaatctcctgaatctcaagcgatcctcctgcctcagccttccaaagtgctgggattacatggcatgagcccctgaaccctgcctaccctctgtttctat

SEQ ID NO: 530071 - DNA, 898 bp, Homo sapiens
ctcgggatatacagctgttctccggcccccctcctcttggtccccccccccaaatgtttttttttgccgggatatttattacatatattggcgggataccaacccccccctttgtggtaacgcacaaagcaacacaaatacattgggtcgccccagtgaaacacacacaagaggtagagagttggcgacacagcggccttatacatacggttttttttatgttgccttggatttctagggagtcttttattctttctttttttttgggcgtttgaatatccccagcgcgatttttttaagcaaacatgtggagacgcgttgtcaagagatgcacacaaccaacgcatcgcggttgtgggagacggaagcccatacccccccccccaaggttctcacccaaatagatggtcccccgagggcacatctttgtggagtctgccccacccacatgttgtgcgttgttttttaacatagagtagctcatatccccacaaatatatgaggagagatgcctcatttgcgtttcaccagcgagaagatccccctgtcccatttctcttaaaacgcacccccacactctctctctataagaggaatggccccatcctccttcccacagctgccacacaccacaggggagggtgataacaccttcgctgttcgtacggaaaataatgtaagaagcaagaaattttttaatcgtccccctatataatctttcttattcttgcttttattttgatatcatgagagcctttgtgcccccccctccccctctttttgtccccccacttgaaaatattttaagggttttggtttccctgggaatggggggaggcaaccacagggttaccctgacaccgattgagaccccttgaataaaagggcccccccttta

SEQ ID NO: 530072 - DNA, 1191 bp, Homo sapiens
  misc_feature (65)..(65): n is a, c, g, or t
  misc_feature (127)..(127): n is a, c, g, or t
  misc_feature (142)..(142): n is a, c, g, or t
aaagaggaagaattggaagccctgatggcagggtcaagaagactccaatggctgcatcaactacnaagcttttgtcaagcacatcatgtctatctgaatggagctctcaagaacaagcattgtttangaagactggctgganacttattttaatcacacccatgacaaactctccagatctgtttaccatcattcaggaaaacaaagcaatctggacggttcaagactgagcaactccctgaatttttatacatcttcagtttttctctgaattgaattcataccacacaaacaaagtgtctgctgctctagatgagaagaataaaatattgacaatctcaaatccaagcaccattctttattatctaccatgaatcaacaaacattcttaaaacaataaatcaataaacaattttggtcagtctggaatgttcaagtcacattgcatttttattttcttaatgaaaataatttttaaaacttcaattatttgttaaatgtagagaatattgacaaattataaacttttaaaagaagaaatcactgaagtctacatagcaataacaaattgaataataaagataatcatatgttactgaaaaagtaaaatagaaatctgaggaaattcaaactggataagagacattttataaaaactatgcaggtaatttaaagcgaaaacaggtttcttcggattgtgtaaatcatttgttcatggcttgatctatttcacttctagtgacaatctggcctattagaaaagtctagcaagccctgatccttctcacttaatgtcttcaaggataagatttaaagtgacctttcagctataacttttttaaaaaaccctctgggatgggatgtgcttaagaactcaagatcctgtttattaatattctctctccaactatgattcctcccctttgcatgtccatgtcccaaatattagtcaatctttaattacatgtcaacagtggtagaccaattaccgaaccttctagtgtaacttatttcgaatgctcaccgtaacttttttgacctctggggtgaacactgcggttcacaatgcgtgaaatttcctccctaaaaatttaattgtttacaatgaacgcgcctaatagggcgaacctctagggcaagggctgagggcacaaggatacccgtggagggaccaaaatcacaagcacagcg

SEQ ID NO: 530073 - DNA, 100 bp, Homo sapiens
tgtatttgcggcgactcttccacgccatgccaggtaagccgtggcggacggagcagacggatctcctgttcccattcgtcaccgccattgtcacagtccc

SEQ ID NO: 530074 - DNA, 960 bp, Homo sapiens
  misc_feature (65)..(65): n is a, c, g, or t
  misc_feature (127)..(127): n is a, c, g, or t
  misc_feature (142)..(142): n is a, c, g, or t
aaagaggaagaattggaagccctgatggcagggtcaagaagactccaatggctgcatcaactacnaagcttttgtcaagcacatcatgtctatctgaatggagctctcaagaacaagcattgtttangaagactggctgganacttattttaatcacacccatgacaaactctccagatctgtttaccatcattcaggaaaacaaagcaatctggacggttcaagactgagcaactccctgaatttttatacatcttcagtttttctctgaattgaattcataccacacaaacaaagtgtctgctgctctagatgagaagaataaaatattgacaatctcaaaaaaaaaaaaaaaaaaaaacaaaaaaacaaacaacacacacaccacaaacaaaaaaaaacaaaaaaaaaaaaaacgtgagtgcgtggggcgcgcccgcggcgccccaggcaaaagacatattaatacagcaacagcgtggaggcgcggcggggcgcccccagcaaatcaagaacgcagacaggccgggcaacagagtggcaactcgagagagaccaactcgggcggcacaaaagcaaactgggagggtggtgttctattcgcaacaaaaaaaaaaaacccggcggagggcagacaagacaagacgcaacgacagaccacccaaaggagagccagaagagcagagaaacaggggggacaatcaaagagagagagagcacagaagaaaaaaagaaaataaaaagaacaccaccgatggcgtgtgagaaaacgacaaagagaagagagctgagacaagatacagaacaaacaaacaaagacaaagagaagacaagagagcgccgaaaagacagaagaaaagcagaggacgaagacgaaaaaagacaacaataaaaagacagaagcgacacaaaaacagacagacgacgagagaaccaaaaacagcgaagataaacatagac

SEQ ID NO: 530075 - DNA, 808 bp, Homo sapiens
ggaaggctgtggtgatgagacggaccgagaccggagatgttttcaaggcctcggcttccaggcggattttactaggcgggcatgctagcgggcagacgaagacaaacagacagctgacggttacggcctgaagctactcgtgtccagggaggtgaatgccgtccatgcgccgtgacttgcctcggatccaggatgagaagactgattctaatgaagaagctagctgattcatgctgtaaatatgcgcataatctgggttcacaaaagacaattcagagtgataacattctggacagtgacgagctagactatggtatgagaatagccagtatggagagatagagacgtaaccgacgagatttgccttccgtagcagcatagaagtccaagtgatacttgaacgcgtaaggtgattgtggagcaaggtcgatgaacagagaattcgatccagtgaaaggtaaattgtcctttgatctattagtccaatcaatgaaatgtaagataccgagattcagacacagagaaagaaggtgcagacaagaggattgacaaaaataggtacacgctggtaatgagaaatccagaacagttagcaattctgtttgggtatatccaatcgtctggagcgatatagggagtggcacgttcattgatgcggatgagcagcaaggatgacaataggtaccagattgcaagagcaagattatcgcatcagaaacaatcgtcgtggctggaaagaaatgttcggcgagttctgcatctcgagagaaagatagagttgataaaagaactgaaggttgtgggaaag

SEQ ID NO: 530076 - DNA, 174 bp, Homo sapiens
tgcatgtatatcgcggtcgattaattatatagataattgcgtcgcacggtcggccgcgtcgctacgcgatttggttctcgggacaattagggaactttcgggatgtagtcacgatcagtctctggttcatctcgcggtttaactactgcattcagtcactctgctctgcattca

SEQ ID NO: 530077 - DNA, 475 bp, Homo sapiens
gcaaagtgttcctttagccaaaggtgtgcccctttttcttctggataagggcaggaaccggttcacattccccctattgtaagagtacccgcgggtagctttcattattttggccccaccccattttattgggatttaaatgttttaggccacctaagaaccaatgtaaaagtaaaaaggccggaaaaatgaattgcttgggattcatttcttcatgtatatcaagcccaccagtaaaacaaaaacccatggatttaacttttttttaggattttggcctttgggaattttttttttttttttttgaaacttgcccaacaagcatgggctgtaaaaaaagttaacagggaaataacttgagatgatggctagctttgtttaatgttttatgaaattttcatgaccaatcccagcataattgttaagaacccgggtattaaattcatgtaaggggaataaaagttttatgaatgga

SEQ ID NO: 530078 - DNA, 105 bp, Homo sapiens
caatagctggcatgtagtggtgaaagcgatagttagggattctcatcttagccaaagtatttgataccacactattattattagagctcgtttcgcagtgtctcc

SEQ ID NO: 530079 - DNA, 1079 bp, Homo sapiens
ggaccagtatggtagaactgacatttagccactaatcagctcacaaagatccctgaggactgtgtctggctctcgtttctcttgaggttcttatcttatcaaacaatcttctaaagaagcttccccatggtcttggaaaccttaggaagttaacgcgagttggactctagaagagaacaacacttggaatccttgcccacatgaacacttgcatatcttaaggactttacagaaacttagtcttgacaaacaaccagttgaccactctctcccagaggcatcggctcaccttactaactctcacacatctgggcctcggcgagaacctacttactcaccttcctgaagaacatcggtacactggagaacctagcaagcaactgtattcgaactgacaaccccaacctgcatagccttcccttcgcagctggcactctgcagcaagctttcaatcatgagtactgagaacctgtccactcagtcaccttccacctcagatcgtcgctgccggggccttctttcatcattcagtttcttacagatgcagggctccatatcgcgccactggtctgattataaactctgctgggtccaacacactggttcaaaaatagcactggcattaactgctgtcttaatctactatctgcaatctaattcactgtacactcatcggcgcatatgcgcccgacttcactcccccactcggcaccacgcgcgtcccggcctaactcgaagcgcacatcctagccccactagcgaacactatcgcaagactctggccaccacgcgcccacataccgaccgcacccagcccgaaatctcgcacgcatgctcccccacgcgccgtgcgagcacccgacattgccaacactggcgtacacaaccctgagacaccaccgtcagtgactacccgtacacatcaacggcgccacaggcaccacatcagaaccacactcctcacggaccccatcgacggcgaccaagtcgcgcagcaacagcctaagacaatcgcccgacaactgcaaccctatactacaacgcggcacccagacaccacccgctcgccagcgcacacg

SEQ ID NO: 530080 - DNA, 366 bp, Homo sapiens
ggaaaatttttttttggggggccccccccccgccccccccccccgccctgggggggtgttttttaaaggccccccccccccacaaaaggggggggggggggggggggggacccccgggggtttggccccccccccgccccgggccctttggggggggttgccgggcccccttcgggcccgggggccccccccccccccccccggggggcccgggcgggggggtcccccccccccccccccccccccccaaggggggcgggggggttttttttttttttggggtcccccggtttgggggggcccccccggtttgggtggtttttggggggggtttttttaaccccagaacccttttttaaaggggga

SEQ ID NO: 530081 - DNA, 902 bp, Homo sapiens
  misc_feature (377)..(377): n is a, c, g, or t
cccgtaactcccctaacgtccgtcaagatcctgtttgggggactgggcgggtaagctcaggccccaggtatgggaaaagaggaggaagggaagggcaaaaggaagcggggccggtacatctctgggtctgtggctagtgaactgtgccggactacggggtcagcgcgatctccagcggtatttgcgagtttccccgatgggctgcgtagaggccccagttgtctaggacccttatggagctgcttgctgggtcgtagcacgaaccccgtcgggccatgctgagctttcccatgtgcagttgctaagctcgggcgggtggcaaggggttccagggccatataagattggctgcctgccagcgaactaacctgtggagntgccatagaaatcttgtggatgaccgccattacactccgcgcatcgccgtgttggtaacggatctgaacgtgcaagcactccagagtcagctgcgttgactagtacatgcaacgctagcgtatgcgatgcactattctagtatagcaatggccgccttacttagaacgagactaagagcgttatcaagaccacgtggcacttgggtgtaccatatacgactctctatacgacatgctcaccagacactcctggatctcgttgaatctgcagtggcagggcaccatgatgcgtttgtaagactcttgctggccaggatcgcagtgggcactggtagatctggaatgccatggccttcagtcgcacctctgtcgttccccgcaggatgggagctacagtaatgtccagcccctggacctggtgaagaaccggatgcagttgagcggggaaggggccaaagactcgagagtacaaaaccagcttccatgccctcaacagtatcctgaaaggcagaaggcctgaggggc

SEQ ID NO: 530082 - DNA, 334 bp, Homo sapiens
aaataaaaaaaaaattagccaggcatggtgatgcatgcctatagtcacagctactccagaagctaaggtgagaggatcacttgagctcagaagtcgaggctgcagtgagctgtgattatgccactgtacaccagcctgggcaacagaagactctgtctcaaaaaataaattaaattaaattaaaaattagctgggcatggtgacatgtgcctatagtcctagctatgcaggaggttgagatgggagggctgcttgagcccaaaaggccatgattgtgccactgcactccagactgggtaacagtgagatcctgtctaaaaagaaaagaaaaaag

SEQ ID NO: 530083 - DNA, 161 bp, Homo sapiens
tctctaaggacccggtgtttatcgatgccaccttcgccgtggccttaacctgggcagagccgtggctcaggtcgaggtgcgggaagtaggtcttggtggtgggtgcctgtagtcccagctactcaggaggctgaggcaggagaatggtgtgaacccgggag

SEQ ID NO: 530084 - DNA, 386 bp, Homo sapiens
cgtatatacacacacacacacaccatacatgtatatatgtggtcttcagagggtgcttatagaatgagttttagattggtatttagatgtgtcattacctcttctaaacacaaaccagctgatgtgttttaatctgtgtctgtgtctatcttgtgattaatttggtgggttctacttggtttaacatatataaagagtatgcagcacgtttaattcttctttccacactttatattccttagattctgtgcaccttaatcgcaacacatgggtatggctttttcctgctacaactacagggtacttgagcctttcccctcaagtgcattcggtcacccaggatgagactcactagtagcctgctttggcagtgtggctttttgcac

SEQ ID NO: 530085 - DNA, 418 bp, Homo sapiens
ataggtcggtcctcttctcccctgacatgggattctgacgcacgagttccagataatctgtgaatgtgccccgccaacgaagtgcttcctcctccgcgcgatacgagctcaggcgttccaggaaacccatgatcccatcctccttgcgatacggatgcacgccttcgcgtctgaagcggtgagtgacaggaggctttttctcatcctatgaacgagcggcttttccacatacccgtgccgtccagtttgggcgcgcccggccgcgaattccgccctcgcccatgggcatgcgaaaagccggtgggtttcaccaccggcctgcacggttgataggtcttcctcacgtggtgagcgatcacatcgacaagctcgtcatctcagcccacagctcgcgctcggctgtcaggggagaagaggt

SEQ ID NO: 530086 - DNA, 147 bp, Homo sapiens
caccagagatagttggaactacagctccacaccaccatgcctggctagattcttttttttcctggtagagatggggtctcgctagtgcgtgtccatccgtggtctcaagactcctggcacttcccaaagcacgtgggacttacaggc

SEQ ID NO: 530087 - DNA, 196 bp, Homo sapiens
actcgggaagtgcccgcgcgtcttgatgatcttgcgcaggcgggcattgacgctctcgatggcattggtcgtataaatcaccttacggatcggggcgggaaacgcaaagaacggaatcacccgatcccaggctcgacgccaggcggctgccacggtcggaaacttctggccccacgcgcccgcctcgaaggcatcc

SEQ ID NO: 530088 - DNA, 547 bp, Homo sapiens
  misc_feature (75)..(75): n is a, c, g, or t
gatggaagagggtcgggctcgcagcactcattattcaggtctgttaagactcctatctgtgagtgcactttgtanggtacatagagcaaatcccagcagtgaagatttcctctgtcgtttgaggacttcaaaggtttagtcttatctagactacaagttcaggtgcgatcgtgttatccagagtcgtggggactcaggattcttcctgcagtacatacacgctggcctccacaggtgagaagaggctgcagggaaaccgtgtgctgcactgtgcttacttaggctaggtcctgtgattctcagaccagaggccctgtattctgggcttttccaatatcttctattcacatctgactagagtagaccttcttttaggaaaaaaaaaaatttatggagcacctatgttagaaatacatttatgtgtataatcttagtcctcagaataaccctgtcgaaaaatatactggctacctccactgtgtatggatattaaggagaccaaaattgtgtatcataaggtcatgtgcatcacttgcagctctgtgcc

SEQ ID NO: 530089 - DNA, 350 bp, Homo sapiens
acgaaagtggctttaacatatctgaacacacaatagctaagccccaactggggattagataccccactattgtttaggccttaaaccctcaaacaggttaaattcaacaaaacttgttcggccagaacacttaccgagccacaagcttaaaaactccaaagggccctgcgcggtgcttcatttatttgtccctatgggttttgggttttatttgacttcgatgggcattatttttatttcgcaataacagaaaagggatttgcatcgtatgaagttttcattcgtggggcttttctttgttgtggggagggggtcgggggatagtttgatttccattttctgaaaacgac

SEQ ID NO: 530090 - DNA, 827 bp, Homo sapiens
  misc_feature (184)..(184): n is a, c, g, or t
  misc_feature (734)..(734): n is a, c, g, or t
tccaaggtatcccaaggttaatggatagatacaagtttttaacatcggggcatgaacttgactgtgataatttaggtacacttaattccaatactataataggagggaccaattcaaattctccccattggtttacaccccccacgaataacacccatttcaggggctattcaacgatctctcnaaaaatctggaatccagtttttggtggcaatgtaacccctatggttccttttcaaaaagcatctttgtcggcacttgcccgaggctcagggtattattaaatatcttagccactattaaacgccctattcacctaagcaggttagaatatcaccgggcacatctatcactatattcacggggcaccaacacctatcatattccaacggttgaaggcatattttctctggtaacacacacccaatcgggtatccatatccaatatttattgcgcacacaacatctcgagatgtttattcactggcaccccaaaatgtggctattccataacgagtatatcaccagtggtgccgcttattacaagtatttcgctacctctctaaaaaccagcctcttaatgaaataaaactctgggccgacgctcacacagacaaagtgtccctctttgcccacataaggaagcgtggctcctcttggctgtgaaagaaactctatcattgccatgctcaacatcatattgcgcctagttgccctgcctaacaattattaanctaatctctaaaacactttaagacagtattacctcctctaaaaaatcatcattttggcacgggttaacacctcaggactttcacagacactta

SEQ ID NO: 530091 - DNA, 403 bp, Homo sapiens
  misc_feature (129)..(129): n is a, c, g, or t
  misc_feature (154)..(154): n is a, c, g, or t
  misc_feature (172)..(172): n is a, c, g, or t
  misc_feature (181)..(181): n is a, c, g, or t
  misc_feature (228)..(228): n is a, c, g, or t
  misc_feature (359)..(359): n is a, c, g, or t
  misc_feature (368)..(368): n is a, c, g, or t
  misc_feature (394)..(394): n is a, c, g, or t
ttccatagtaatctccatactcttctctcttgaggttaggaattcaggacaagcctgggcaaaataggcaagacccaatctgtcacaaaaaaattaaaaacgtatctggggcgtatttgtgcacatttnaagtcttgggctatttgggaagctngggagggaggactgtttnaacccaggngttagtggctgcagtgagctgtgatcacaccaccacattctagtctnggtgacagagcgagatcctgactcagaaaaaaaaaattttttttaatttttaaaaattaaaaaaggcaaggcatagtggtttatgcctgtaatcccagcattttgggagacgaagttgagagaattgcttnagtccaggngttttagtatgtaatcacgccactgnacttcagcc

SEQ ID NO: 530092 - DNA, 408 bp, Homo sapiens
tttacctcccggggttttccaatttcccccccctttccgccaaaggggggtttttttgggccccaaaaccacggggcttttccaaattttgttaccaccccccccccttttccccaattggggggtgggggtttccggtgggggttttttttaaccaagcctttttttttgacccgccggttcccctggagcgccccccccccttttttttccctccttagaagaccccggggcggtttccaccctcgggttttttccttgggcccggggggggttacctttttcccccgggaacccctttttccctttggccctttttgggtgcccttttaaaccagttttttccaaaaaaccgggtgggtcccggcccggatttcccgggtttttttcccccccccgttccgttta

SEQ ID NO: 530093 - DNA, 225 bp, Homo sapiens
gaccctgtgccggggaatctgtcctggtacagcgtaaaaccatggtcgatatgaaaacccagggtctacacgagtaaataatagaatacacaagtcaaactagctcacaatgttctatgagtgacactaaacataagagagcttacctgctactccaggccaacatactctgtgtcaaagggaagatgcttgaactccccaagacaagagtgggggtaccgagct

SEQ ID NO: 530094 - DNA, 109 bp, Homo sapiens
tctagaggacccccgtagtctcatggtgtcacttggagttataaacaactcaggtgagtattagctatattggggaggggtgtgatctaaaaacactctttatgcctgg

SEQ ID NO: 530095 - DNA, 292 bp, Homo sapiens
tgcactgaagcagttagatgagcagaggctcaggaactggaggaccagtaccgcgcgagcgggaggaggccaactaccgtgggtggagcagcagctggctggacatatgagagcacagctggaggctctgcagaagcagattgactccagtgtactacccggaggtgaacgaggaggaggaggagcccgagaatagaagtccagtggacagagcagggagtgtgagctggcgctctgggactaccggaagtggcagtggtaccagttcacgtctctgcgggacctgctgtgg

SEQ ID NO: 530096 - DNA, 336 bp, Homo sapiens
  misc_feature (21)..(21): n is a, c, g, or t
  misc_feature (180)..(180): n is a, c, g, or t
  misc_feature (281)..(281): n is a, c, g, or t
  misc_feature (300)..(300): n is a, c, g, or t
ctgccatgagccttgatagtnctactgtactccagcctgggtgacagagcaagactccagctctaaataaataaattaagcaatgaaacactggtaaatgctacaagctggatgaatctccaaagcataatgctaagtgaaagaagccagatgtgtacaactacatattgtatgattctntttatatgaaatctgcagaaaaggcaaatttatggaggcaaaaagcagatcagtggtttcccagacctggggggtggtagaagaaccagagatgacctgtnaaatttaggttgggggggncatttttgaaggtgatgggaaagttttgaaactagg

SEQ ID NO: 530097 - DNA, 591 bp, Homo sapiens
  misc_feature (453)..(453): n is a, c, g, or t
gtgcggcccccaacccaaaaaatatttttttttggcccccaaaaaaagggggggggggggggggccccccaaaaaaaggcgggggttttgttaaaaaaaaaggggaggggggggggcccccccctcctttttttgggggggggggtttttttgtttaaaaaaaaaaaataacccccccccccccacctaaaaaaaaaattttttttttttataacaccttttttttttaaaaaaaaaaaaaaaaaggggggggcccccccctctttgggcccaaccccctttttgttttttcacccccccccccccaaaaaaaatttttttttaggaaaaaaaattcggggggggcgcccttttttccccccccaaaaaaaaattttccccccccttttaaaaaatattttgggggcccccattttttaaaggcggcccccccccttttttaaaaaaattttntttttttttttttttttggaagaagtttcctttttttcccaggggtgaaaaccaaagggggtgtttttggtccattgaaaccctccctcccagggtcaaaggattttccttttttagcctccgaggaattggggactc

SEQ ID NO: 530098 - DNA, 271 bp, Homo sapiens
  misc_feature (20)..(20): n is a, c, g, or t
  misc_feature (24)..(24): n is a, c, g, or t
  misc_feature (26)..(26): n is a, c, g, or t
  misc_feature (45)..(45): n is a, c, g, or t
  misc_feature (120)..(120): n is a, c, g, or t
  misc_feature (124)..(125): n is a, c, g, or t
actaagtggcccgatggtgnctgnantactgattttaaaaccgtnaagactcacccatgttgagtgtatgggttcagtggggtactctagtcatactactacttcacagtaacatctttncatnncactccggaaaagaagaagaaaccctgaacctgccatgaacagccacttgcccttcctcctcccagccccgggcaactgtgaatccactttctgcctctgtggatttgcctgttttgaacctttcatataaacagaatcacacact

SEQ ID NO: 530099 - DNA, 238 bp, Homo sapiens
ttattttccttctttatggttggtttctttttggagacgggatttggctctgtcacccaggctggaatgcaggtctccatcgtggctcacggcagactcagcgttccaggctcaagcaagcgatcctctcacctcagcctcacaagtagatgggaccacaggtgtgtaccaccacactcagctaattttattgactgattgattgagatggggtctcactgcagcccaggcgggaatg

SEQ ID NO: 530100 - DNA, 442 bp, Homo sapiens
ggacaaggctactgtgcccagtagtgtggcgacagatcagaaagctgtgtagtgatgcacgaggagcccagaacagcctacaacctgccttccccgttccccactagggcacagtgtttccagcccccccaccagtcccctaccgcccctacaggcagggccctcctccctcttaggttcccagagaggctcatctgcatcccccttcccaggctccggcttgatttgcgaccttgttttccaaaggcaagcctgcctccccctcccccattccccagggggttgcttcagcctccattaccaaaccctgtgacaagaaatgcggcccccttattaaaataatgttatgtctaactaaaatagaaaccccggataacagtttttgatgttttaatgactgggctcattagacagacttcccacttaaagcgccgcggccgct

SEQ ID NO: 530101 - DNA, 444 bp, Homo sapiens
  misc_feature (150)..(150): n is a, c, g, or t
  misc_feature (190)..(190): n is a, c, g, or t
tggccggcagctgaggactcctgacgctttgccgagacgctgaaggtggaaggcccgcagcccacacactggaacaccagcgctgcttgctggctgaggccttgaccttggcctggccgtgtgaagacactggacaaaaaccacgcacgntagaagtcagcgcgtgatgctagagcagcgagcaccacgnaagcggctggtagcagattggcgcggaggtcctttgctgtgccaggacggattctacagggccatctcgatggcaggcccggctcttgagaggcatggccccgtacttgctgtagaacgtctccccgatgttccccgccaacaccgccatgtctgtgcaggtcaaaaacagcaaaccttcctttcactcacaggcctgcaccaggttgcattccagggaagggtggctggggcttgccataagggggtccagaa

SEQ ID NO: 530102 - DNA, 136 bp, Homo sapiens
atccaaagaattcggcacgagggtttgccgccagaacacaggtgtcgtgaaaactacccctaaaaggcaaaatgggaaagggaaagacttatattaacaatgtcggtaattggcaaggaggattcggcaaagtcca

SEQ ID NO: 530103 - DNA, 407 bp, Homo sapiens
gtgggagctcttgcttgaggccctggcctggctccagaagcactgacatgtggcatgcgtaggagacgtgacctgtcactgcacgatgacacagctgatggacactgtccactgaacatgcctttgcctacaagacattacagtggctttgatggactgtccacttgccctgagatcccaaacataagccctgccttgctaggcactgattaatgcatgggtggaccatccaagactgcaccgaagggcaaggtggaggctcatatgagagctatattaactagaggacagagtgctactcttactaatgtggacagatgcctgcaccatagatatgtcatcttgagcagagacagtgacacctatatgtgcttacccacatgtccactgcacactgttatggcctg

SEQ ID NO: 530104 - DNA, 204 bp, Homo sapiens
atagaagagactttcggcggcgcccatggggtctgaggagtcaatgatgatcacgtcgaatgcaggctgattctgtatcatgaactcaaaaccgtcacccacatgtagggtcagcttcgagctagagtagccaatggccatgcctggcaggaacttcttggagacttgtatgacatcctcgtcgatctcacactggaccacgga

SEQ ID NO: 530105 - DNA, 411 bp, Homo sapiens
  misc_feature (326)..(326): n is a, c, g, or t
  misc_feature (342)..(342): n is a, c, g, or t
  misc_feature (383)..(383): n is a, c, g, or t
  misc_feature (399)..(399): n is a, c, g, or t
  misc_feature (409)..(409): n is a, c, g, or t
tcaggctgtgaaagaaaatatcttgggccccaaaatcactaagctacaaggaaaattcaagctgggaactgcttagggcaaacctgcctcccattctattcaaagtcatccctctgctcactgagataaacgcgtatctgattgcttcctttagaaaggctaattaggattacatcatcgagagagggccaggaagctcctgcagggaaggagctggcatctgtattaggcaggacctagtccccactctgggaggaacagctcttcctcttcaagggcccgggaaacggcttttccctcttgggcttgcccaccacacctggaantttcccccaggtaggncccttattgggggagggagccttggggagggggtttggggnaacagatttcttttgnacctgttacnat

SEQ ID NO: 530106 - DNA, 504 bp, Homo sapiens
ttcttaatcatttgtgctcggagaggtatggcagtgccacagagagtgtgtgcgtcatatgagagtacttgcgcttgaattgatgcaacacaaaggtactcttgggcaggtgagcgaaggggtccttggccttgggctcagcagccagcgcctgctcacattcatccatctcctcctcaggagcaggggcagccgccttttgctcctccttccgctcagcctggggcttctgcttctcttcccgtgaacccttctctttccgtggttgtgtcctttttaggttgggtctctgcaaactttttagcatcaaactgggccaacttctcacacagtttcacttcccccaagacagccgcggaactgtgggcttggttaattgcaggtgaggaaccagcggttgatattgggaaaggcctggcggaaagaaggctctagaacctgcttatagagccacaacagggtgcagaccactgtgatgtctgcaatgtactccttcaccaagct

SEQ ID NO: 530107 - DNA, 641 bp, Homo sapiens
gaaagaaggaagaagaaaggaaagaaaggaagaagatagaaacgaggaagaaagaagaaaaaagaaacaatagaagaagaggaagaaagaaaagaaaaaagaaaaagagaagaaagagggaagaaagaaaacgaggaagaagaaagaagaacgaagaagaaagaggaagaagaaaaaagaggaaagaagaaaacgaataaggaagaagaacacaaaggaagaagaaagcagaagaaaagaacagaaacagagggaagaggaacgaagaacgaagaaaagaggaaacgaacggacggaggagaagaacaaggagaagaagaaagaacgaagggacgaacggacgaacgaacacacgaacggacgaacgacggacacacggaacgaaggcagaacagatcacacggacgacacggaacgacggacacgaacgaacgcgacgacacacgaacgaacgaacgaacgaacgaactaagaagaaacctaacgaaggacgaacgaacgcaggcgagcacgaacgaaaacgaacgacaacaggcgaacggacagacagaagaacttaacgaagaacgcgaggacagacacgaaggacaaccgaacgaacgaacgcaagcgagaaggaacgacaggagaggagaagaacg

SEQ ID NO: 530108 - DNA, 100 bp, Homo sapiens
aatgaaagatttaataaggcaaagcagaatctgttgtccttaagtatatttgcaatgtggaatttgtgtgagttgatttagtgaaatgttaaaccgttaa

SEQ ID NO: 530109 - DNA, 440 bp, Homo sapiens
caaagaaagtggctgtttgaaaaggaatctattcatgttgaagactctgtaaatattgttgaaatgacaacaaaggatgcggaatagtgcataaacttagttgaccaagcagagacaaggtttgagagaattgactccaattttgaaagaagttctactatgggtaaaatgctatcaaacagcattgcatgatatggagaaatcctttgtgaaagggagtcaatcaatgcagcaaacttcattgttgtcttattttaagaaattgccatagccattcccaacattcagaaactaccattctgatcagtcagcaacctgaccctgatcagtcagcacctatcaacattgaggcaagaccttccacaagcaaaatgactgtgaatctagtgggcacggtgatgtgggcctgtagtcccagctcctcagcaggctgaaacaga

SEQ ID NO: 530110 - DNA, 266 bp, Homo sapiens
agttgactagaggtccctggcaggctctctaccttaagctaattaacttcatcacctcaggtatttaccattttcctttcttttggatggtggtgggggagaacacttaaaatctaccctctgggcaaatttcaggtatatagtacctggaaactggtagtcaccatggcggttcatggagatctccagaaacttatccatggcggcataactggaaacttgggtaccctttggactaatcaatctttccaatttctccccggggg

SEQ ID NO: 530111 - DNA, 391 bp, Homo sapiens
gaccactcactgccttccacacccacatcgcactcattgccttccgtacccacctcacaccttccacacccacctcacactcacggccttccacacccacctcacaccttccacacccacctcacactccttccacacccacctcacactctcctccttccacacccacctcacactcctccttccacacccaccacactctcctccttccacacccacctctcacactcacctccttccacatccacctcacacctccacacccacctctcacactcacctccttccacacccacttcatacctccttccacacccctctcacctccttccacacgcacctctcaccttccacactcatctctcacactcaccttccacatccaccgtcg

SEQ ID NO: 530112 - DNA, 194 bp, Homo sapiens
  misc_feature (8)..(8): n is a, c, g, or t
  misc_feature (51)..(51): n is a, c, g, or t
  misc_feature (61)..(61): n is a, c, g, or t
  misc_feature (104)..(104): n is a, c, g, or t
acaatganctgaataaataacattcagctccaaattcgcaaaaaaaatttnaacatttgtnccaaaatgtgtggccaaaaggttaaaaatatccaagtgatctnctgtctcctggtttcaacgtcatcagggtccatttggccaccagagggtaaggaaggctctacaaacacggcatgtttctacccaccccg

SEQ ID NO: 530113 - DNA, 314 bp, Homo sapiens
ctgagtttgagtccctcggccagtttctagctgtggacccttgagtccctcggccagtttctagctgtggacccttgagtccctcggccagtttctagttatggacccttgagttccttggccagtttctagctgtggacccttgagtctgtaggtcagtttctagctgtggacccttgagtctctaggtcagtttctagctgtggacccttgagtccctcggtcagtttctagctgtggacccttgagtacattgctctctgggctgcacttgccccttctgtaggaggactgtgaattcctctcctcctgga

SEQ ID NO: 530114 - DNA, 214 bp, Homo sapiens
  misc_feature (4)..(4): n is a, c, g, or t
  misc_feature (26)..(26): n is a, c, g, or t
  misc_feature (104)..(104): n is a, c, g, or t
  misc_feature (139)..(139): n is a, c, g, or t
  misc_feature (174)..(174): n is a, c, g, or t
  misc_feature (205)..(205): n is a, c, g, or t
tttncaagacagggtctccctatgtnacccaggctggagtaatggcatgacctcggctcactgcagcctcgacctcacaggctcaagcaatcctcccatctcancctcctgtcataggccaccacacgcagctaatttntgtatttttttgtagagctggggttttgccatgtnccctaggctacacttgaattcctgggctcangcaatctgc

SEQ ID NO: 530115 - DNA, 133 bp, Homo sapiens
acaaagcctccctaaaaagagaaggggcccctgggaaacagtcttaggggacccaaagtttatgcagataaaccagccgggccctttttttcatttggaaagaaaaagtttaggttaaaagacattacttttg

SEQ ID NO: 530116 - DNA, 117 bp, Homo sapiens
ctactaggagcgcaatagcatcgaataatcttctcaccctgaacaggtcaactcgcttccctacccttactaacattaacgaaaataaccccacccgactaaaccccattaaacgcc

SEQ ID NO: 530117 - DNA, 100 bp, Homo sapiens
gaccactctgcttcttcttattaattccttgtaatttgttgtactaaatagattgtcttctaaatttcctgtagtctgaattatgtagtattgtataaag

SEQ ID NO: 530118 - DNA, 1008 bp, Homo sapiens
  misc_feature (55)..(55): n is a, c, g, or t
  misc_feature (99)..(99): n is a, c, g, or t
  misc_feature (255)..(256): n is a, c, g, or t
  misc_feature (259)..(260): n is a, c, g, or t
  misc_feature (289)..(289): n is a, c, g, or t
  misc_feature (341)..(341): n is a, c, g, or t
  misc_feature (361)..(361): n is a, c, g, or t
  misc_feature (381)..(381): n is a, c, g, or t
  misc_feature (389)..(389): n is a, c, g, or t
  misc_feature (425)..(425): n is a, c, g, or t
  misc_feature (439)..(439): n is a, c, g, or t
  misc_feature (444)..(445): n is a, c, g, or t
  misc_feature (447)..(448): n is a, c, g, or t
  misc_feature (458)..(458): n is a, c, g, or t
  misc_feature (482)..(482): n is a, c, g, or t
  misc_feature (500)..(501): n is a, c, g, or t
  misc_feature (524)..(525): n is a, c, g, or t
  misc_feature (919)..(919): n is a, c, g, or t
ccaagaagccgctcagatatgaagcatcaacaaacgaattgataaatgaagagtnggaatagcttatccaatcattgatgggatccctaatatgatacnacagcagctaggatgacacgtcaagtaagagcaagaagaagtgagcagcgctagtcataattaaaaaaataaaaaaacgcaacagccaactttctaataccaataccttttaaaacacagtggcaggtaataagtggaagagaagaatgtttctgnntcnnctacgttgactgttcttattccactggtntctttagcaggactgttctactcagcctctgtggaagaaaacttcccacagngctgctactagcacagccancctttgcttttacagccccntctcgccnattaccataccagtgtatgtagcctcccacctttgnacttggatgggtantaaanncnncaggcataantgaggcaactagaggcaatatgcngtatatattaatgatagnncttgggcatcgatctctgaaagnncaaatggatggaatttagtttgcgggaaagaggctttgctttgcgcatatcaggcttaggactgtgggaggcttaagttgcagatgcttcttttattgtactcttgttctgcccttgttttttgaaggctctgacttataactgctgtatcagaagaaacattttgacagtgtcttggttggagatgaacatccctaattgacatgtgatgactatttcttattccattcatctaagagtcattgaaattttgttttgcttgtttgtttagcttcaaggtctttggtaaagtcacatgttaaggatgactgaaataattccaaaggagtgatgttggaatagtccctctaagggagagaaatgcatttgaacgaatgtgatataaaaccacatnatcaaatagaaacctcatgtactcaccaacactgcgtttgtaacactacctccattcctttgacactcaacgcttatactagcaatcaa

SEQ ID NO: 530119 - DNA, 478 bp, Homo sapiens
  misc_feature (468)..(468): n is a, c, g, or t
  misc_feature (474)..(475): n is a, c, g, or t
aacggggcggggcgcggacgaacggggccacgagcccgggggggccgaggagcgaggccgggaacgaaccgccggcggacggacgcacaccgcgggggaaaggcgggggcggccggccccaagagagagcggccgagaggccgagaccggcgcgcggaaacgcccgccggcggacgggaaggacacaccgcccgccaaccattggttgggaatagcggatggcatgggggaccgggaaccaagcaaggcagtaagagctggggggacagtcgaaaaatgcgccccggcccacagccctggcggaccatgcgcgcccaaaaaaaaaacctgcccgcccccccagaaaataacacttcccgcataaaacaggggacggctcaggccccggggctgggggcgagggagccagtgcagggagggtctgcaggggcgggaggctcacgcaaagtgaaataaacactattttgncggctnnaaa

SEQ ID NO: 530120 - DNA, 984 bp, Homo sapiens
  misc_feature (398)..(398): n is a, c, g, or t
gacaaagagttattactgacaaacacagaagtcttgtgccctcaacatacatgcgtgtggcgatcatgtgggattgatgtcatcgtgcagcttacttgcttcctcctgagcattgggtactaactagaataggagcgaagaaggtacatgacacgtagataattatggatagactcggtcgttaatacttccacaactatagcgagatacctactaaatactgcgcgagtgcctggatccacgtggcgcccacggcatcagcgtcgaaaccctaatgtctcgtcagacaatcgatgcaggtctcttcctactcgattattctccctagtcccatggtgctagtgccaccttgcgagcaagctacttttcccacttcgcaagcctcgtcctcttcatgnccatcgtaggcacgtagctattgtggagggaaacgacataattcaactaatctcgtgcacaacgaagggatggaagctgtgaggtggtcgtcgacaaagggacacaccctaagcccaacttaatctggggtgtcctcttggctgtcactctaggctcactatgtcttgcagcctaaccaggaaattctacactgcatatccacatagatagacaaaaagaagaaacatggcaaacggtgcgagggggtgggacggcgagtaccaaacgccgagaaccggtaccttttccgtgatgtcgtggccgcttcagaccgctaatgacttggttcctgattcccaccgacgaaggatagtaaggattggaacccacgaccaagcgatgtgggggcttcccacattgtggtcttttgggggctacacggtctccgaaccatcgttcctaagaaggtctccagaggcggcattcgcctagtttgggcggacataggattggtgcataggcgataagtgtctatgactttcaagaagttttgggggacaccaaaagcatgtttcttagaactcattagaggaaaacacaaacttc

SEQ ID NO: 530121 - DNA, 109 bp, Homo sapiens
gtgatgaatgttcttagctgtcatgtttaaaaatacttctgctccgcttactgacccagcaggcgtgaccgctccgcttacttacgcttactgatgctccgcttactga

SEQ ID NO: 530122 - DNA, 131 bp, Homo sapiens
ctcggcgcggcttattgtgaggaagcagggattgtcataccaacctgatggcgtcaagggaatcaagggcccacactggtttttggatccacccaaagccacagcttcagcctccttcatgaccccaagag

SEQ ID NO: 530123 - DNA, 179 bp, Homo sapiens
aaatagaaagggaaaaatcataaagagtaagtatgagtaggggaaaaaagacatttacttcatggatatatgaaggtggtcatggtaggtaatacttatgccacagaaaagggcccgattccttttaagcctgaaaatgctatgggtcatagaaagttttttttggagacagcatatca

SEQ ID NO: 530124 - DNA, 447 bp, Homo sapiens
agaactgctcactatggctccctgccccaaaagtcacacggccggacccaagatgaaaaccccgtagtccacttcttcaagaacattgtgacgcctcgcacacctcccctaatgcctgcggagttgtgcacgtagtaaggtcaggccacggcagcctaccggcaatttccggccaacagttaaatgagaacatgaaaacagaaaacggctaaaactgtccctttctgtgtgaagatcacgttccttcccccgaaatgtgcccccagacgcacgtgggtcttcagggggccaggagcacaaacgtccttgcacgttaccccctcaacccttgaactgtctttccggcgaggctgcggcaccctagcgcttttgctggtcactgccatggaggcacacatctgcagagacaaagaggactggggcagcagagaggactgctgacatcca

SEQ ID NO: 530125 - DNA, 1612 bp, Homo sapiens
  misc_feature (263)..(263): n is a, c, g, or t
  misc_feature (338)..(338): n is a, c, g, or t
  misc_feature (540)..(540): n is a, c, g, or t
  misc_feature (776)..(776): n is a, c, g, or t
tagcacgtctataagaaatgcaggcttaattatatttccacaatgtctttccaaagtattcattggtttttatggtaattcatcactgaactcttaatttttgcttttctattaagaactatatagtatgtacaaaattacttgatcacaaaattacttgctagttccaggaaaaatatgaatgaatcttctgtggccagttaggaatacatcagtttgatgcatttttaaatggctctaaacatctaataaggtactgtatntggagagaaaaggtggctatctccatattcaaaatatttcttccagtctccaagatactctattcttttaatgtntggcttgttcctatcacagttatcaagctgagaatacagctgaggaagttcattctctaagtcaccagaggtataatatgtgcttaaactgtcaatttagtgccctaaaaatccattaaccaaaaacaaaaacgttttctcccttggtcatttcatataataaaaaaaattaatattttatagaggtttttccttgaattangtgctttaacaattgatttccaagggaatattagtatgattttttcctcagaaaagcaaatatgatttaatagggaaaattattattctatgatatttcttatctcataagaaatttcttatctaatattttacacaggtaaattgaagtgaaaaataagctactatatggtacaatcaaaatataataaggagaaaaagtagaccaataaagtgctctctaaaaatttatttttnggacttaatcaaaataattgcctcaatccttctctttatgtatatgtagccttaactaactatatacttataaactcagctgggctgatgcacagtaactttattaaaggagaaactggactcttgttatttcctaaagcagaacatggcctgttctccctgatacaagaaaacaatgttttcaactttataaccataaatgcacataataacagggaaaattagccacagttctcctcccctactcccctgagcccctactttaaaggactatttgttatttatatagtgttaaagataatattccatatctttgaagtataagacagagaggcacagtataagaattatttataactttttagaaacaattacttgaaaaggaaccttatacaattagggtattatttttagatttggtgaacatttatagtatattaaaaattaaatgtttaaattttgcaggtttttttatattaggcaccttttaagttcccagcatatttggctaccactatcaacttggaaacattccatttgtagtatcatcaaatatatattttgtaggacaatttatatatgatgtgatttgacctaccatattaaagcagacacagattacgtatcatgctttcaaccaaaattacagacttcctttgaaacatgctgcagatttgatagaggtatattatgtcttaggaaaatacaatgaagaaggtccaaatccctattgaggctggatgtctgatctgcactagacttaagaggatatatcatttcatctgcatgtaacacatagggctgaatgtgatgtcaaaagggtttcccgttaataa

SEQ ID NO: 530126 - DNA, 325 bp, Homo sapiens
  misc_feature (42)..(42): n is a, c, g, or t
acgcacattactagtacgcacataactagtacgcacataacnagtacgcacataactagtacgcacatatatataactaaaaaaaggtaaatgtcagcaaacaaatgcaaacctgtagggtaaatggatatataaaaaaaattcagtatatcaaatttcatcttctctggcatattagattgggaactataggttatttagaaaatttagactggtggaacgttcatttctaggctccttggcatatgtttcatttcatacaaaggcttccagattgtgcccggtagcttccttggaggtccttttccacttatctcctctgggc

SEQ ID NO: 530127 - DNA, 306 bp, Homo sapiens
aaaaaaaggggggaaggggcccccgggatttgggttttttccctgtgaagggaaaaaaaacctttagggtggcttttttttttttacccccggaaagggtgggaccccccccaccaaaaaaaaacctggcctggtttttggaccggccctttttttttttttttttttcaaacggggttttttccccggggggttttttttcccaagggaaatgccgaaggaggcaaaaaaccccgccaaggggtttggggccagccccttccctccttttttggcaaaaaagggatttttttttaagggcctgga

SEQ ID NO: 530128 - DNA, 209 bp, Homo sapiens
  misc_feature (42)..(42): n is a, c, g, or t
acgcacattactagtacgcacataactagtacgcacataacnagtacgcacataactagtacgcacataactagtacgcacataactagcacgcacataactaggatgggggtgggggtggtggtgcatggacgctcttagttggtggagcgatatgtcatggttaattccgataacgaacgagactctggcatgctaactagattatg

SEQ ID NO: 530129 - DNA, 523 bp, Homo sapiens
gtaaacttgggtaactagagtaccggcgcgagttaactatttaaggctatctcagggtattgtggactttcattactaattagaagtagactccatatctctcctacccctgttatacaatgaacattacacgtctattctctgctgacctactaaagcagtttatcagttgattctcttggatttcctaggtattaaatatcttagagcccaccatcaccccggctaattttggtattttttagtagagacggggtttcatcatattggccaagctggtctcgaactcctgacctcaggcgatccatctgtctcaggctcccaaagtgctgggattacaggtgtgagccaccgcgccaggcctcagcccacttcttttgggtggcaatggtttggatatcgttggtcctcactaaaattcatgttgagattcgagccccagtgtggcaggtgttgggatgtggggcctcataggagctgtgtggtcttggaggtggagtcctcatggatagatttaatgctg

SEQ ID NO: 530130 - DNA, 181 bp, Homo sapiens
aatgttacgacataagataaaggcttatgataaacatacaaggagttatctgtattcttgagcgaaaaagactttgtggctaagcagataagagcctgatgccatactccccatagtgagatcatattttctaaaaatggtgtcactcaaggctgtggcttacaaaagatatttttagagg

SEQ ID NO: 530131 - DNA, 351 bp, Homo sapiens
actggccagtctgggaaaccgcctgccacgtggaagagccaaacccgactctctgctgccacatgccgttcccatgcctggctgctgggcacctgggagagcttccagaatcctcgcagacagcccagagcctgccgctaccctcgcctgccccacctccaagcaagcgcaagcaagatgggttctcatcagttcttcctcccacaatgagggcccttcccttaccctcccatgggttaaataggtccggggtcctagtccttttccttagccccggaaccaggtttttaacataaccaccccccccttttttttaaataaaacaccggattttcaacactgtcaaaaaaa

SEQ ID NO: 530132 - DNA, 424 bp, Homo sapiens
taaagacagaatctcactctgtcacgcaggctggagtgcagtggcacgatctcggctcgctgcaacccctgcttcctgggttcaagcagttctctgcctcagcctcccaagtagctgggactacaggtgcccaccaacacgcctggctaatttctgcattttagtagagatggggctttaccatgttggccagctggtctcaaactcctgacctcaagtgattcacccaccttggccccccaaagtgctgggattacaggtgtgagccactgtgcccggccttacattttgtgttttttcctgctgcttgtatgtgtgcaagtctgtgtatcatcaatgggtatatgtgtacctgcgctgacaacaaaaaatgagatgcttatcagctactacacaaagctgttataaggatgaaatgcagtta

SEQ ID NO: 530133 - DNA, 778 bp, Homo sapiens
  misc_feature (380)..(380): n is a, c, g, or t
agcgggtgcttccgttttccgttccgctggcctgtctcgcttcgcggccacctcttccccaacgctacccgctccgtaccctgactcgctgctcctctgtgctggcagagagcgcgcagaacgtagctggacccaagggtttatttaccacattggctggtgtgtccatctgctgtgcaaccacatttatctccggtgagataaaccccatttatctcctagcaagtccctggcgcacagtgagctctgataaaagtacgttgaattggaacctggaactggactaacagctcccaagttcgtatctccgcctcagatctccttttaaactctagacgtgtgcatccatctgcctccatgcatccgcctccatgcatccngctccgcatccgcaccatgcatccagctccgcagcacctcccttgggatgcctaatagactctcaaatgttacatgccttctgtattgctccttcccccatcatttcatgcgtaggcagctagcagtctctgccacttttcctttgctgtggtcttctgctcaaatatcagctttcaaagagctcttccttttcaaagaggtcttgaacaacctaagacagtctgtcatcctctctggtcctggcctttcccagcactctcttgttctgctttatttttctttatgatacttatacctacgctgacattcatatgtcttctgcctgttcccacactcttatgaggacaagaacctattctggcctagtatctcctctggaatcctagtgggaacaaac

SEQ ID NO: 530134 - DNA, 1356 bp, Homo sapiens
agcggggcagcgcagggttacccctgaggaggggtgtgggggagaaagggtaggggtgggacccgtattcatctcccagcacggggagatcaaggacaggccatcatctgtcagaactatgaatgggtcccaggacaggtggctgtcagcaatgtctgcagttcccgcgtcaactgttgtcgcggagcctccgcggaggacctctaggagagcccggactaggactcagggtccctgggcctccactcgactactcccacaatgagagaagctggcgtgctctacagagctcgctcaaagggtcctcggagcaggtcctggtgccgtgagagtgtccaaggatgctccggaatgacgcgaagactatatcagcgagtcgttaccgagtcagagtagtgagagctagagaggtgggcttggtaaccctgaccttatatctagcggctgatgttgtcatggtcctgaggtctgcaaggctgatgggagggaatcggattctgcgacgagcgttgatacataccgatttcataagctcaaccgatgcgatcactatttccaatacgcctagtgatccattgggatcgtttaacgacgagcattgcaacaggagcatcatctgagggatgaactagggactgagacgaaaacaggttgaacgatgcgcctttttgaggtggaaggccacggtgtggtcgtgaccgaagacgtaacctttattttccttcacgtgccgtgaatggcccgggaacattggacagtttggccttggatgactttgttgccccctgtagccgaatggaaccatcttccttaaactaaaccgattcccttatacatgcgggactcattttggcaggaatacccggcaacggaaatcactttgggcgaaacctagggcgagatagctggttcgcatgttttggcaggaaccatcttggtatcagcacccagttcacaggacccccggcaccttttgggaacctcagtgtgtccagagccggccttagaaccaggttggggaggcattaactatcatccttcccccttagcgaacggggtttgtttccccaaaaaagctcgcccgtttagagaggaaacccccggatggatacaggtgcacgtgcagaatcacctatccaaggaattccggtaggggggttcgcgccccactatggcgtctggcctggagctttacccgtctcagttcaattggcagacccgtacgctctgacggtgtgccaaaccaattcccccgaaagattaaccccaagccttccggggagaacaagaccgtttggcgatccccggaagccatctgaggagtgttcgatgttccgaagaaccgagaggcatatc

SEQ ID NO: 530135 - DNA, 131 bp, Homo sapiens
agaccagcctgacaacatggtgagctgtcgtctccactaaaaatactaagacttagccaggcgtgatggtgcgcccccttattccccgcgctttgggaggcctcggcatgtggatcacgagctccggagtt

SEQ ID NO: 530136 - DNA, 220 bp, Homo sapiens
  misc_feature (5)..(5): n is a, c, g, or t
ccccnaaagccgcaaaaaccccggaagccaaactacggagggaaatttggtccactgcaacctccgatgataaagatgagaggcacaagggtacacagtacagttaaatgatgcaaacaaaaagcttctgttcccctccgatacaaatgagaagcctccatccatgtctcttacagaaataccacatacttgatgctgatactaggttactctgacgcgt

SEQ ID NO: 530137 - DNA, 828 bp, Homo sapiens
gaggagaacggtggccgcgtgggtgcagtgcctgactcgggccctgatggaggaggaggaggccgcctcgtgaagacgagaacggcgacgatcagggtttccaggaaggtggaagatgagctcggggacgaagaggaatggcgctgtgtgctgactgatgaactgtggcactggtgtgatgcagcaagccttcaacctgcctgtgctgactgcatgcatgcaacagcccgcacctctgcttgttctgctggtgactgggtgtgctgcctgccctgtgtgtgctgatggcatggggccatgcaagccagtgctgtgtgatgtggggagcgggcaagaaacatagacagcgatgcacacattgggctgtgcacggaataacaacaatgatgtgcggcgttgttacaacaaaagaacaccaccggatgcacacgaattcaattggaccgttcgtggacttacttttattggatgcgttagcgactattgcaacggacggaaccccaatggtaattaatgccaactggcaggccgaaaaatctcccgttcaaggccacccattggtttggagacgacagggaaatgcattgacagcgacagtatcggacttgaaccaacaggttgtgtattaggtcctttggattaaccgttaataaaacgtttcgtagaagtccttaaccacaatatcattacagacaacttaattcacaacgggatggaactccggttcttccacgtgtggcatttacattatccccctttttaccacagacatggggcactcgaacgctttaattggcgtatattactatttgggaggcttaggcacgg

SEQ ID NO: 530138 - DNA, 215 bp, Homo sapiens
agaggaatttgtttctccgcgtatccaaacttgtgtgtggttatcttgtctttttcattttttttttaaagacaggatatcactgtcacccaggctggattgcagcggtgtcaccatggctcactgcagcctcaacctcctgggctcaggtcatcctctcacctcagcctcccaagtagctgggactacagaatgagccaccgtgcccggcctta

SEQ ID NO: 530139 - DNA, 826 bp, Homo sapiens
agcgtggtggggcgtacggaaccagcatcatcccatgtagcataatagtcatctatgtaacaaagatcatcgaagggcggtgctgcccacaaggatgggaggttgcagattggagacatagatcctggcggtcaacagtgtggggctagagtgacgtcatgcatgaagattctgtggcagccctgaataacacgtatgatgttgtctacctaaaggtgggcaatgcccagcaagtgccgtacctgatgtgacagtgtactgtctcctctcgcagatgagtcatcaaccttcgttattcccaagcatgcgtggacaagtgagagtcagtcacatggagctacctgggcaccgactacgccatagccatggaccccacttcccctcggcgctactctccagtggccaaggtacctgctcggggaggaatgactattccccgagaaccgaggcgacattgtgatccaccggggctccacgggcctgggcttcaacatcgtgggtggcgaggacggtgcaaggcatcttcatctcctttatcctggccgggggccctgcagacctcagtggggagctgcggaagggggaccagatcctgtcgggtcaccggtgtggacctccgaaatgccagccatgagcaggctgccattgctcttgaagaatgcgggtcagacggtcacacgattcattcgctcagtataaacccataaagagttacagccgatcggagggccaagaatccacagacctttcggggaaccagttccattgaaccatgtcagccttgggcctccaggggcacttggcgtcccttacgggatgcaacccc

SEQ ID NO: 530140 - DNA, 107 bp, Homo sapiens
ctaatctatctggacaggcagctatcaccaggctcgcgttgtcgcctctacctataaatcttcccactattccgctacatagacgggtgtgctcttggagctgtact

SEQ ID NO: 530141 - DNA, 248 bp, Homo sapiens
cgtcagtgcttccctgttcgtgtgagggaggttgtgcacggacacgaagccaggcctcagaggcttcatcagctctgtactttgtccttgactacataagactgtatgctggcccccgttgaacacagataagaccacacggttctccagctgtttagccatcatctccacagggctccaggcgtcctcatcctgccctgttgccagctggtagttggtgcccatgccccaggagaaaacacgagcat

SEQ ID NO: 530142 - DNA, 183 bp, Homo sapiens
  misc_feature (62)..(62): n is a, c, g, or t
  misc_feature (74)..(74): n is a, c, g, or t
  misc_feature (101)..(101): n is a, c, g, or t
tagaagtcaatagcattcagatagtagcaacaaaatgggaatggagccaagatgactgtgtnctatgccaattnctgagacttttaacagatgtaaacttngacttctctcaaagagccaaaatacactaacataaattatatatatatatatatatgtgctattgaaacttctaaaactagg

SEQ ID NO: 530143 - DNA, 403 bp, Homo sapiens
  misc_feature (9)..(9): n is a, c, g, or t
aaagcttgnagaaggattccaatgcactgcagctgtcttgaagacagactgggcccatgtgatgggggatgtgagtggtatctagaaactgaaaggagttccctgcctgaaggcccaacagggaaatggcagcctcagtcctaccatcataagaaatcaactctgccaacaacctgaatgagtctggaagtgaattcttcccccagaccctccagataaggccctggtcagccaataccttgactttggccttgtaagaccttaagcaaacaactcagccaagcctactggacctctaaactactgagctgtgaaataacaaatgagtgttgttttaagctctcaagtctggagtaatgtgttatgtagcaatagaaactaacaaatacacattgtcttgata

SEQ ID NO: 530144 - DNA, 631 bp, Homo sapiens
cacctcctcggcgtcgtatctgccggacactttcgtcagactacatcctatctgaaaacgctccacgtcacaatagttttactcacccacttgcttcactcttgccagtagcaagtctgcgaactcgtgccttaggcaagggcatttattctagagaaacccggactctgcatcaaatgatgacattaccactttcacctatttctatggaaccagatacaaaactaggaaactgccagaccatctagtgaggtggacactcttctgtaatcctgggtagcttcctcaagtccctttaaatgacccaaaactattaataggtattataagcaataattattaaaaacaaaagtgctacatcacctgtctttcgccctgactctccaaatgaacataaagacacaccaaaaggctggtcaacagagctagctgggcacaatcactgcatctatagaacagccaatacttgaaaaactaggcacaagtacatgaggaattcttatcaaagatcatgcccaatccatgccacttcaatgggtttcagctgaggtaaggtcatgtcctctgaattcttaggcagatcagtgacctcaggttagagctcccggggaccgactcgatacgaaccagg

SEQ ID NO: 530145 - DNA, 242 bp, Homo sapiens
tgtggctcacgtgaaatgggaattggataaatccacatatccagttgggtgcagtagtcacaccttgtaatcccagcccaacacttggtggaggtctaggcgagaggaaggcttgagtgcctggagtttgagatcagcctggccaacataacaagacctcatctcttcaaaaaatttaaaaaccagccgggcatggttggtgcacaccttgtagtcccagctacttgggaggctgagtgtgg

SEQ ID NO: 530146 - DNA, 576 bp, Homo sapiens
cgtggagctggcagttgcttcgatgttggctcagcttgtttcatactcctgatcttcctgtgctccacctatctacaggctcctcctctagcagtcattctgggcgtgtgccagcatgcccgtggccctacgtaccagaacggcggttcagtcttaaacatttgctttaagaaaacagtcttgaatttcacatgctgctatttttatatttggccattttacagtactgtttggttttgagttcatgcatatcattgaaaatttctcgttttcattttcttagatgacttcttgtctgagacagaaaaatctcctactacaggagtgcagtccagaggttacgatgtattagaattataccaatatcagtttaaaaatctgtatgcataaaagaatgcaccactcaacttttttattcataagctaatattttttaacgttaccattaagattttttctcttttgcagctacatttgaacagtgatagaatacaagagattttaactgagttatcactttttcagctgatataattcatttttaatggcttttttgacagttccttttgcatgaac

SEQ ID NO: 530147 - DNA, 733 bp, Homo sapiens
  misc_feature (292)..(292): n is a, c, g, or t
ccatccccccaggcactggtcagggttatatgtccagtaaaccccccttccattggcccccagaccatggtcttcttacaagtgtctcactcaggaagggtttgtaggtataggccccaggaaccagttgggggctttaccaccaaaaaaccgcttcagtgttcgggatatttcccccaaacatgcagagaacctctccctaggcctccacagcaggcttccagagatgcttaaggccaagccccctcgcagtcaataaattatggttatggtcccccaccccttcttcccncacctttgtgtctggtgggcacactcttgcagaagcagctcacactccccgcatcttggtcctcagcaggtcctgtttggaggctgagaacagcagacccttggcatccagaggtccaattatgtcgtaccagactgggcagccatccaggtcatagccacacataccccctgacagatgctttcggaactccacatgcttccggagcatggcctccgacttctgcaggtcgaagcttctggctcggagccaacgcaggagaaaatagtcacctggattcggcagggccggcagcacatcctggacattctcccgaaacttggccaatgcctccttctgcctggggctcagatcgccgactctgccgctcatcgtggctcaaccgcggggatggggtttgggggcgggaggcggcgggtgcggcacctcaccagcacagac

SEQ ID NO: 530148 - DNA, 882 bp, Homo sapiens
attctagaggccgaggcgggtggatcaactgtggtcaggagtttgagatcagccaggccaacctggtgaaaccccgtctctactaaaaatacaaaaattagctgggcgtgatggtgggcgcctgtaatcccagctacttgggaggctgaggcaggagaatcacttgaacccgggaggcggaggttgcagtgagccgagatcgcaccattgcactccagtctgggcaacagagtgagattccgtctcaaaaaaaaaaaggaagggaaaaaaaattggctttatacctcttcctggtttcaacggccatgaaatttctgaagcactcccaaattccggtggattaatccaaaacaaaatttataagtctcaaaactattttcaacttcttatacgtactagtatactttaaaaagcctcagggtatatatcttctaaacagctacaatttcagtgcagctactttaaccaccctatgtcctctagttgagaccaactaggcctattccactggctgtgtagcctcgtgcctaccagtgggtgccacaattaattttcgtagaattaccttgattgtaacaacccatctcgtttctgttttacaatgtgcccaaaaattcttcaaaaaggggtctgggattaactgaactcctttggcaactatacattcaatttcggattctcaagtaatggcgtgctgggtgggacttgatacttagtcctcagttttttaaaacctcaatagtgactgtttaaaaaatcctcctttttacaagaattgtcacaaccatgggacccccaaggatttttgcgtcaaaaggtcaattttgttcgcaattgtattcccaatctatagcatttcgatgggggccctgttacattgtg

SEQ ID NO: 530149 - DNA, 652 bp, Homo sapiens
ctatgtctgtactggtgtgtctttaggtcgtgagtgcgaatataatctaacacccattctattgcagtaagtacagcaagcctgaaaaagcagttgctcagacctcagccacctgccgcgactttgtgtcatcatctttattgctggggacagtcctgtgcattgtagagaagccagcatcttgtgctctacctcatctaggtgatacatgacgctatacccttgtgtgtctacatccatgtgtgcagacctagataattatacccggagcaagcatgatcgtactcatgcggaggagaccattgtggatcagctaacgctgagccaccctgatgcatcggtactgaggctagacgaataacaaggaactgagaggcagtgagggcagaacgggcttataaaacaacataattggaaatctgtaagaataagtgtaccagaaaatagcaatcaagacacctcaaagacttgggctggtgagctatctcagaatatctcaggagcatttagtagacagctatgcttagaacatgaaatgatagaatgggtataggtaggacataaaagcagaaaagacaactttattttacataaccataaatgataagctcactgttagtcttgcaggttatttactgtgtggtagtgctta

SEQ ID NO: 530150 - DNA, 176 bp, Homo sapiens
tctagaggattagtgtcatccccttcgtgatacggatgagtaaatttctttaaattcattcatccgctctttcaacgaaaacgttctgagatcactatgtgctagacacactattagggactggaggattaaaaggggacttaagggaacagggtaatcagataagtgaacaacac

SEQ ID NO: 530151 - DNA, 191 bp, Homo sapiens
  misc_feature (26)..(26): n is a, c, g, or t
  misc_feature (66)..(66): n is a, c, g, or t
  misc_feature (92)..(92): n is a, c, g, or t
tcctttcatcatatttcttctgattnttttagatcggttttggtttaaaatctcttcttcctcagnagtcagcttggctcccttcttgcggnccaggggcagcgcatagtgggactcgtaccactgtcggtacggtgtgctgtcgatgagcacgatgcaattcttcaccaggggtctggtacgaaccagct

SEQ ID NO: 530152 - DNA, 223 bp, Homo sapiens
  misc_feature (47)..(47): n is a, c, g, or t
  misc_feature (103)..(103): n is a, c, g, or t
  misc_feature (156)..(156): n is a, c, g, or t
  misc_feature (165)..(165): n is a, c, g, or t
  misc_feature (217)..(218): n is a, c, g, or t
gcacaagcttaaaaacccagagagtaatcctcaacttaaaggtttanaatgtaaattctctggtcattgagcaaaaccaaatgaacaaagcacctaaaatgcnccgccggacctacaaagctcatggtcggattaacccaaacataagctctcccngccacaatnaaatgacccccacggaaaaggaacagattgttcctaaaccagaaaaggaggnngccca

SEQ ID NO: 530153 - DNA, 474 bp, Homo sapiens
  misc_feature (92)..(92): n is a, c, g, or t
  misc_feature (394)..(394): n is a, c, g, or t
  misc_feature (433)..(433): n is a, c, g, or t
ggcagacagcttttcgcttaacgatgccttagctggctctggaaacccaaaccctcaaggatatccgggtgcatgggggaaccagcctgggnagggggctacccaggggctgcttatcctggggcctacccaggacaagctcctccaggggcctacccaggacaggctcctccaggggcctacccaggacaggctcctcctagtgcctaccccggcccaactgcccctggagcttatcctggcccaactgcccctggagcttatcctggctcaactgcccctggagccttcccagggcaactggggcacctggggcctaccccagtgctcctggaggctatcctgctgctggccttatggtgtccccgctggaccactgacggtgccctatganctgcccttgcctggaggagtcatgccccgcatgctgatnacaatcatggggacagtgaaaccaacgcaaacaggattgtt

SEQ ID NO: 530154 - DNA, 412 bp, Homo sapiens
ttttttgtagaaaccccgtgtctactaaaaatgcaaaaattggctgagtgtgatggcaggcgtctctagtcccagctgctcaggaggctgaggcaggagaatcgttcgaacccggggggcggatgttgcagtgagccgagatcgcgccattgcactccagcctgggcaacagtgcgagactacgtctcaaaacaaaaaacatcattgtcaatattcatctttggtttgagcctccgtttctttctcctttaaatgaaattgcttaagagcagataaatgtttttcagcactttattcctccttctcagttctctttgtttcccctgctttattaaaaatcttaaataatatccatattgttggcaccagactctcattgccgaaaccccatttaggctaagctagtgctgtg

SEQ ID NO: 530155 - DNA, 377 bp, Homo sapiens
aacaagttccctccaaatgggcagtcccacagtccttcatcaaaatacctgcacgccttgtagctcatagactccttgtattacagaaagagtatctgcttctcttctttctcctccaaccagtactcaattggaatgacaaagttagatgtgatccggcattctgggcaggactttatgatctatgctctcaaattgcttagcactcctccacttgcgaatgcacttgcgcacagtaggtgtggttgcagttggcgaggatcccgaagcggcgctcactggggttggctttctcatagaacacctccatgcagatcccacacaacatgtccttgctgcgctgcacggcaaatgagagctccatgtccctctcatga

SEQ ID NO: 530156 - DNA, 375 bp, Homo sapiens
agctcgccttcttgatccaggttctggaagcgctctgcgggccgtctaagtcatgctgtgagctctgcgttaggaacgtccagccgcccgccgaagctcagcaatccccgcgacggcatcataggtaaacagcaccgggaagcagatcgtggcccgcatgccaccaggctgttgtctgtgatgaaggtcagcgccagcagtggtagtgtttcagaggccagagtcgcgacggacatcttcttgtcggcatcagccaggcagacggtgctgtcgtggcttacccaggccacgcggctcccgctggctgagaaacagacgccatgtacccagccgcagctactgctggattcgaaccgacggattggattacaagga

SEQ ID NO: 530157 - DNA, 834 bp, Homo sapiens
tggggcgccaaccccaaaacagggcataaatggccccgaattattcaaaagcacggcttcaaatgcgtcaccgggaagatcgccgggagccatatctttgcccttttggcgagaaaggacgtggtgacctaccaccaccggtggggagagaaacaacgcgccccactccggggagccaggcagtgtccccccgcccccagagagcgtggacaaccccgggtacaagagaccccccgcgatgggcgcacccacccatggttgttggcgaccctctacaaggattctatgagagccacttcgctaagaccaccaattcttctgggccccactacttgttccgcccacggctcttcgctctcttccgctaagactaaagtaacccactccccacaggcccgctaatctttgttaacaacgcacgcctgtagacacaccatctgtgcacatcttgtgtcgccacacacaataaacgctcccacacgatttctcctgaaaacaaacaatatatcaatattatgtatacaatactaccaagaagagctggttcttctctttcttgggctctctcaataaacaagctccccgcgcccgtaactaatcgtggaaaatatttagcagttgtacctgtgtattctaccatgtagagcaccaccttgttgattaccaccccgacggcaatgacccttttttcccggaataagatcagattcccccctggtggagtccctgaccccatcacaccggttcgcgatgatgatcagcttgttccccccgacaggatgctgttttcggaaaacacccaactgatgcgtcttaaaaggaaaacaattgtca

SEQ ID NO: 530158 - DNA, 1158 bp, Homo sapiens
ggaaggacttctcgttcctcatgtagtgaactccattgattttcctatcttggtgctgatagctctctaaggtgtagggcacacctccccacagacaccctccctctatcagagagccacacagacagcagcaggacccatctgcctagcacatcctcaggcaagtgacacctcgctggactcagatgaggcacatagtagacactagacagaggaccaagacgggaccaataagcatcagagctgacaagaagaaaatgcacacgtcaagtgagcgcaagcaaggaaggctaagactcttcataggaaggtcaacccgtggtggagcacacaagggactgggaagacacagggcgacaggacgaaaagacgcaaacctacgaaagagtctcataagagacaagaacacgcggccacggcaacaagagagcaggacgagaatacagatcatggaactcaagcataagggcccaaaagaataagccatcatatcacaagggggaacgcaacggaggccatagaagacgatgacaatcgcaaggggaaaaaagaggaaaacacctagaacaagaacaccgaccatagagggcaaaatacagccagaaacccgacatggacaggagagcgcgaggcaaagtcagagagaaggggaacgaaagaccactaaccgacagaaaacaaacagaaccaacgccagcaaagggaccatggaagggaagaccaaaacaaaaaccacaacaacaatacaagcaaaacacaataacagaacacacaggacaccaaacaaccataggaaacggcaagcatacccatggaaagaatatcacccacgaaagaagacaagaaagagacatgcaagccagcaagatcccaggacacagtagcaagacaaacaccaaggcggtcacaccacgggaccataccacaaagaggacagaagatggacacacctacatgagaggacaaaacgaatgaagcataggacacaagacaggcgcgcaaacaagacagccgaaaagacgaaaaacaacacaacaacaagacggggcaagaaagcaagaagaagacacacgggaaaagtaaaacctaacacacaaagccgcacggaccccccagcgcaagcgcaagagcacagtggaagagagaaacaaaacacag

SEQ ID NO: 530159 - DNA, 449 bp, Homo sapiens
ttttccacagtacagaagcaggcagactgtgagccagttctgaggcccagtgagttgttacaaagagaacagggactagccactttgccgtgtactcagagaagaccagagacagatgcttcaagtgcagcaaaagaaatttcagtcaaactgaagcaagaactcaccaagaatagcaggagacgcaagacacgaaaatggtttacaaagtgaagctgtgggatcccaaaccctgcctgtctttaagaacaaaggcagcactcacatgtccaaacggcctttgggcaaagctaactctaatccaaacgaggcccttgatctttgatctaaagcactgcaagctggtgctggacacaggagcacgcgatccctttttcaacattactaagcaggttgtgccagtcctggctgggcactgagtagacaatggtgaactggacaaactccag

SEQ ID NO: 530160 - DNA, 264 bp, Homo sapiens
ttgcctatataatgttgtttttgttgttgtaggtctcccattgagaaacatggccctgtttttcctgccctctacccccctattgctgggcttctgttgtccaagttggccccccctggctgggactgggctgccattaaccatgcccgttttctttgctgtcttgaagccttttcctagtagctccagggaacgcatgtggatcctaaacagccccttatatataattaagtgaccgagtaaataaattcaaaattaaactta

SEQ ID NO: 530161 - DNA, 103 bp, Homo sapiens
gcggtggccttacgtatcgcctagtgtcactactaaacgtacggcatccagcaggagttcgtcagaactctagcagcccttcctcaagaatgccccacgtccg

SEQ ID NO: 530162 - DNA, 206 bp, Homo sapiens
  misc_feature (31)..(31): n is a, c, g, or t
  misc_feature (95)..(95): n is a, c, g, or t
  misc_feature (110)..(110): n is a, c, g, or t
  misc_feature (155)..(155): n is a, c, g, or t
  misc_feature (161)..(161): n is a, c, g, or t
cagaccagacgggcagttgctgctgcgagangctgcccgcaccctggagaaggtgggcgaccggcgctcctgcaacgactgccagcagatgattnttaagctgggtggtngcactgcattgccgcctcctgaccaccaggctcagcccacccgtncaactntctctcgatttctctctctccccctcagcatcttcccgctgagag

SEQ ID NO: 530163 - DNA, 175 bp, Homo sapiens
gatcagttcacatccaaactacacagagtcaagattcaaacagttgctgccaaacaaggtgaatccgacccagatgaggaaagaaacaaggcagaaagttgtcgtacgtcaggttatcattagatagaagcttctatagtgcgcttattaaatctagatagacggtgcaggacat

SEQ ID NO: 530164 - DNA, 207 bp, Homo sapiens
  misc_feature (135)..(136): n is a, c, g, or t
  misc_feature (168)..(168): n is a, c, g, or t
gagctcacagagcactgcgtcagttagagatcagacgtgcagcaggagcgctgctgcggagaccagccctgcgcaagcttctctctgaaaggacagcctgctacagcggagcgctcatcgagcaggagaaggccnnagctgagcagctcttccaggacgagctggccnaggcacagcagctgcgtgaggagcagcagcggcagcagc

SEQ ID NO: 530165 - DNA, 103 bp, Homo sapiens
acaagaggctgtagaggatcgtcaacaacatctagagatgaactgaagggccaacctggacatgcatatctgggaacaatgaaaacactgaaagatgtctaaa

SEQ ID NO: 530166 - DNA, 149 bp, Homo sapiens
cgagctcggtccttgattcacgcaggatccattctctgtgtcagcagacaggcttaagctaatgtatgcctctattctgtaaagttctgtacataggttctcacagcttctgcagtggtggtgatttttagctcttgtccggggttgtg

SEQ ID NO: 530167 - DNA, 205 bp, Homo sapiens
taagatttagtttatgccattgcaggattcacagatagcaaggaatacacacatacttacatgtgcacacatgcacacacacagcacagtgtaatactgcattactataggtgattacagattgaggcatacagggaccatggatggcaacacataggaggaggtggcctacagtgcctggtagctagggaaggtgcctggagga

SEQ ID NO: 530168 - DNA, 139 bp, Homo sapiens
  misc_feature (75)..(75): n is a, c, g, or t
gtctaaggtccatcaggcgaagatgtgggactcttgatgcattgttctgcactaaaattatcactgtgtcactgngcaccttctgagtacagactaaattgttatttggatagaaaactctccacagtctatggcttat

SEQ ID NO: 530169 - DNA, 631 bp, Homo sapiens
gttccagaatatcttgaacatatagtctgagcatgatgcgcacgtgacagcagaaactgtgactggcaattgtaaaagcaagcggaagaactttgtggattaacaccttaggactttacgatagccgtgtaatggatacaaactgatgtatatacagacagctattataagctcacatctatgagtaagaagtctactgtatactgaggctcaagctagtgaagtggcacatcacttattgggaagtcaagaatggtacgttcctccagattttagataaatatagtgctgtgtagcagaagccatagctgtgagaccatagaaccgtttgagagtcactatatcacctgaacgacaggcacagaggttaatcatggtacatattctggaggatcgtgactggatgtgcagcaggcctaggagagagaagtctgtacagagtttgtgggaggcaaggatcacatgactgagtgaggatatacctgtgcagagctgagaagagaatacacttatgacaatgtgacgatatcaagtgcctcatgctatagtctatgaccacacatggtcacagtgtagtctgagatagggagctccaaggtgaatgtgtatcacgcgagaccacagttgatat

SEQ ID NO: 530170 - DNA, 431 bp, Homo sapiens
agcttgaaggcagtgaaaaagtaaatggaagaaagctctctgccctccacttgcctaaatgcaggatatagatttagaaggataaaaggggtctgctccctctttcgaccagggaaaagttaaccactgaagacaactttagactcttatgggcctggagctggaaccagaggaatggacatgaaggtgctttactaactctatttatctgccagttacttacctttctacaagttctccctttagacactcaaagttcttttcctttgtcctgtcgcttccctaaaacttggcttttctttgttgaagatgctatacaagctggaattcaaagctaccactttgagaactactcaattcctgcgtgtctcccaggcagatgtgaaatacacatgttaataaacttccactggtttttcaaaaaaaaaaaa

SEQ ID NO: 530171 - DNA, 110 bp, Homo sapiens
gttgtgtgaagcagccatgggcatctggtggggatgggacatctggccagagagcaggtgaggagcacccaagggcagagggagaactctggtcagagcaggaggaggcg

SEQ ID NO: 530172 - DNA, 506 bp, Homo sapiens
tcacgctttatttcataccgggaaatgaaatgagaagcgtgaggaagtataaacgttgaggaagtataaagcgtgagagagtataaagcttgtgcgaagtataaagcgttgaggaagtataaagcgttgagggagtataaagcgttgaggaagtataaagcgttgaggaagtataacgcgttgagagagtatatacgcgttgaggaagtctaacgcgttgagaaacgtataaaagcgttgagggagtataacagctttgtgcgaagtatcaagcgttgaggaacgtctaccacgttgaggaagtctacagcgttgacggaagtatacagcgttgagagagtataaagctttgtgcgaagtactaaagcgttgaggcagtataaaagcgttgagaaagtataaaagcgttgagggagtataaagctttgtgcgaagtataaagcgttgcggaagtataaaacgttgcggcagtatccagcgttgagacagactaagcgttgagggcg

SEQ ID NO: 530173 - DNA, 159 bp, Homo sapiens
cctctccgtctacactccggccccggggctctgagtccatatatactgaccctctccatctacactccagccctctccttctccagtcccggcccctgcgaatcccagtgtatatatactgcacacctccgagtgtatatacactgggagtcgcacggg

SEQ ID NO: 530174 - DNA, 584 bp, Homo sapiens
  misc_feature (584)..(584): n is a, c, g, or t
gttgttttttttttctttgtttgtatatttaatacagacagggtgttttttcgtgtccgcaaagaaggactcaataccaatgaactgacctcgtgacccgcccaccttgggctcccaaaacgcggtgattacagccttgacctccggttcccggccttttgaatcaattaattaatttgggaaacgaagccttgttttggccctccggccaaaaattggaattttaagaggggagggttttcaacaccgtggccccgctgggcttggacccccggtctcaaaagaaacaactgtctttgggcctaaaagaggtgtgaatacaagcgtgagacactggcacccgcgccaaaatcttcagttggggataaaaaagctttacactgtgttgggataataatgtgtggggacataatatttcaaagggcataatatttttttaggggacaacacaaaaaacaagtttttccctgctggaaagagcccccggagatttagagaggagaaacccttttagacaaagccttccccgggaaaagaaccctctttctgcgggggtggcgcttttccccccgggggcgcggccn

SEQ ID NO: 530175 - DNA, 183 bp, Homo sapiens
ttggtgcccgtcggtccgcgagccaagagcccgtctctgcaagattctatttatttatttatcgtggtggggctcactctgtctgccccgctaggtgtgtggctccatctctattgtttgatttattgccagtatggcccggagtgctccgttcgcctattgctatgcatgctaggtctatgt

SEQ ID NO: 530176 - DNA, 212 bp, Homo sapiens
  misc_feature (187)..(187): n is a, c, g, or t
ctgcattatagcagcctcgtaggctccagcctgggtacaagggagaccctgtactgggaaggggagggaaacaaacttttttccctaagtgctttactctttatatcacaagaagttgtgtgtcacagattttttgggtccctagaggttacacagtgacagcacacttatgtctctgccaacagangaagataagaattgggtaccggagc

SEQ ID NO: 530177 - DNA, 713 bp, Homo sapiens
  misc_feature (28)..(28): n is a, c, g, or t
  misc_feature (68)..(68): n is a, c, g, or t
  misc_feature (83)..(83): n is a, c, g, or t
  misc_feature (87)..(87): n is a, c, g, or t
  misc_feature (98)..(98): n is a, c, g, or t
  misc_feature (131)..(131): n is a, c, g, or t
  misc_feature (158)..(158): n is a, c, g, or t
  misc_feature (171)..(171): n is a, c, g, or t
  misc_feature (176)..(176): n is a, c, g, or t
  misc_feature (184)..(184): n is a, c, g, or t
  misc_feature (186)..(186): n is a, c, g, or t
  misc_feature (246)..(246): n is a, c, g, or t
  misc_feature (256)..(256): n is a, c, g, or t
  misc_feature (284)..(284): n is a, c, g, or t
  misc_feature (318)..(319): n is a, c, g, or t
  misc_feature (324)..(324): n is a, c, g, or t
  misc_feature (348)..(348): n is a, c, g, or t
  misc_feature (352)..(352): n is a, c, g, or t
  misc_feature (371)..(371): n is a, c, g, or t
  misc_feature (375)..(375): n is a, c, g, or t
  misc_feature (393)..(395): n is a, c, g, or t
  misc_feature (424)..(425): n is a, c, g, or t
  misc_feature (428)..(428): n is a, c, g, or t
  misc_feature (440)..(440): n is a, c, g, or t
  misc_feature (444)..(444): n is a, c, g, or t
  misc_feature (446)..(446): n is a, c, g, or t
  misc_feature (452)..(452): n is a, c, g, or t
  misc_feature (458)..(458): n is a, c, g, or t
  misc_feature (478)..(478): n is a, c, g, or t
  misc_feature (497)..(498): n is a, c, g, or t
  misc_feature (506)..(506): n is a, c, g, or t
  misc_feature (509)..(509): n is a, c, g, or t
  misc_feature (529)..(529): n is a, c, g, or t
  misc_feature (564)..(564): n is a, c, g, or t
  misc_feature (579)..(579): n is a, c, g, or t
  misc_feature (589)..(589): n is a, c, g, or t
  misc_feature (601)..(601): n is a, c, g, or t
  misc_feature (629)..(629): n is a, c, g, or t
  misc_feature (635)..(635): n is a, c, g, or t
  misc_feature (640)..(640): n is a, c, g, or t
  misc_feature (647)..(647): n is a, c, g, or t
  misc_feature (651)..(651): n is a, c, g, or t
  misc_feature (653)..(653): n is a, c, g, or t
  misc_feature (713)..(713): n is a, c, g, or t
aaaggacgaaaaatcattcatacatccnaccagcgagaggctgtactttctttcatccttcacaagtnatgtccatatatgtnatanacaaatgtacnttttacctttcaaaaatatgatattcacatatnacttagcctttttccattttatatctnaccaagaacctcnttttnacaaatgngnaaagttcttttattaaaagacagagacttggagattggttcaaaatacaataaacaatgngatgcagatnacaagagatacatctaaaaccattaatngcaacaggttataagtaggaatatggacaaaggnntatcnggaaatgctaataaaaagcaagcnatanggtattgttaatatcaganaaanatcaaggtaaactacatnnnataggggggaggagggtttcgattaaccnnccnacgcatcactanaagntngtttcngactcnccttatctcatctatttcanccacttctctaaacatatnntcattgcntanatgcctgtggtgtatatctnctttaaacgcctggagagaaagaatcagcctttcnctaaaagtgcctttngctttggccnccgcctctagcntcccctccgcggctggcttttcctcagnctttgnctctncctcatncttntnttcactctcattttctttttttccttccatttttttacattatttcatcttttatcttcn

SEQ ID NO: 530178 - DNA, 118 bp, Homo sapiens
gcggccgcctactactactactgctcgaattcaagcttctaacgatgtacggggacatgcccaattttcattctcactttatatgtgtaaataataaaatattcaactttccaaaaaa

SEQ ID NO: 530179 - DNA, 322 bp, Homo sapiens
gactttccaccccggtattgtcctttgtcccatggtccccggtcacctctcaccccttggtgtgcaagcccattttctcccatgcttctaagtgatagctacgggctatggactactgcatcctattggtagcagcttatgcgggtgcggccaaaaaaacagcttcaggacaaattgtccaaacttaacaaggtgggattaaattatcaactctgacacttacaattctacacaaacatgttaaaaatcaagcaaagatcccaggatggaacctatataatcatcccatgtgtgaaaggaacgacccgggccccgcgcctca

SEQ ID NO: 530180 - DNA, 153 bp, Homo sapiens
catccgccgtcgcctggactggccgctcgtttgacaatcaacctgatcgaccagcccaactacaacaccgcgctgttcgataccgccggcacgcccgacggcaacctgctgctgtcgatcaacaatccgttcctgaacccacgtggcgtctgt

SEQ ID NO: 530181 - DNA, 360 bp, Homo sapiens
taaaaggaaaaaaaaaagggttttttcccccattttttcccaaaaggtcaaaaaaaagcccggttaaaaaatttaaaaaacctaacatatttttaaagggtttaaagggccccaaaaaaggggggaaaaaaaaaaagaaaaaaaaagggattttttttaatttgaaaaaaaaaaaaattggccaaaccccaccctaaaaaagggggggctaatttttttaaaaaaacccttcaaaaaaaaaaattttaaaaacggggcagggggggtttttttccaaaattttttttggtcccaaaattaaaaaccagggcttggtaacaaaaaagggaaaaaaaaaaagtttttaaaaccgatcaattt

SEQ ID NO: 530182 - DNA, 102 bp, Homo sapiens
tctgaggttcccgacggctatcggatctgcccctacgtccagccgtcaactcccgccagctcactgtccagcctgcgatcccacacgggggacgcccccttc

SEQ ID NO: 530183 - DNA, 685 bp, Homo sapiens
  misc_feature (95)..(95): n is a, c, g, or t
  misc_feature (97)..(98): n is a, c, g, or t
  misc_feature (103)..(103): n is a, c, g, or t
  misc_feature (113)..(114): n is a, c, g, or t
  misc_feature (156)..(156): n is a, c, g, or t
  misc_feature (164)..(165): n is a, c, g, or t
  misc_feature (167)..(167): n is a, c, g, or t
  misc_feature (172)..(172): n is a, c, g, or t
  misc_feature (209)..(209): n is a, c, g, or t
  misc_feature (216)..(216): n is a, c, g, or t
  misc_feature (224)..(224): n is a, c, g, or t
  misc_feature (228)..(230): n is a, c, g, or t
  misc_feature (232)..(232): n is a, c, g, or t
  misc_feature (234)..(234): n is a, c, g, or t
  misc_feature (237)..(240): n is a, c, g, or t
  misc_feature (251)..(251): n is a, c, g, or t
  misc_feature (268)..(268): n is a, c, g, or t
  misc_feature (272)..(272): n is a, c, g, or t
  misc_feature (274)..(274): n is a, c, g, or t
  misc_feature (290)..(290): n is a, c, g, or t
  misc_feature (294)..(294): n is a, c, g, or t
  misc_feature (312)..(312): n is a, c, g, or t
  misc_feature (315)..(315): n is a, c, g, or t
  misc_feature (318)..(318): n is a, c, g, or t
  misc_feature (334)..(334): n is a, c, g, or t
  misc_feature (340)..(340): n is a, c, g, or t
  misc_feature (358)..(358): n is a, c, g, or t
  misc_feature (375)..(375): n is a, c, g, or t
  misc_feature (403)..(403): n is a, c, g, or t
  misc_feature (423)..(423): n is a, c, g, or t
  misc_feature (468)..(468): n is a, c, g, or t
  misc_feature (668)..(668): n is a, c, g, or t
cttcgttttcccagcctaggacggctgtgaagaaatcactaaaagggtttggaggtttctgaatacctgaagaacaaagcttattcagatctgtntnnctcgntgggtcttgnnaggtcccctgtcctctgggtgggagcttatggggtggtgggncagaaggnntnaaggnaattcactcctagatcgcagtggctggctgcttggcnaggacantgatgccnccannnananttnnnnttggtgaccanggacatgtcccagatgnacananaagcccctctctgccncccngggattttttagactttnacnttngatttccctaggatgnaagagnataggtgggagataaggnaagtggggtgagagganaaaggaaatgttggcatgggcctgtgtnatgtccctgaggcagaaganccggggactgatgggttcaggtgggagctgctgggtgaggcaggnaacccttttcactcccattccttagctttagtctaatggagccaaggactgctgggaccttcaaccctgatcttttgtcttccagtcttctcttagtgtcctgctcctaggtttccctctcttctggttcttctcccaggtattctcttcccaggcctctctggccactgctttgtatcagggtttttccgcttttgtanaactgaggtttcaataa

SEQ ID NO: 530184 - DNA, 112 bp, Homo sapiens
actttgataatatctttactaaggagctcctgaagggctgccctggccagggagcctcgaatcttcagtctctcagagcacacatggttgggatgagcaccaggtggggatg

SEQ ID NO: 530185 - DNA, 697 bp, Homo sapiens
  misc_feature (95)..(95): n is a, c, g, or t
  misc_feature (97)..(98): n is a, c, g, or t
  misc_feature (103)..(103): n is a, c, g, or t
  misc_feature (113)..(114): n is a, c, g, or t
  misc_feature (156)..(156): n is a, c, g, or t
  misc_feature (164)..(165): n is a, c, g, or t
  misc_feature (167)..(167): n is a, c, g, or t
  misc_feature (172)..(172): n is a, c, g, or t
  misc_feature (209)..(209): n is a, c, g, or t
  misc_feature (216)..(216): n is a, c, g, or t
  misc_feature (224)..(224): n is a, c, g, or t
  misc_feature (228)..(230): n is a, c, g, or t
  misc_feature (232)..(232): n is a, c, g, or t
  misc_feature (234)..(234): n is a, c, g, or t
  misc_feature (237)..(240): n is a, c, g, or t
  misc_feature (251)..(251): n is a, c, g, or t
  misc_feature (268)..(268): n is a, c, g, or t
  misc_feature (272)..(272): n is a, c, g, or t
  misc_feature (274)..(274): n is a, c, g, or t
  misc_feature (290)..(290): n is a, c, g, or t
  misc_feature (294)..(294): n is a, c, g, or t
  misc_feature (312)..(312): n is a, c, g, or t
  misc_feature (315)..(315): n is a, c, g, or t
  misc_feature (318)..(318): n is a, c, g, or t
  misc_feature (334)..(334): n is a, c, g, or t
  misc_feature (340)..(340): n is a, c, g, or t
  misc_feature (358)..(358): n is a, c, g, or t
  misc_feature (375)..(375): n is a, c, g, or t
  misc_feature (403)..(403): n is a, c, g, or t
  misc_feature (423)..(423): n is a, c, g, or t
  misc_feature (468)..(468): n is a, c, g, or t
  misc_feature (655)..(655): n is a, c, g, or t
  misc_feature (660)..(660): n is a, c, g, or t
cttcgttttcccagcctaggacggctgtgaagaaatcactaaaagggtttggaggtttctgaatacctgaagaacaaagcttattcagatctgtntnnctcgntgggtcttgnnaggtcccctgtcctctgggtgggagcttatggggtggtgggncagaaggnntnaaggnaattcactcctagatcgcagtggctggctgcttggcnaggacantgatgccnccannnananttnnnnttggtgaccanggacatgtcccagatgnacananaagcccctctctgccncccngggattttttagactttnacnttngatttccctaggatgnaagagnataggtgggagataaggnaagtggggtgagagganaaaggaaatgttggcatgggcctgtgtnatgtccctgaggcagaaganccggggactgatgggttcaggtgggagctgctgggtgaggcaggnaacccttttcactcccattccttagctttagtctaatggagccaaggactgctgggaccttcaaccctgatcttttgtcttccagtcttctcttagtgtcctgctcctaggtttccctctcttctggttcttctcccaggtattctcttcccaggcctctctggccactgctttgtatcagggtaanggctnccgaggtaaggctccggggatcctcaagtcagccaga

SEQ ID NO: 530186 - DNA, 113 bp, Homo sapiens
tagaggatccgacaacatagatgtgtgacccatatatgatttctttaaggatggtttagaaatggcaaaatgttcacacatgtggcattattttggactcctatcaacctgtc

SEQ ID NO: 530187 - DNA, 296 bp, Homo sapiens
  misc_feature (10)..(10): n is a, c, g, or t
  misc_feature (97)..(97): n is a, c, g, or t
acctgtacancgtgtctctatataatgcgtaggggtgagttaatgtcctttgaagtatactgaggaggggacgggcgagtgtcgcgctcaggtcctntgcactaagcactctactctcaggtttactgctaaatccaccttcgacccttaagtttcataagggctatcgtagttttctggggtagaaaatgtagcccatttcttgccacctcatgggctacaccttgacctaacgtctttacgtgggtacttgcgcttactttgtagccttcatcagggttggacacgaatgttca

SEQ ID NO: 530188 - DNA, 320 bp, Homo sapiens
ttacaccccacgatcacattagcattaggtttggtttaaatactaaaaagcaaatttataagactggtgattgagttataattttaacataagcccagaaaaccacagaggacaggccgggcacggtggctcatgcctgcaatctcagcactttgggaggccaaggtgggcggatcacgaggtcaggagatggagaccatcctggctaacactgtgaaacccatctctactaaaaatacaaaaaattagctgagcctggtggtgggcgcctgtagtcccagctactcaggaggctgaggcaggagaatggcgtgaacccg

SEQ ID NO: 530189 - DNA, 126 bp, Homo sapiens
  misc_feature (6)..(6): n is a, c, g, or t
  misc_feature (117)..(117): n is a, c, g, or t
gatatntcgtggggggacgggaagatggcggcgcggagagcgttcggggctgtgtgccggcgcctctggcagggattggggaatttttcggtaaacacttctaaggcgcaatacagnccaaaaatg

SEQ ID NO: 530190 - DNA, 1664 bp, Homo sapiens
ctcttttgttttagtggacgaaataatagactgctctgttcatgctgcttaacgtgttatagcaaaacaaaatacacactactggcttaacgtctaactgaactagctctcttctgcttttatcacgaactggcaacagacagcacagtacctttgctacgaagcattgcaccttccctacagcctaccttacagacaacctctgcaccaacgtaacgaacaacaacacttgctacgaaacccaatatctgcgcaacacacaacactgcacacacttctacggcttagttctcccaaacgctttctccaaaacgcacaaacctgccttcaaaccaattctcttaacttctcccacttttccaacttacacacgcaaacccaaaagaccccgaactaagccttgctatctctctaacttttaacgttctttccaactccttggaacaaaccgactttccccactatgctctcctctaaacttccctcgcaacgacccccttgtgacccaaagcaaaaccttcgtctccgaacttattctggacggaaaggctttctctcggaaccatcgccccccggccttcctataatcggggaatagtcggcccaccttatattgcccaaatttcatactcctctcggggcaatgccaacaacccttactaaacacctctcttcaacacacccgggccttggacaagcgcaaactctcctggtcgtgcccaacaatctccttcgggccacccacaaccttggtcccaaacgcaggcatttggcccccaacggcctcttgactcacctctcgtataggcttttcaacacactttggtctctcaacgtctgggccccgtttggccttacggcgcgttctccactcaaccagcggggcctataccaaccttcaccacgggcacacacacacctcttcaccttcctcaaaaagccgtttaaacaccctcccttggcgggccccatgccttctgacgggaaacagttatacacttcgcgggcctccaacaacctttcttaccacatcctctcttataccccccccgtttggctaacaccgctttttacccccccgtttgtcccccattaatggaaaccttcactccatcccggcacttatcgttttctccccatttaaacgggaattaaagcagcatttcccacaaacactgtgcccttcaacattataccacacttccccacagcggtcttggtcacaaaccactcttttggcccccagccacctacccaccagcgtttcaacttttattccccccccctgaacgagtctctcaaacctcccccccttatctcttggacaagcccccccacagggagctctccacatctcactatcacaatcactcactgatcactcagcaggcaaacacacacaatcttcccccttatttaaactcctgttttgtgccccctttcagtaggtacctctctaaccaccctattctggggcacacaacaactttccccccccccgggactttgtgcacacactatactgcgacatttccaacattatcaacccccacacttcccctatccccctgtggacggcgctttgacctttcaccggagcccaaaacaaacccacacctatcatccggggaaactattcataccacaatgcgcgacaaacgcgc

SEQ ID NO: 530191 - DNA, 99 bp, Homo sapiens
  misc_feature (91)..(91): n is a, c, g, or t
aggaccggagcccgtcagcatctcaaacatcaacaccccataggaccaccagtccgcactatgggagtggccctggcggttgacgacctcnaggggcca

SEQ ID NO: 530192 - DNA, 410 bp, Homo sapiens
cctttcatctccgcattacatatcagtattactctttaacataactagattaaatgctctacttcaaagatacagattcgtggaataaatttaaaaagcagatccaactatattctgcttatgagacatttgccttactcataaagacactgtacagactgaaggtaaaggggtacaaaaacatattccatgcacccaaaaatcaaacgcaagcagaaatagctatacttatatcagacaaaacagactttacatcaacagtagtaaaaaaaaggaagtctttatgtaataatacagcaaccaatgcaccaagaaaatatcacaatcctaaatatatatggacccaccactgcagcacccagattcataaaacaagtattgctaaacctaagagaaaaatatagatagca

SEQ ID NO: 530193 - DNA, 420 bp, Homo sapiens
  misc_feature (24)..(24): n is a, c, g, or t
atagaggtggatgttctcccatgnaattccctgaagacataacgcagtgacgaacgagccctgtgaacaacagaccaaaacaacacctccatacaacgttacacgaaggggcacatcctaacacctagttctttcctaatatacctatcactttgtctagggcaattctatagttttccacctataggaaatttgtatcagctcctggtcttgtggctctcctttctgagaagacttgctctatgcattccttgtatccctagttagacggcctaattcctcacctggcacatacacttgtatccatggaaaccatcagcacaaacacactgcaaaagacctggaccatcaggtacacaagatccattctcaggacacatttctggaggccagagagaaatagagaacatcagtttatcc

SEQ ID NO: 530194 - DNA, 106 bp, Homo sapiens
ggagtatgtagtttcggtcgtggagtcttgtgacagtgctgagtgggagacgtagaataggttgtctcagtgtgtataggtcgggctattggaggatcctactaga

SEQ ID NO: 530195 - DNA, 206 bp, Homo sapiens
ttgcatgtctgatctagaggatcccatcccagatactacgggagctgaggaggagaatcgcttgaacccaggaggcggagattgtggtgagccgagattgcgccattgcactccagcctgggcaacaagagcgaaactccgtctaaaaaaaaagaaaaggaaaaacatttgcacttcaattctccttcaagttaaaatgagttaaa

SEQ ID NO: 530196 - DNA, 129 bp, Homo sapiens
gctgattacgggcattggacatctgcactgacttgtgtacatctccgagacttgcctctaacctttacctacggttaatcaacgctatctcctcccaaaggcaatatcttcccaaggctatctcttccg

SEQ ID NO: 530197 - DNA, 1300 bp, Homo sapiens
caccatgcctggaaagtcctcagtatgcagagcaaccggctgaccaagatcgatggtgtctgcagtatacctgtgtgaagcctcgcggtgagacttgtacgcttagtccacaatgtgcattcggacggttctagtctgatggtgcctggcaggaggcaataagcaacactcgaacgactgttgggacaattgtcgatcaaagagtaggaaatcaagaatagtattgaacagagtatccacgtccatcgtaatcgacgcaggcgtgtcctggagattactggagtagaaccgatgaatgtccattgatgatgctggacgcgaggctctatcgatctgtgaaagggagccgaggacgccgtggaggacatgtgtagcctggtagctggaatcgcccttgcgagacaggacccctctagtaccggcggatagggtcgatgcgtcgcctctccccgtctcgtgtcgggcatgattcgtagtgccgacggttcgtcgagggttcgtgagatccttgcttggcgtcctcatgctggtccctgtcgtccgtcggcagagaagtgtgcagccacgggtttttaacccgacctggtatgctcctgaggtcggtcactgtatcaacagtcactaaaaccaatggcaattaaggcactgacgatagcctggcggcgcgcgacgccgacataccattttcacgatgccgaagcaagttaaatctttgccacacgtgtcaacatttgttgccaatctctggttgaaagggggacgagcatgaaaggatcccaggggggggcctgacttgtgtctattgccatgggtatgttggcccgaagggggtgccaaaggcgaggggacacaaaaaggcagagaaggggcgccgcatggtacacaacggccaacgctgtggcgaaactggaagcctggggccgttgggagacgagacctttctcccaggcgggggagaagtgtgggggaacaccctcgagcaatttaaccgttggggaaaacaacgactgaggggcatatggtgggggagccccccagagacaacttgtcggggcgaacgaaggtatttgtcccccggacgtattttttagagtcagacacgccgcacgagaaggaacaatgacaaaagacaacgatgagtacagggacaaaagagctagcgagtatactcaccctaccaacagagagagcgatgcagagcaacaacgccagaactcatgcagaagacgacatcgaagataaagaacaagaacgagcgaacagcacacgagcaagacgaataacacggctgccagaagca

SEQ ID NO: 530198 - DNA, 225 bp, Homo sapiens
gtctgcctgcgctgtttcacgaggctgctgctgtccaatacgcaccgttatccaggcttcttgaccatgctatgctccaagctcatcgcgcgcaccatttggccattgacagctaccaggagtttgccgaaacctatagtccaaaggaccagaagtattcattcctgcatgattcccaaaactccttctgctactcagactctattccgcaaacctccaaaatgg

SEQ ID NO: 530199 - DNA, 238 bp, Homo sapiens
tccggaggtccaaattaaaaaccatttaacatttaaacatattagtcccgggagctttacttggggtacatccacacgaaaaaccaattatttattaaatttccctttcttagcaaaagccccaaaattggcaggccccccccaaactgttccaaaaagatctctttcgttctgaaaggcttcccccaaaaaaagccctcggccggaacaaaaagattttttcaaagcccaaattact

SEQ ID NO: 530200 - DNA, 507 bp, Homo sapiens
  misc_feature (1)..(1): n is a, c, g, or t
  misc_feature (17)..(17): n is a, c, g, or t
  misc_feature (99)..(99): n is a, c, g, or t
  misc_feature (128)..(128): n is a, c, g, or t
  misc_feature (134)..(134): n is a, c, g, or t
  misc_feature (163)..(163): n is a, c, g, or t
  misc_feature (181)..(181): n is a, c, g, or t
  misc_feature (194)..(194): n is a, c, g, or t
  misc_feature (208)..(208): n is a, c, g, or t
  misc_feature (234)..(234): n is a, c, g, or t
ngggctgatgaagcccngcctctggaggaagatgatctgttggtggcatgccactggcctctttagtttgcttttgtttgtcctgggaaagtgggcatntgcccccattggaccttggatctgcattncccacnggggaaccccttgctttagggggcccccntacccatgagggtcccanggatgaccacccngcgttagccccccngcaagtactcacacacacttcctccngagccagatcatttagtttaagggaagggctcatccactttcagagatgggtgttttagtgattagacatgcgacttctctggtagagggcatttattttttaaaaaagagaaagggtaatgaatcggacactatctgtcaaattctttgctaggagtggaaacctaagttttcccaagtccgtatttccctgagaagaaattgattttggtatgatccataaagccttgtacagtgaaataaactattggcagaaaagagacaaacacatat

SEQ ID NO: 530201 - DNA, 143 bp, Homo sapiens
gcgggacaggctgtgtgaacacgcctgatagaattcttccatgtcgcaaggcgtggtgaatacgggcgtggatgcattcattctgtccactccttcttaatcgagcaggttctactcccagctgaggtggtcttgcttgtcat

SEQ ID NO: 530202 - DNA, 261 bp, Homo sapiens
atctagagatcccgaagctgcacgaatcccgtcatacaggagagaagcctacaagtgcccctctgcccttatgcctgtggaatctgggcaacctcgaagcgtcatggtcgcatccacccatgtgacaaaccttctcggtgtagcctttggaactacagctgcaaccagagcatgaacctcaaaggtcacatgctgcggcacaacaggcgagaagcccttccgctgtgccaccttgggcctataccagggggcactgggaca

SEQ ID NO: 530203 - DNA, 521 bp, Homo sapiens
  misc_feature (371)..(371): n is a, c, g, or t
  misc_feature (501)..(501): n is a, c, g, or t
cgatcatggaagttactcacagaatagatcattcatatattccttgaaacacacaggacagtggatgccactgagactatgccgcaatatagtaagcagtgagcactctactcagaaaccttatgcagatctgatatttcaaattgcccacgtcactcacttcatcttagtaccataagtgggatgatttttgactttattaccgaatcaaatttcaatgaaagtgtgagctaggagaaatttgcctggtttaatattgttatcgcttggacagagctttaaccatggaggtaggtccctcctacatgcctctcgctatgatgcgcacaaacgtgaatgatggacgtctttttgcgatgtcagcgaaaggnagaaactttgacgtactccggtatgcataggccctgagaaacactcgaacctctgaagagtggcgtttagtgagccaagactgagcctatgaccttcaccaaggtgacatagtcgcgatgccgcttgaanattagaagcactgatactct

SEQ ID NO: 530204 - DNA, 561 bp, Homo sapiens
  misc_feature (107)..(107): n is a, c, g, or t
  misc_feature (117)..(117): n is a, c, g, or t
  misc_feature (128)..(128): n is a, c, g, or t
tctggacaaagtgtctagtaatatgtctcagcctggtgggctgagtcctttggtcattccatactagatgatagcttctactcctattctgccccaagcagcagganctacttctanacctttattancccaagtacctagtatcccacccttggtacagcctgttgccaatgtgcctgctgtacagcagacactaattcatagtcagactcaaccagctttgcttcccaaccagccccatactcattgtcctgaagtagattctgatacacaacccaaagctcctggaattgatgacataaagactctagaagaaaagctgcggtctctgttcagtgaacacagctcatctggagctcagcatgcctctgtctcactggagacctcactagtcatagagagcactgtcacaccaggcatcccaactactgctgttgcaccaagcaaactcctgacttctaccacaagtacttgcttaccaccaaccaatttaccactaggaacagttgctttgccagttacaccagtggtcacacctgggcaagtttctaccccagtcag

SEQ ID NO: 530205 - DNA, 644 bp, Homo sapiens
  misc_feature (190)..(190): n is a, c, g, or t
  misc_feature (200)..(200): n is a, c, g, or t
  misc_feature (211)..(211): n is a, c, g, or t
atacttacctccgcccagaaggaagaggatatgtgcaaaagagaggcccttccatctgtcgcatctaccatttcctctccgtgagctgtacgcttagatctcagtttctcatccgggtgtgcctgcacccttggctcattccatcatctcatagtcttttcctctgtatacataccccaagcagcagganctacttctanacctttattancccaagtacctagtatcccacccttggtacagcctgttgccaatgtgcctgctgtacagcagacactaattcatagtcagactcaaccagctttgcttcccaaccagccccatactcattgtcctgaagtagattctgatacacaacccaaagctcctggaattgatgacataaagactctagaagaaaagctgcggtctctgttcagtgaacacagctcatctggagctcagcatgcctctgtctcactggagacctcactagtcatagagagcactgtcacaccaggcatcccaactactgctgttgcaccaagcaaactcctgacttctaccacaagtacttgcttaccaccaaccaatttaccactaggaacagttgctttgccagttacaccagtggtcacacctgggcaagtttctaccccagtcag

SEQ ID NO: 530206 - DNA, 231 bp, Homo sapiens
attctctgaatggggtctcaagagagacggagtgtccccacccgatcctgactgctggctcatgctgctgggctgagcggcagaactgtgtgaccctgggccagtcacttgaagctttctgtcctctggcagagaaaggtggcctcctgcttgagtcacactgggactccaatggcaaaagaaaaacagggcagtctccaccctctatgatgtttctccttccactgggca

SEQ ID NO: 530207 - DNA, 292 bp, Homo sapiens
cacagcctcccccgccagccccaagttgggccaaggggcgtttgtgtatatctgcctcccctgtctgtaagaagcagcgggaacggaggttcgacccctcctcagtaaaaggtggtggggctcccgaatttgggctgtggggcccttgggccacgcttttaagaaagcccaggctcggaggaccctggaaaacagacgggtttgagactgaaattgttttaccagctcccagggtggacttcagtgtgtgtatttgtgtaaatgagtaaaacattttatttctttttaggta

SEQ ID NO: 530208 - DNA, 177 bp, Homo sapiens
cgcccgtcagctgcgtcggcgtagacttccactggacagttcttcacaattccgtgcatcatgttgtaaatatttttttgactgcctatgggctgtgatgtatatagaagtggtacattaaacataccctcatttttttcttttttttttttttttttttttttttttttttttttt

SEQ ID NO: 530209 - DNA, 440 bp, Homo sapiens
ctgagtgaaagttgggcagctttgcttgcagcccattataaaagatctgggttccttaaggtccatgttctcagcagtgacacaaactcactgcctgggcagtgtctttctggggcttcctgtttgtccctgtgggactggggatggagtgataagaaaaaccaacgtgaacctgaagcctgtgtaaatcttttgtgctatgagtatacatcttttgcctctcacctaggagtcttggtttcttctcttaggccactgaaaatatagcagtctaacttcttagcttgtgaagagagtaaaatctttgacctgctgtaattttagacaatggacccaatggatgtttttttttatttatagagaaatatttcacttcatttcctctttttacttaatagactaatatgttttcttaggagaaacttggaaagtatttaaag

SEQ ID NO: 530210 - DNA, 110 bp, Homo sapiens
gactagccgggttgtatttgagacgcggagttagtttttccgtgctgtgtaggggctaacaatggacacccagaagggacgttcaaccttcagagcagcaaccaattata

SEQ ID NO: 530211 - DNA, 198 bp, Homo sapiens
attcggcacgaggaacggtttcattcattctacaaatacatactgacagcacagtcatgaataagatgttcctgccctggtgagtcttatattttagcaaattaaaaaaactctttggacagggctgccaggtgaggttggccagtctgtacactgcacaaaggcacctgggacaagggggaacatgggggctgcaaa

SEQ ID NO: 530212 - DNA, 174 bp, Homo sapiens
cctggattggatgttaagtaaaagcttgttcagggccgggacatttacttaaatctgtttttatttttgtcatgtaaaaaaccaccgtggtcatcaaaaaggaatccaattctggacccttttttttttttttttactttgaagtctttaaataaaatgtataatcccccttta

SEQ ID NO: 530213 - DNA, 849 bp, Homo sapiens
  misc_feature (5)..(5): n is a, c, g, or t
  misc_feature (23)..(23): n is a, c, g, or t
  misc_feature (72)..(72): n is a, c, g, or t
  misc_feature (236)..(236): n is a, c, g, or t
  misc_feature (849)..(849): n is a, c, g, or t
cctangagtgacttacagctganctactagtcataacgagtttccagtgacccaaatagccaaaacagctgnggaggaaaaacaagctggaggacccacacttcctgattttgaaacttgctacaaagctatagtactcaacaaagattggtaatggcataaggatatatattaagaacagttatttcaacaaatagtgctgggacaatgggtgcccacatgcttttgtttaaagncgtccccttaccttaaaaaaataaaaaaaattttttttttggcctcaacggcggagctttacggccgttctcctttagccaggggtaatccatgatcctctctcattcactccaaagctcttggacgtattgatcccgtcaacagcatcacccttcttataggcaggcacgccggatatcactcatactcaaacgatcccccccccatcaccatgctgaccaactgcctagttaaaggccagaaacccgcttactggcctctccgccaccccctcacattcctgatccttccccccaccaccacgccgcataatacaatagtcacctatatataataaacatcgctctatccacgtcactatattacaataagttcaatcatctcactccactccactccttcattcgtcacacattcttcttatttcccacctcttcccaccattccattaacccactctctcttatatcactccacctacctcacatctactctcattcttactcttatcctcccgactctatcttacaaccatacctaaccgaatacaccgaataatatcatcacaagcgctctctccacttcacactcttattagtacgtcaacatgtn

SEQ ID NO: 530214 - DNA, 187 bp, Homo sapiens
cgtgtatgcgcggtcttatgggaacctccatgtgccatgggagcggcctagataaggcaaaaagacataaaaaaaaagaaagaaagaatgacagaaagaaagacagacagacagacagaaagaaagaaagaaagagcgagcaaggctttctctaggagacgggtgtcatttgactgagaccgctctt

SEQ ID NO: 530215 - DNA, 1292 bp, Homo sapiens
aagtacatactacaaaatatgcatccttcacaatgaatgcgcttctcacagataggttcactgacaatctgtactgctatcattcatcccagtccaacacccacatacttacctattatcctttcattctcacacacagctttcaccaacaccactaggaacacccaagccttacctatcatatgcatttgctgctcctctacccacctcttgcactgcagcatgggcaactaacctctctccctacgaatacaccttatcctctatgaaacacctaccttcacgtcgaacacctgcacacacacctacactttaccacactcttcgtacaccctactccttacactatcatcctccttttctcctacacaacacctactaacaaccagttccggtgccacttcctaccacctctcaggcacgcattgccccaaccttgacacttaaccacttacacctattaacagcccacccaaaaacaattaaccccttaggccacaatcttccggcgcacactatctcggacatctctcaactaacgttacaccaaacgacctacccattcccacctaacttgccaacaaacgccccttacataattataacaccacacacaacactttctccactatccggaccccacgtccccccacccacgcccccataattaaccaaccacaaacgacactacacaacaatggttcccacttggcccctaacaattccttggcacaaccctaattctactcctaccaaaataccccgttaattatttacctaggcgtccggctacccaccctatagcacttactcacggacagccatggcactagtccgctccccatgggcacaccctttaccctggccgcaccccttccccgcgcccacggctatcaccataaatatggggcacgcctactctcgcagactttcacaccacccatctactggtcaaacacacgcccttggcaacccgttcaagccaccaagccctacaaagtgtacgaccagcccaatactgaagcccaacccggctatggccgaggactaataataaaagcgctacactgaactaccaaccccgaagcgacccaatctcacggaccatgcctgtctcagcacgacatttctaggctcatccaactgggcacccgggacattatatccacattcaccagagcaactggcccacaccacttcccgcccgctgtgtcccttgcaccacacacaagaaatcatattcacttgtaagacaacaacgccccacgcacaacaaataccccccggtaaca

SEQ ID NO: 530216 - DNA, 734 bp, Homo sapiens
accgtgccaggcagacaggtctcgagtagcttgccacattgtggaacggacacccgggagcagactgcagtgaggggataatgaaagtgcagtccgggggctttttaaaaaaaaggttggagccgcgacgtgtgacatactggataagtaagggaccagtaataaggttctgtacatactcccgagacccagatagagaaaggtgctatcgttccacgtccaaacctgtgttcctagtattaaggactttgatatagccaccggccaaattattggtgacatggatgttaccgctccaaagatttatacaagattttaacctagttttctcccctattatcccctgctaatgtggatgtatgttccgaacaccctttagtattgatagcttacatatggcccaaggaataccgtttatagccaaacctgggtatgctgtagctaactttataaaagtgtatatgaaccatgtgagaaaattatatatctgggaggattttttggttgcctaaagtggctatagttactgattttttattatgtaagcccaacccataaaaatttaagtttttttaaccactaccctatttttcgctgtacagacactattccttaaatactaattgattgtttaaaaggaatataaatgtgaccagtggaccttatttatgttaatataccattatccaggccagtatgaagttattccatttaaatgccccctttctggtcca

SEQ ID NO: 530217 - DNA, 477 bp, Homo sapiens
  misc_feature (1)..(1): n is a, c, g, or t
  misc_feature (160)..(160): n is a, c, g, or t
  misc_feature (169)..(169): n is a, c, g, or t
  misc_feature (171)..(171): n is a, c, g, or t
  misc_feature (215)..(215): n is a, c, g, or t
  misc_feature (217)..(217): n is a, c, g, or t
  misc_feature (219)..(219): n is a, c, g, or t
  misc_feature (237)..(237): n is a, c, g, or t
  misc_feature (239)..(239): n is a, c, g, or t
  misc_feature (267)..(267): n is a, c, g, or t
  misc_feature (272)..(272): n is a, c, g, or t
  misc_feature (284)..(284): n is a, c, g, or t
  misc_feature (299)..(299): n is a, c, g, or t
  misc_feature (310)..(310): n is a, c, g, or t
  misc_feature (318)..(318): n is a, c, g, or t
  misc_feature (328)..(328): n is a, c, g, or t
  misc_feature (330)..(330): n is a, c, g, or t
  misc_feature (339)..(340): n is a, c, g, or t
  misc_feature (347)..(347): n is a, c, g, or t
  misc_feature (353)..(353): n is a, c, g, or t
  misc_feature (375)..(375): n is a, c, g, or t
  misc_feature (381)..(381): n is a, c, g, or t
  misc_feature (420)..(420): n is a, c, g, or t
  misc_feature (448)..(448): n is a, c, g, or t
  misc_feature (460)..(460): n is a, c, g, or t
nctttctgcagccatttacttacataccttttaaagagttactacaagatattttagaaaatttaaacagttaatacaagaaaaatatgaagtgaatagttcatgagcactaaactgaagctgttcatgacacaaagtatcttagaaaacaaatctcggntgggccagnantttgtgaggtcaaggccagcagatgacttgaggtcaggattttnanancagcctggccaacatggngnaaccacatctctactaaaaatacaaaanaattngccaggcatggnggctggtgcctgtcntcccagctacngggggggntggggcgggngnatcgcttgnncccaggnagtggnggttgccgtcaggtgagatcanaccacngcactccagcctgggcaacagagcaatattacatctcanaaacaaaaacaaaaaccctaggaattgncttcctttatgnctccagaaaacatatct

SEQ ID NO: 530218 - DNA, 202 bp, Homo sapiens
gagtcacagaatgtattaacgtcagttgatctgtgctattgggtagtgggtttgacttacggcattcatttaacttatttgagactcgaccccaaactctaaattgagattcacaaatacaatccgttgagaagcttacgcttctcaacggtacattttatatgtatagtaccaacaaaaaaaaaacataaagaaaactagt

SEQ ID NO: 530219 - DNA, 767 bp, Homo sapiens
  misc_feature (531)..(531): n is a, c, g, or t
tctggctaccgggaactaagatggaaggttttggggggtcgcggcccggatttggggcggggggtccggccccaggacattttataccgctttccgtcacattcccgatgccttcagtggaactccgggcgttcgtgcagttcatcagagaggtccctaattcagcggcgtgattcccaaatactccctatgtggtgtgccccgggcacctcagcatctcgtcgggcgtaaagtgtccgaggagcggagagtggtttgtttgctcgaagaaattgtcggggtaatccatagcgggcctccgtaggcgtcagcgaattctctcgcgcaccaaaaaaatatccttcgtgcgggcgtagtttagtgggcgggagtctcgacacagaagggtgactcactcgagtgggcggggggtgacccgtctgtggggggaaacatacacgacctgatgttctcccaaggtctatgtgtggacagccatagtttctgcggggccgaaatgtggtgacatgggtcgtgagagagagagctctntttcgggggagaaaaatggggtgccacgagctctatatagaaggtcctctaagagaagagggcttatgatttggcctagttatcccccaacggagttggggcagtggaaaaaccgcctgaagtgtgggggcgccccccataagttgttttttaccccgaatggcccagccgggggaagtggccattttccgaagaagaagtatattttgggaaactcccctctttgtggggggggg

SEQ ID NO: 530220 - DNA, 871 bp, Homo sapiens
ggtgcggccagtgcacggcctcacccggcatcgcgaccctgtgccccgccggccgagcatgtggcgcgctgcgcctcaggcgggcccctggcccgggcctgggctcctgctgctgctgctgctgctgctgctgctgctcgtggctgctggcccctgggctgcgcagtggggctgcggggcctgcgtgcggctgctggagcaagaacaagctacctgactgcacggatcaagcacctatctccgcagatgcgtccagcaagccatgttacggctgaaggaacaacgatgcgcagccgactcagcaagtatctatggccaaggctgaactgacgagactttgatgcagggaagtggactattcttcgatggacgaccacctgtggaaaagtcatggaaccagaaactctaaggcaatgtactagcgacattgaccgatctaccaaaaacatgtaaccagcaagtcacacgcgccagacactcggatagtaccagacagcaccagagcacgaagcagctcccatgcatgagtacaggcgtacagtcactccctgggcactacctgactatacttgtccacatagagcccatagggctacaaccatcatcacaacgtaccaagccaacgatggatagtaacgagaacgactaacaatacatggaactcagagacggagaacagaacctagatacaacacatagtactgacgatgtacactacatgaccacaaagatacacaacggacagaagccaggagcaaacgcgcgtgccagacgacagatgctcacgatggatagaccgtactactatcatcgaccaggagaccatggagcaatataacaggccgaagccaagaacccaagcggaacccca

SEQ ID NO: 530221 - DNA, 302 bp, Homo sapiens
gggaagacggaaactactaaagacctggacagacccctgggcaccatggtgtatgtcttcaactgctcagagcagatggactacaagtcctgtggaaacatctacaagggcctggcacagacgggagcctggggttgctttgatgagtttaaccggatctcggtggaggtcttgtatgtgattgctgtacaggtaaagtgtgtccaagatgcaattcgggccaagaaaaagaagtttaacttcctgggagagataataagccttgtccccaccgtgggcatctttatcaccatgaaccccgg

SEQ ID NO: 530222 - DNA, 129 bp, Homo sapiens
ccgcgtgttatgtctacgtctagatcggatttgttaaccactgcgccacgacgggaactccgcagctgcatcttagattcagctccctggcctggaaatttccacgtgctgtggcgcgcagcaactggg

SEQ ID NO: 530223 - DNA, 460 bp, Homo sapiens
  misc_feature (95)..(95): n is a, c, g, or t
ggattctccccatttcaaagagaagagcacagaagagggagaagtggctgctctgcgcctcacggccagatccaggaaacagtgacattcaaggnatgtggccatggactttcaccagaggagtgggggaagctggatcctgcacaaagggatgtgatgctggagaactataggaacctagtctcactttggcttccagtttccaaacctgagagctacaacttggagaatggaaaagaaccattgaagcttgagagaaaagcccccaaaagcagctattcaggtgagccagatagatgggagtcttcataaatgatagcccagcaggacaatgaagaaatacttttcagtgcttaagaaagtgcctgtgtgcccttatttttaaatttttttaaaattctaaagcatttaaaatatatacagaagtccagaaaataaaataacattcatgtatccatca

SEQ ID NO: 530224 - DNA, 822 bp, Homo sapiens
aaatgactgaccgtgcaggcgtgaaccacatcacgtgcagtgcactggttgcactgagaagctcctggcattgcgtcggatatcgcaaagttctaggcatggtgccattaccgaaatgagccgacgttttaacatccatgataaaggaaatgaggaagagatagtggaggtggagttgatggatttgaagctgaggggaagaaagagacaatcaaagatgtatgataactttgaaaaggtgtctgtaaatcttcagtgttaataaaacagatgcccatttgttggctgtttgtcattcataataagtgtctggattgaaaaatttatcaagatatgttagaaggatttcatggagatgaaccaaagttttgctatgatattaaaatgtgtacagtgtgaggtattattcgaatggaatagactcccaatacaaagaaaaggtgtttcgggctagggggaaacctggtaggtccgattttgtcccatgaatggatataaattttataggttgcatagttatctgacgcatatttgtggggtacttattatgagctaggggctggtctatatgagagtgcttcagggaaatgaattgccgggatgtgtggtctgtgtagctcgtggatttgggacatctaatgggacaaggtggggtgagaatagaacgggaagtgtaagtgacttgtgtaaaagatgggatcctcaccccttgctaggatttcaacggggcggttctgggtacggggaatgagcagtggtaactgttgttaggttgagacaaaaggatgtgccattcaggtccacggagtgggaaatgtggtg

SEQ ID NO: 530225 - DNA, 699 bp, Homo sapiens
tattgctgggcctgggcggtctttccggtggaccaagttggtttttggttggtctcccgttaaacatggggcatgatccctgtctccttggatgtctctcaagccgagaagaacccggcacccaccctccttcttctcgaagccataggttcactgcttccaaggatctggctggagcttcgcggaaaaatgctatatctttaaaccgtctttgtcttccggcgataatatactttgccagtttagcgcttaacacggtccttataagacacttgtagagattagggtcctttttcccgttcattcaccgttaggagcaaatgcctgttataggcataaccacacccctccaaccttttgggaaacaaagggaacttgtgcctttgaggacgacaaagcccttttggcctggagagttgctaaccccacagtggagcacaccacgctttgttgtccttctgcaaatagcccgagtgcaggcagaacgcagtcattctgtgtttatctgagaggagctttgggatataaatagtgttcaggccccgcctgcgctgtcattccagcccagcctcctgaattgagctgctttccgggcgggcttttttcttgttggcggtcaccatgctgtgttcaaatgggctttgtgacaggtttggatgttttttatcactgaataaaactttccactttggaacaata

SEQ ID NO: 530226 - DNA, 138 bp, Homo sapiens
gaatactttcaggagagcaagctagaccccgaaccagacgagctacctagaacagcataagagcacacccgctttttagcaaaatggtggagattttatggaagaggcgacaaacccatccgagccctgtaaatccgt

SEQ ID NO: 530227 - DNA, 715 bp, Homo sapiens
  misc_feature (214)..(214): n is a, c, g, or t
  misc_feature (223)..(223): n is a, c, g, or t
  misc_feature (232)..(232): n is a, c, g, or t
  misc_feature (240)..(240): n is a, c, g, or t
  misc_feature (284)..(284): n is a, c, g, or t
  misc_feature (288)..(288): n is a, c, g, or t
  misc_feature (293)..(293): n is a, c, g, or t
  misc_feature (301)..(301): n is a, c, g, or t
  misc_feature (377)..(377): n is a, c, g, or t
  misc_feature (385)..(385): n is a, c, g, or t
  misc_feature (427)..(427): n is a, c, g, or t
  misc_feature (431)..(431): n is a, c, g, or t
  misc_feature (455)..(455): n is a, c, g, or t
  misc_feature (460)..(460): n is a, c, g, or t
  misc_feature (468)..(469): n is a, c, g, or t
  misc_feature (474)..(475): n is a, c, g, or t
  misc_feature (497)..(497): n is a, c, g, or t
  misc_feature (501)..(501): n is a, c, g, or t
  misc_feature (552)..(552): n is a, c, g, or t
  misc_feature (595)..(595): n is a, c, g, or t
  misc_feature (639)..(639): n is a, c, g, or t
  misc_feature (649)..(649): n is a, c, g, or t
  misc_feature (675)..(675): n is a, c, g, or t
ctgcgcccagaaccccctgcaccccagcccgtcccactccgcgtgcaaagagcccgtcgtctacccctggatgcgcaaagttcacgtgagcacggtaaaccccaattacgccggcggggagcccaagcgctctcggaccgcctacacgcgccagcaggtcttggagctggagaaggaatttcactacaaccgctacctggaccccggcgccggnagggtgggngttcgcccngcgcgctnctggccttctgccgagcgccagatgcaaagatgtggggtgccangaanccggncggcttgnaagtgggaaatagagaccacaagtgtggcccaacaccaatgatccggctgctgggtgggtggctggcatggctcangccgggangggccccctgggccaggcccaattggagggcccccgcgcgtntaanttgcccccgcacgcgggaagccancgaancttcgggnnggggnngggcattgagttgcaggggatngggngggggggacaggagggggcctgggggctggggccccggaaaatatatattntgccctgcccccacacttttatataccgaataaaccgcagaangaggtgggagggggaagctttattttatagaaaatgaccaatangagggccacnggcggagggcccccccaagaagcaangattcaaaatctctttgctttcctttccttaaaaaaaaaa

SEQ ID NO: 530228 - DNA, 695 bp, Homo sapiens
gggcggtacggtccggaatgttgggataatggacttccactttcatcaactttccatctcatcgctttaaacaggaacttgaacaagcactgttagtttagacctaaaggataggaaagcattaaataatactttggatctcctgaggaaaagataagtttgcttgcaatttacacattccatggggaaagaagagccatatttccttaaaaaaaaattaataaagcttgttattgagaaaaattgtagtgaaaagccttaagtaccaaattttaaagcagcagtaacttaatttttatatcagtgtttttgttttgcacaaactaaatgcagtggtaggtgggtttatgagtatattaattgcctttatccatttgtgaagttaagttgatgagggcaaggtttttgtttgtttaatttgtatatgtctaaaggtatttggaactttttacaggaattaaacatatatgcaaatttgtatataaaaatagcatggccatcatttgaatgcttgtaaatgaaaggattatcttttttgagatctatatataaatagaaatagtttattacaattacacatcagttttgacacagtcatagcaacattaatattttcccatgatgcagatcctttttgtaatgggctttgtctttgagatctctgtaaagaaccctgtgaactaggaaacataact

SEQ ID NO: 530229 - DNA, 622 bp, Homo sapiens
gggcggtacggtccggaatgttgggataatggacttccactttcatcaactttccatctcatcgctttaaacaggaacttgaacaagcactgttagtttagacctaaaggataggaaagcattaaataatactttggatctcctgaggaaaagataagtttgcttgcaatttacacattccatggggaaagaagagccatatttccttaaaaaaaaattaataaagcttgttattgagaaaaattgtagtgaaaagccttaagtaccaaattttaaagcagcagtaacttaatttttatatcagtgtttttgttttgcacaaactaaatgcagtggtaggtgggtttatgagtatattaattgcctttatccatttgtgaagttaagttgatgagggcaaggtttttgtttgtttaatttgtatatgtctaaaggtatttggaactttttacaggaattaaacatatatgcaaatttgtatataaaaatagcatggccatcatttgaatgcttgtaaatgaaaggattatcttttttgagatctatatataaatagaaatagaaaatccagctggactgattaggattcttttttaattcatttgtgtataacatttttatc

SEQ ID NO: 530230 - DNA, 402 bp, Homo sapiens
cagcagggagcccttgatgcggtctaggacctgccaagtgtccacgtcgaagaagctctggtagtagccgaaggtccagaatccgggctgcggcttctcctgcaggagcgctgccttgtcgcccccctcctcctccgcctcctcctcttcctcggcgccgtagctgccgctcgagcccatggccactgccacgtgcccctggggggtcacttggtcactcttgctcgtggtggcggcatcgggggtctcggccaggagattggtggcttcctcgaactcgtggaaggccagctcgtcggccgctgccatggtcgccgggcgtcctcactgcatcccgctctgaggacggagctcccttcccggggcctgtgccccggctccaagcactgcgtagtgagctaa

SEQ ID NO: 530231 - DNA, 226 bp, Homo sapiens
ttcaccatcatccatattcagtcttcctgccctactgtcaatcacagggttgtgaaaatctaatgtgatactctagatgaagtcctttcaaaattcaagttgctgtggacaatctcttagcctctctgtggttaatggtctattctttgattcgatgcaatagtgggaaatgcataatctcacgcttattgggcctgtgaacgtattacggtactgtgctcgaatt

SEQ ID NO: 530232 - DNA, 161 bp, Homo sapiens
atatttacagattgtgtgagaactcaagcccgtctcattttgatctgtctacctccattctgaagagtggaggttatggtgtccgtggtcctctggaaatagaagatccatttgtctttgtgtagagcaagcacgttttccacctcattgtggcggaaggg

SEQ ID NO: 530233 - DNA, 192 bp, Homo sapiens
atggaggtcacgcacggtgctcacgtgtcgacggaactatgtaccgagaaggcatgcaccgacatggtgcatacacgtacaaccaggctccagtctataacgatataacggagagtcagacaaggtgctcacgtgtcgacggaacttgtccagggaggcatgcaacgcagtggtgaatacacgtcgagctgc

SEQ ID NO: 530234 - DNA, 664 bp, Homo sapiens
cactgtggggacctggagcatggctcacagcctccctcacctcctgtaagagaagctgcttgggaccaagcactccatcggctgacagcagcctctgctggtcctgggacaatgacgcatgctggccctccgatggagagggcagatgaccaccatgctgaacctggggccatgccactggatggttgcttggcttcagacgcaccttcagaacaatgtaatgtgtcatgcgtctgcccgcctcacatgcattcactatgcccttggtagcttgtggatgctactactagggagtgtccttgcctggtggcccttgcagggtgtgcatgctcatgagcccgcctgagcccccatggaacccctcactgccctctcacagcgcatctagatgcagcatcctctgcccacttgttttggtctacctcttacaatgggactttccagagacggctctcacagagagggctgcctgggaactcggaaccacaaatgggcaaactcccaagctggttggattatggggttgaccctggccgattcaccacgaggaacgggtccttcgtcctgcccaaccttccacaggtacatacccattgatcagggacaggacattggggaccgccggtcagaaaagctctgtggcacatgaccatggggccatggc

SEQ ID NO: 530235 - DNA, 188 bp, Homo sapiens
tttccgggggccgggggccccccgggccaaaaggggggcccccaggggggtgtttttttccctttccccgggggggggggggggggccccctggccctttttttgggggggcccccccccccctggggccccccgtgggggggggggccccctttttcccccgggggttttttccccccgttttccca

SEQ ID NO: 530236 - DNA, 181 bp, Homo sapiens
gcaccctgcgcaggccgtaagatgtcggcctccacgctcatgcgcagagcctgttccgtctcaacacttgtgttcggaagtcatctgcagccagacggagcgttgtcagatctgcgaggacaatcctggacgttctcaagttgtggcaccagagaatcttgtcccgcaggtcctgagatgg

SEQ ID NO: 530237 - DNA, 466 bp, Homo sapiens
ggtcactctagaggactccccaagtgtatgacactgatgaaggaaatagaattacatggtcagtgtacaccactacaaaaattgtgtcattgaggtcgatggtgactctgtaatttgtagttgagtatgtctactgattttcgaagccatatggtgagtcaatgtcattatgaaaaaagtgctacataaaacacttcttaaactttttttgttaaaaactgctccttgtggagcaggactaccccataggcagtgtgccatcacacctggctttacattttcctgtggggtcttactatattgcccaagccggtctcaaactcctgagctcaagtgatcctctgcctcagcctccagagtatctgggattacatatgtcggctaccgtgtctggccgttcacatctttggccactatttgcttgtgaaaaggtataatgaggtggtacttatcatttttactgtgt

SEQ ID NO: 530238 - DNA, 353 bp, Homo sapiens
gggtggttagcgtccagctcagggagaagggggatagtgcccacccccactggtccctctcccggaggcccttggagagggccaggtccaaaaattttcttatggagctctcccacatcctcttccccaaattcgtttgcttctctcaacaacctcgtgtgcgttttccatttctatatgataccctctctatagcgctatatctctggaaatactttcccagcccggtttgtgtccaccccatcccctcttgtttttgaggaccattctccccccccaagttccaccttttatgtttagactccctccctggtctcttaatgcctttgcctggataaagagttggactctca

SEQ ID NO: 530239 - DNA, 1112 bp, Homo sapiens
tcatgtagcatgcctcactctctaggaatatgagtttctcggtcacactcgtcatatcctccctgagtatgcctagaagtgacatgatactatcgcagggcagttatgaccctgagtcgcagaagcctcccatagccaatccctcttagccgatatagctggctattgactgactagtctctggcgcagactggcagagctgtgaggtgggctctagaaccgtacctgagtcgtgcaattctccaatggcgcactatggtgctgagagctacctcacatggatgcataaaggctagcatcgcaagtgacgtagagaagcgtaagtgcgtaaccagagcaagtaaataagtgacgtagcaagagcacagtgaagtttccgaatgagggacgtagtgtgggagtcaaggagagaagcgaacgcgcagagagcataaattattcagcatcatcggcctgagtatgaagttaagccaaagtcaatcaacgagaccgtattttaggcatgttgccccactgcggggatgcctcgcggaccgtgtatgtactccccatcttatgaataagtatcctgacttcttaggcttttaccacatcttgaggagaaagcttggtgagcttatgggagtgaagagctatggaaggtagataaaaacctagtacggactgatatagtaaggtctcccgtagaaagtgttcttatgttattcacttttcggggtccctcctgaagtcaaccggactgagtatcttgtgtagggatgggcaagtttagttcccacttgtgtcctgattggccggagggttgcaactcgtcgacaggtctggatcgaagagccttctgttaccaggttctaagggcaaatgggttggttcccccaggtcaagggaagtttgtccatggcacaccgctaaggtccgaagtgtgcgtgataccatgtgtggcgcgaaattttcaggcgcgtgccccttgttgggtgtcaccacacttgagagaaacggtcggccacaagtgcagggtagggcacagagtaactgcgcacaaaggggtgaaaacactcccgcagaaacccgtagagatacaccgaggagattcagagcgactcagggcatcc

SEQ ID NO: 530240 - DNA, 120 bp, Homo sapiens
tcccaagcatgaggaaatgtgtgtaccagatcgatcctggatcactcatcactcattccttcactcatccagccaactaaaaacatatactgaccatgtactacgttgcagctccaattt

SEQ ID NO: 530241 - DNA, 510 bp, Homo sapiens
  misc_feature (9)..(9): n is a, c, g, or t
  misc_feature (27)..(27): n is a, c, g, or t
  misc_feature (30)..(30): n is a, c, g, or t
  misc_feature (34)..(35): n is a, c, g, or t
  misc_feature (63)..(63): n is a, c, g, or t
  misc_feature (67)..(67): n is a, c, g, or t
  misc_feature (89)..(89): n is a, c, g, or t
  misc_feature (94)..(94): n is a, c, g, or t
  misc_feature (107)..(107): n is a, c, g, or t
  misc_feature (113)..(113): n is a, c, g, or t
  misc_feature (122)..(122): n is a, c, g, or t
  misc_feature (128)..(128): n is a, c, g, or t
  misc_feature (135)..(135): n is a, c, g, or t
  misc_feature (143)..(143): n is a, c, g, or t
  misc_feature (149)..(150): n is a, c, g, or t
  misc_feature (168)..(168): n is a, c, g, or t
  misc_feature (172)..(172): n is a, c, g, or t
  misc_feature (183)..(184): n is a, c, g, or t
  misc_feature (196)..(196): n is a, c, g, or t
  misc_feature (199)..(199): n is a, c, g, or t
  misc_feature (201)..(202): n is a, c, g, or t
  misc_feature (208)..(208): n is a, c, g, or t
  misc_feature (210)..(210): n is a, c, g, or t
  misc_feature (212)..(212): n is a, c, g, or t
  misc_feature (214)..(214): n is a, c, g, or t
  misc_feature (222)..(222): n is a, c, g, or t
  misc_feature (226)..(226): n is a, c, g, or t
  misc_feature (228)..(228): n is a, c, g, or t
  misc_feature (244)..(244): n is a, c, g, or t
  misc_feature (249)..(249): n is a, c, g, or t
  misc_feature (251)..(251): n is a, c, g, or t
  misc_feature (259)..(259): n is a, c, g, or t
  misc_feature (261)..(261): n is a, c, g, or t
  misc_feature (272)..(272): n is a, c, g, or t
  misc_feature (296)..(296): n is a, c, g, or t
  misc_feature (308)..(308): n is a, c, g, or t
  misc_feature (315)..(315): n is a, c, g, or t
  misc_feature (320)..(320): n is a, c, g, or t
  misc_feature (327)..(327): n is a, c, g, or t
  misc_feature (332)..(333): n is a, c, g, or t
  misc_feature (338)..(338): n is a, c, g, or t
  misc_feature (342)..(342): n is a, c, g, or t
  misc_feature (346)..(346): n is a, c, g, or t
  misc_feature (361)..(361): n is a, c, g, or t
  misc_feature (363)..(363): n is a, c, g, or t
  misc_feature (375)..(375): n is a, c, g, or t
  misc_feature (385)..(385): n is a, c, g, or t
  misc_feature (408)..(408): n is a, c, g, or t
  misc_feature (420)..(420): n is a, c, g, or t
  misc_feature (427)..(427): n is a, c, g, or t
  misc_feature (431)..(431): n is a, c, g, or t
  misc_feature (433)..(433): n is a, c, g, or t
  misc_feature (444)..(444): n is a, c, g, or t
  misc_feature (446)..(446): n is a, c, g, or t
  misc_feature (450)..(450): n is a, c, g, or t
  misc_feature (507)..(507): n is a, c, g, or t
taaggttcncaggtctttttttccccnttnaaannccaggaattgacttatttaattaacccnccanccccccaaagcaaaaatttganaaaanaaatttattttcnggttcnttttttccntggggnagttagnggttgccnccccgnncccgggaagttgaaaaanaaanggggaaacccnncccccccccccnggnannaaaaanangncngggggggnaacncnggtcagcctgggaacnggggncncagtggananaagggggggcngtccccccccccccccccattatnccaacaggggcncagaaanaatcnggggccnttccnnaaagngaancccnagcgcgccttgaagncncaaagggggggngggaagaaanccccccccccaatcccccccaanaaacccgtttcnggctttncaancngtaaaaaaaanancaancccccgggccctttccccccccccccccgagggtcccccccccccttcccccccganccc

SEQ ID NO: 530242 - DNA, 117 bp, Homo sapiens
gtaaattggaaaaatagtaagtcaatatttaatactattggtaaactcaaggggactgtggtggccaggtgcaggggctcacacctctaaccccagcacttagggaggttgaagcag

SEQ ID NO: 530243 - DNA, 359 bp, Homo sapiens
atctacactgcccagtccaggcactaacctctttttgattggtttctattagtaacccctgagccaggctccctgtctcttactttatgtctcacatcattgcccacatgggctcatttacgttgcacatctgacagttttactcccagcaattaaaatactgcagtatcttgaaatcatatgcttctatcataaagttcaactacatcagcatggcaaaaacattccttctttgaacccggactcaacctgcagctcctgccatttcccactacgcactttctacataatgtcacactgaattttattctcccactacacctgttatcttgtgccatgagccactgctgacgtggatc

SEQ ID NO: 530244 - DNA, 95 bp, Homo sapiens
cattggggttttccccccccccttcccccccttttccctttttatatcccctttttaaatgggtttttttttttccaataaaactttggggccca

SEQ ID NO: 530245 - DNA, 80 bp, Homo sapiens
gcggccgcctactactactactactgctcgaattcaagcttctaacgatgtacggggacatggcgaaaccctgtctctac

SEQ ID NO: 530246 - DNA, 168 bp, Homo sapiens
gttcaccgctcttcttctctcatcctttattcagagtccatctcgccttccccatgggtggggcacctgtgtgtggttgtgtgcacatatcattttaaatcttttaagccagaaagtccttacctccgtgtaacacatcaataaagtcaaatcattgtgagccctttc

SEQ ID NO: 530247 - DNA, 759 bp, Homo sapiens
gaaggctggagcagggacgccgtcgctccgtgcgcctgctcccctcgggtccccgttgcgagcccacgcctggccccggtgcccgccctgcgagccctgccacgtggacacagtgataatggcccagcgcacaggcccccacgtggacagcatggaccgcggcacgctccctctggctgttgccctgcttgctggccatgctgcagcctcatgccccacaagtcttgcagaaacagtccattgtgaccttcagcctgtgggccccgagaggggctgaggtgacatataccacttagccaggtctcgaagggctgcgtggctcagggcccccaattgccatccgttgaagtccatgtccgtctttcctggatgttcccaactgggccccgtcacgagcctggaagcctgactctccaggcatccagtgcaaacttggcaccttgggccccgagaggtgcttctggtcctcagtgtaaacggcagtgtcttcctgcattctccaaggccctgggaactcccattgcactttgggcctacaaattcccagcctggtcaccttccaagtagcccccgggggctcaagcaccaccagagctgccatcctctcccaagacccaagatccttgagttgggcagctgaagaaggggccaatcagcctctggtgttgagctgatttgcccccaatagcaatctccgtccgatgtgggcataggcgcagggggtcactgtcgttctggctttcttggaaaccagccagg

SEQ ID NO: 530248 - DNA, 922 bp, Homo sapiens
gcggtggttactttctgcgagttgtgttgtgactcgcgtgatcagggaaccatgtcttcactggaaatgctgaacatattgggcaccctgctcccatgttcacacagccagcagctgtccatgcctaggatggtcatctttacatgatatcatgctgtactgatccacgaaggatagatatgtagtgttcttctattaacctctatgatttgcacctttgtgttgcccaccgaatatcatggcttgtcagtgataggtgcctgaacgaagatttaagaaagtcaattgactccaagtgatggatgcttctgtgaatactcacttctgtcatctagccatggcgtcaatacagctaagaagacaaggaggactgcgacccatgaacattcctttggtatcacgacccgaagctgcactctattgcatcaggattatggggtcttaagaggtctgagtgaaggcagtctcgttcaggggcctttgtatcattgatgataagggtattcttcgaggagatcactgtaaatgacctccctgtttgcgcgtctgttggatgagactttgagactagttcagtgcctaccagttcaatttgacaatcatgggtggaatgtgtgcccagtctggctggaaaacctggcatgtctataccatcaagtcctgatgtccaaaagagctaagagtatttctccagtgcagaagtgtagcgctgggctgtggtaagtggcaggctgcggagggcagcatgagaatcaaaatcttttctagtatcacagtgaccctgaattaggcatgagactccagattcagcctcaattggggtgtcttacaggggcatgcttttcctacaggtggtgttcaaaccaggctttcttccttgggaaagaatggcctgatttggcgtagtggccagcgaaatggt

SEQ ID NO: 530249 - DNA, 110 bp, Homo sapiens
tcccatggtcttgtctagtggggcagcgctggcggctggtgtagtgtaggtgctggcggtggtgcgtgtccagtggtctgccggcagattcggtcagtgatggtgccagc

SEQ ID NO: 530250 - DNA, 195 bp, Homo sapiens
gtaccctggctgttgagcaacagccagcagcacagcactggtgtgactattcattcacagaaatttatcctgcaagggcagtaagttgagagcagtaccctgcaggagaaagcataatcaaacaaaaaccctggaaatttagcacagctttacgtggctatgaggcacaggaatatgacattcccattaaatctc

SEQ ID NO: 530251 - DNA, 104 bp, Homo sapiens
gggtccatcttttcaacaacttggcatgcaaggcgtttcgtgttcttcgtttcagggcactctcacatcgcactgccggccagccaagctggcacggccgtcgt

SEQ ID NO: 530252 - DNA, 140 bp, Homo sapiens
gcaggtcctcccctctcttgtcagatgcccgagggaggggaagcttctgtctccagctttccgagtaaccagtgacacggctcggccaagcaggacaagttctttataacaggaacacacacatttacaactctcccccc

SEQ ID NO: 530253 - DNA, 302 bp, Homo sapiens
gaaaatgtcgcgtggtcagcatcgtggttaatgctgcgggcagtgcatccacatccaggctttactgtggcccgagtcatcagtgctttggaggtggtcgcctcattcgcgttatagccagacattggttctctaaggtcagagtccggcgcatgttcttgcattggcctcgtacccagtgatgctgtcgggcatcatcagcaaagggttctcgcattcagcatagtgtgcattagggcagcagatcattggggtggcagcatcgtggctcgtgagctctggttctcaggcatctccctctt

SEQ ID NO: 530254 - DNA, 363 bp, Homo sapiens
  misc_feature (77)..(77): n is a, c, g, or t
aggatcagtcttaaggacagtcgatttttacgttacttgcacacagctgtaatagtgagtggaacatgctggtgtanggaggaaacacacacaatgacacatctataaggcatggcgccaaatgcttctcttcagatttcatgggctatgacattggtaagttcccaaaaacattttctcttcaggcatcttttagcctatactataagcagcatttaaaagggactgaaaatatgggcagggcaaaatgatcaggccatttgaaagaggtcccaaatggtactttttatattcatttgactaatgttaccacatctggtaaaaattatttctacattaaattctttttgaaatcactcctgt

SEQ ID NO: 530255 - DNA, 104 bp, Homo sapiens
ccttccccaaaattaaaaaaaaaggaaataaaagatttctgtctatgtaaagttcccaaaatttgttttaaattaataaaactatctttgtgttcttttctgca

SEQ ID NO: 530256 - DNA, 117 bp, Homo sapiens
aaacctgaataacgcctgctgtggagtaacctaaacttgtataggcaacatagtgttaagatagctgggtggcaataaacttggaataagcgttatcactgatgtgtctatgggttc

SEQ ID NO: 530257 - DNA, 160 bp, Homo sapiens
tgaggcgatctagaggatcccgccagctctcagacccttccagcacaagccaggtaccttgtttgaaaaccagcccctcaccagagcgatcgctattgctgaaatacgcgcgcacgcccacgctggatcctgacacgatgcacgcgcgtaagggccagca

SEQ ID NO: 530258 - DNA, 1556 bp, Homo sapiens
gacctcatcatttgcgccggctgagataatgggggggatcatatcgatgaagatggtgcaagctaaatacgatggactgagagcaaacaaagcgggggcgttctgttttagtggccgtttgtaaaatagggcgacccccgccgggagaacgtagttcttagaaggataaaacaataggagatcgttttgggataattttcccccttgcgcgaagactaagttttggggcggctttattcaaaaggagaatcattcaccaatagacgatgagagataatttgtgaaagtgggtgaagattctctatttctatctgctctccgctcttgttcgttctcactttaccatctgccgccttttgtttgtgctcatgatgacaatacctcctccaaggagagtgttgtttgctccccactaggatagtttgcccccctcgaagagatatggtggaagttgggctggttgccccctcgttgttgctttgggtggccctgtgcgttgtcttgttgtagagcgtgggtttgcccccgcccggtgtgcccccccctctcgcctttgggggccccccgtcgtcgcgtcacgggcccactttgtggtgcaactgaagaccaccctcgtggcgccgccttcttgttgggttgtttggccacaagccggtggtgggcctctattaaagggggcccgaaagaccgccccaccggagtaggcccccaataggagcgcccccttggaatcgtcgttgcggctgtttgtgtctcgcgtcgccgccttcgtggaagtgtgtcctctggtgtgttctcttgttcgcgccacgggtttggccgcccacccaggtaggccttcttgtgcgactctccgtggtctgtcgtagagtctcagatgtcggtaatggtctctgttgtggcgccgtgtgttatcaccccgtgtggtaccacatatctctcgcgtcctcagagaggcgcccccctttgtgcgcttggccccaccctcgcacacaggtggacacggtatattccccgcccccccctggacacactctcacctgagtctcacccagagtcccgctgtcccgttgtgagagttttaatagggaccacgcgcacctgtactccccccgtgaactctgtggtaatgtttctgctctgtctggtgttctcgctgtgtgtgtgtgagtgtgtgtgtggtctgtgctgtggcgccagtctgtgagagacatggtaaagacgtcctcccggagacgccagagacacccttggtcttgtgtctggttctcatgagcgctataatctctcccagccacatctcagaacaccaggggcgcctggccacacaggagattaggtgcctccacaataattttagattgatatccatgatggaataaataaattgcgtgaaccattggttgagtgcttactcaccatggaccagttcattcatttccaccataatttaactccatgggcccagtggagctattaggccttctgggccaaatcccagctccctgcttgtttttatccaaaaccattttattggaaaaaagaaaataagaaaa

SEQ ID NO: 530259 - DNA, 387 bp, Homo sapiens
  misc_feature (123)..(123): n is a, c, g, or t
  misc_feature (155)..(155): n is a, c, g, or t
  misc_feature (272)..(272): n is a, c, g, or t
tgtgtgattaagactagtgactttgttggtgactttgtctgggactggtggggggagggggggtaatcaatagaaatagaagaataaaataaaatccctccctagtgcattaatctgagtganagagaatagtataaagaataagatagtaagtnattcgtgtgtaggtgggcttaagtactatggagaaaaatgaagcagaaagatgataagaagtttgtgtgtcagagggtggtggcattttaactacagtgtgcaggcagcactcactnagagggtgggcgtggtaaaagatttgataggagcgagagaaccgaccatgcaggtatcctggagggcattccaggcccagtgcagaggcctgaaggcaggagaatgttggcaagc

SEQ ID NO: 530260 - DNA, 192 bp, Homo sapiens
gttcgtgatatgagacagacgttgcggtgggtgtcatcaagcagtaggcaagaggctgctggagctggcaaggtcaccagtctgcccgaaagctctgaaggctaatgaatattatccctaatcctgccacccactcttatcagtggtggagacggtctcagactgtttgtttcattgccatttagtttgtgt

SEQ ID NO: 530261 - DNA, 1416 bp, Homo sapiens
  misc_feature (199)..(199): n is a, c, g, or t
  misc_feature (254)..(254): n is a, c, g, or t
tcttcttgcagctgttgagcgcacctagccagctggtcatgccccacaggcctgctctccgtcaccctgctctacctctccgatcgccagggaccacggactcagctttcgtcctctcgtcctacttgcccttcgcctcctaggttcgcctggctgtctctgatcgtacgaattgtatggacgtgttcctgccatttgnaggcatcgacgaacatgccacagttggcccacgttgagcgagtgtagcaatgggntgctggtgatgtacgtgtatggtgttgctggtgctgatgatgctcgcgccgcggcccattgtgccagaccaagacggagtcgaagagcaaacatgtgatgtcgtgcgtgcggtgattggagctgatgcttaaatcctctttcagatcatcatctctcactgcatagctccgatgacatcccattgagagagagccaagaggttgcaccacaaggcggcaatgtgcaaccagagaacatagatagacaagctggcacaaggagaaacacccagagacccccccatccatggacattagcatatgaagaccgagacaccccgaggcacacgggggagaacaaaaccccacacacataagagaccgaggagcgcgaacgcctggcttaggcatatagacgagttataagcacagagaaaagaccccatataacttaagcccagtggagggtggcaacccccaatgtggccaaaaaagagtcacactaacaaatagaaaagacgccagagacaccaagagctttaggtaacttacccctttggaacacgcggggaaccatcacacagggaaatgtccagacaaatagcgaagacacaggaggcacaaccatttggcccgattaggagcaagagctcctacacgaaaagaactctcctcaatttggagtggagacccccaaaggaggacaccattgagagaaacggcaaccattagacaaggaggagaacaccaccagggagagcagaaggaaatttggcccaactcacgggtgaacctttgatgtggagagccacaacgcaattgggagcatagcgaggatgacactgcagcgaaagtagggggtattcccacccacacctagtacatcggtaatagatcgacctaaagcacaacaccagtgaggaagtggcacccaagtatgtatatgtccgaccacaatgagaaatctcaccacgaggaggagagatatccataatgcggttaactcggatgacgatgaccccagacacgtatagatcatatcgggtattagtggtcgataatcgacagcagcaaaaatcagcgccatttacgacctctaaggaagttacactgagtgagcagagaaactttaggtattcgaaacagagatataacacgaggattaaaaaaaaacaccattatg

SEQ ID NO: 530262 - DNA, 338 bp, Homo sapiens
tgcgggtttgtgcaggatggagagtatagtggatggcgagtttgtgattgtatgctgattatgacggaactgggattatataccgtcactagtgctaagaccgtaagacctcaatagtaaaatcaacaagattgctcgccagagcactacgagcgacagataaacaattcagaggacctggcggtgcttcactatccctctagagtagcctgtcctgcatactcgataaaccccgtatcaccgctcaccacctctggctcatgccttatatcccgccatcttcacgcaaatcccgatgaagcgctaccaagctacgcgccagtacccacgctccagac

SEQ ID NO: 530263 - DNA, 699 bp, Homo sapiens
gctctttccttgcctaagcgcagtccatggctcgtggtcccaagaagtcatctgaagcggtgtggcagctccaaagtcattggatgctggataaattgaccggtgtgttgtgctcctcgttccatccatccggtccccacaaggttgacgagagtgtctccccctcatcattgtcctgacgtgaacggacttaacgtatgccctgacaggaagatgaagtacaccgaagattggcatgcagcggttcattagaatcgatggcaatggtccgaactgatatagcctaccctgctggattcatggatgtcatcagcattgacaagacgggagagaatttccgtctgatctatgaagaccgaagggtcgcgtttgctgtacatcgtattgacacctgaaggaggcccaaggtacaagttgtgacaaagtgagaaagatctttgtgggcgcaaaaggaatccctcatctggtgactcgatgattgcccggaccagtccgctaccccgatcccctcatcaacgtgaatgataccattcgagattgatttagagactgggaagattactgatttcatcaagttcgacactgggtaaccatgtgtatggtgactggaggtgctgacctaggcaagaattgggtgtgatcaccaacagagagaggcaccctggaatctttggaccgtggttcccgtgacagattgca

SEQ ID NO: 530264 - DNA, 164 bp, Homo sapiens
ttctcgctgatagtcattgttgccgtgcactaccctttgccatcgggtttgatcaccagacaggtcgcactcgatacgtccagcacgcgctctgcggatatgaccagatcagcaggctgtccagaatggccacgggacgctgatgcccatcagcaacagaccga

SEQ ID NO: 530265 - DNA, 879 bp, Homo sapiens
  misc_feature (35)..(35): n is a, c, g, or t
  misc_feature (110)..(110): n is a, c, g, or t
  misc_feature (172)..(172): n is a, c, g, or t
  misc_feature (240)..(240): n is a, c, g, or t
  misc_feature (258)..(258): n is a, c, g, or t
  misc_feature (261)..(261): n is a, c, g, or t
  misc_feature (270)..(270): n is a, c, g, or t
  misc_feature (273)..(273): n is a, c, g, or t
  misc_feature (290)..(290): n is a, c, g, or t
  misc_feature (297)..(297): n is a, c, g, or t
  misc_feature (317)..(318): n is a, c, g, or t
  misc_feature (344)..(344): n is a, c, g, or t
  misc_feature (349)..(349): n is a, c, g, or t
  misc_feature (421)..(421): n is a, c, g, or t
  misc_feature (423)..(423): n is a, c, g, or t
  misc_feature (482)..(482): n is a, c, g, or t
  misc_feature (492)..(492): n is a, c, g, or t
  misc_feature (505)..(506): n is a, c, g, or t
  misc_feature (514)..(514): n is a, c, g, or t
  misc_feature (525)..(525): n is a, c, g, or t
  misc_feature (542)..(542): n is a, c, g, or t
  misc_feature (877)..(877): n is a, c, g, or t
tttgtatggaaaatgatacggcaaataaattaganctatgttaaagcgaaggttagctaaatattgaaacttaaggatataatgggtaacgataaatagatttcacagtnttttttaatagagtatcttttaaacacaactttgctagaaactggtccaaagatcgacagcncgtgggaatgcttaacaggggtggtgattagggacacgttttttgggtgttgctttgatgatgttgtncagacggagaatgagctntgntggtttagntgnacttagaagaacctgtngctttanttgaaaactttctgttatanncaggatagccatattttcaatggtgngttcnctcatatccaatccagcagtggtattgcctttactgtgagcagccctgagctgtgccaccaggaaagataangnaatagaatgaattgttagctatgatggttggtaatattcttagtgtctttagcataagngtccattggnagaggttgtttgnntggtgttntattgggaagntgtgtgattagcatganctatcaacatcttagaatagcttcctccataaactgttctagagtcctttacagtttgcgcaagaacacaaagagcatcatgcaatgatctttctgcttcatctaaaatttgttgagtggcaccacgcaaaacaatggtacaagcctcaccaagggcaaccccagaaaagtgaatgagtttgtcttctccaatcatgacttcctcgataagtttgcaacttccaagcttcaccagttctgggtgatcaaaggtagaggcaatttcaccacctgtgacaagagctaggcgttccacacctgcaaaatctgcatgctcaatagccatgacaccagcngc

SEQ ID NO: 530266 - DNA, 161 bp, Homo sapiens
cactcgatgaggatcccggtggttggtgttaactacttttgacgttgggtgactgacggaatacgtgtacggagtatgggggtaattatggtgggccatatactagtatccttaatcatttgaatgcccaactacaatactacagtatggcccaccataat

SEQ ID NO: 530267 - DNA, 1036 bp, Homo sapiens
gccgaaaggcacgaaggccaagggaccggaaggtggctccggccccagctgtcgtgaagacagcaggaggctaagaaagtggtgaatcccctgtgtgagcacaggcctcagaatttcggcattggacaggacatccagcccaaaagagacctcaaccgagttttgtgcagatagtggagccgcgctatagtctggtttgcatgcggcacgagacgccatcctgctatagagcggctgaagagtgcctcctgcgattacacagttctacccacggccctgagagtcgcggaaccagtactccagctgcttacagctgggccacaagatacagaaccagagacaacaagcaagagacgaagcagagacatgtgggccgacggcgagaacgacaggctgctggccaaagagggacagtcgccacacacacgagacccacctgtgccttcgaagcacggagttagcaccgtcacgcacctatggatggagacacaagcacagctcacgctgtgtggtgattgcacaacgacgtggatcccaatcgacgctggttgtctatctatggcctgccctgtgtccgtaaacatgggaggtccctttacatgcataatccaaggggacaaggcaagactgggagacgtctagtccacagagacagaacttgcaaccactggtcgcctactcacacaggtgaaactcgcgcagaacaaaggcagcatagggtcaagacagggtgggacagctcacacaaggaaccaaagaacaacagcaccgattaacgatgacaatccgacggtccacggagagagacaaacagagctagaatcctagagacatgttggaccgcgatggcgaagcgtcgaaacaggcacaggctaacgaaccatggcaataacgcggggttacatgtacaatgtgacgtttactgacgataacaatactagaaataatacacaattatccttcaagacaagagagagacagcgcgggaaccatggaagatgtgggaacaaagggtagcaaaggacgagaaaaaaga

SEQ ID NO: 530268 - DNA, 169 bp, Homo sapiens
gcaccaaggacagaaaggagaagaaggaaggagcggaagaggcagaaaacggaagagacgccccagccaacgggaaagcagagaaagaggaaaacggggagcaggaggcagacaacgagggagacgaagaagaggaagaaggaggggaggaagaggaggaggaagaaga

SEQ ID NO: 530269 - DNA, 341 bp, Homo sapiens
  misc_feature (130)..(130): n is a, c, g, or t
  misc_feature (179)..(179): n is a, c, g, or t
  misc_feature (242)..(242): n is a, c, g, or t
cgcagatgaaataaggtgaaaaccatgagctaggctaggtaagaggcaatggtaacctgagttggagtggtaacagaggataagaagtctaagaatgcagcccttgggccaatgcactgtgtgctcacancgctgtaataacatgggctctgggatggctaaatgcaggagtgatcacnctgaatgccagtgagttttgagaccatgctggtgtcaacattatgtgagacctgtctccacanaaaaattaaaatatatcatgccatgcatgtgtgacacacactctgtatgtcccatgctatcttgtggggctcagtgtgggatggatccccttgagccca

SEQ ID NO: 530270 - DNA, 976 bp, Homo sapiens
  misc_feature (258)..(259): n is a, c, g, or t
  misc_feature (282)..(282): n is a, c, g, or t
  misc_feature (299)..(299): n is a, c, g, or t
  misc_feature (307)..(307): n is a, c, g, or t
  misc_feature (318)..(318): n is a, c, g, or t
gtggatccctcttgtgtgtagtccatgctattaaaagtgtgtcccacagaccaagagcctcaacatttcctacaagccttattagaaatgcagaatctgaagccccactctggacccaggacatttgatgagatccaaaggagtgtatgcacatgaaagtttgagaagcatcatcatagagaagtaaacatcacacccaacttccttatctttccagtggctaaaccacttaacctctctgggtgttacctgctcatnngtttaaaaaaaaaaaaaaaagtntcaccggctttcatgcngaggacangttcagatgtncaagcctataatatttaggcagttcctcaaatttatgaaaagtgttctcagaatggggagacagtcaaagggtacaaagcctcagttaggaggaataagtggtgatttttttttaaaggatcacttggcacagcatgctaaatatagggaataattggaatggtatatttccaatattggcgtaagcgagtaaattttctaagggtctctcattacaaaagtttaaaaatttggagaatcatagtgttacattacgggtaactcattccacctgtatattcaaaaattcataaaaccgctatggtaccctataaaaatatacaataattcgccacatactataatcaacacataacaaaacacaaacattactctctcccccaaaaaaacatctcagccggggaacagcatgtactctttccactctgaaagacaactgctggcgggaacgagctccactggagatgcgggcagggaggctggcgctcgagccagcccctgcgtcacgcagcgagggggagaacagcatcggtacactcctcttacattcccctctcactgatctggccctttcttccccaggctcctttcccatcggcttccccaaccctactccttcaacagctcctgctatgccctgacttccttaccggcccgc

SEQ ID NO: 530271 - DNA, 271 bp, Homo sapiens
  misc_feature (18)..(18): n is a, c, g, or t
tgtacaggaatggaatgnaatgcagtagaatgaacacgagtggaatggaatgctatggaatgaaacggaatggaatggaatggaatgcaatggaatcaatccgactagactggaatggaatggaatgcaatggaatggaatgaaatggagtcaaaccgactagaatggaatggaatggatggaatggaatggaatggagtggaatggactggaacgaaatggaatagaatggaatggaatgcaatggaatggattgaacagcggaccctaa

SEQ ID NO: 530272 - DNA, 80 bp, Homo sapiens
  misc_feature (69)..(69): n is a, c, g, or t
cctgtcattgcccttcctacttcatgcccttctggctcaaatgtcacctctagcctgttgtcacctctncaccatgaact

SEQ ID NO: 530273 - DNA, 112 bp, Homo sapiens
  misc_feature (89)..(89): n is a, c, g, or t
tggactcgattctgcatgagggaacagcattatcttgccagttctgcgtgttggaggtgacgacttctccacttcctgctctgggtctntgcgccccatctcctgggcctct

SEQ ID NO: 530274 - DNA, 145 bp, Homo sapiens
gtttggggtgggaggtgtcaggcaggatagtatatggtgggcctgacgctaccaccattcttctctgtccccctcccacaagctgggcctactatccagcccaaggggtgcagcagtttcccactggcgtggcccccggcccagt

SEQ ID NO: 530275 - DNA, 514 bp, Homo sapiens
tctagaggatcttctgctgctccctcttcactgccagaagctgctgaacttaacgccaaagtggacactctcacactggcgggggagagtaaatccacaaatttggaaaacaggcaaggagttacataaaagttaaataatatacccagcaaatcttcccagccactccattcctaaggtatcttacccaagaagaaatgaaagcacgtgcccatatgaagacttgcacgtgaatgttcacagcacctctatttgtaaaagccaagaactggaaacaactccatcaatatccatccacaggataaaaacactgtagtaaatccatacaatggaacattactcagcaatgaaaaagaaaaagctatggatatatgtaacaacttgaatgaccctaaaaatcatcatgctgactgaatgaagccagtcaaagaaggggtcctttactgcagtggtccctaaccttcttggcatcagggaccggtttcgtgaaagacaattttcccactgaagaggg

SEQ ID NO: 530276 - DNA, 350 bp, Homo sapiens
ataccccgggggaaggaatgatgacgttataaagctttcataaaaacccaagcggacagggttcagggagctttgggataactgaacacatcgaggttcctggagggtggtgcctgggggagggcttggaagccctgtgcccctcctcccacacctgaattgttttttctttttcccttcatgaaactcttccctgctccccgtataaacctccatagtcattataaaaatttatgataatttttacatgtctccccgctcctaagtaccttccacagtgtctagcatgtcatagggagtgattggtaaatagctgatagaaagcccccattaaactatcagccttgtaa

SEQ ID NO: 530277 - DNA, 1260 bp, Homo sapiens
  misc_feature (293)..(293): n is a, c, g, or t
  misc_feature (383)..(383): n is a, c, g, or t
caaggaggttactttgcctatcatgcaacaagcttattatgcacgcgtttcatggataaccgctctcataatcatgttcacacttatcatagcatatactagctccctgtcaatgcgccatttcaccttgagagcacctttcgaccagatgacaatacctatacctcaactaccttagatcaactcttcgagcagctgcgtacgaggggaacctaccatagaccagactgtaacatatacttggcacgcggtcgatccgagtgcgcctaagttacccgtacaatacggtcacntccgcctacttcgcacgtgacgggcacttcgcctattgactactcagaccaggatctcgaggtccaagaccaggagtacgcacattcccncttttacctagtccaacatttgagacttccgagaccgagctcgagatttggtgttaaacttggaacagcgcgtacctggatgttaagctagcaactggaggcttgatctggggattgctggcattcttaataacttccttgtggcgaaatgcctccctcctcaactagtgaatccttaacgcccgtcgcaattctcagtgttgccggtgagacagcgcatgggacaagcaccagtggccagcaggtccgcctctgtgactggctatcgcaggacaatgggaatgcttacgcgtgagatccactgtactataggaggcagcgcccaccaagtgtctggataagtacactaacaatttactgatcaccactgatggaaccggtccctctgtgatcttcccaattaggaaggctgaagttccggccgagacaattttgagaggggcttgtgaaaaggacactcctatggtattgtgcgaaagtcttaaccccctgtgtacccagtttctaaggaaaagcgcggaataatcgcaactcttcctgtggcaattccctgggcatggtaccgacctgcaatcctgagggggggggttatgaagctgaacctggggttccaacatttccgtcgtgcgtgtaggacggatattcctgtaggttggggggcatggggccatttaccccctaccggatgttcctttgcggatgtaggggcggcgcgatatagcgggttacctcttggccagggacaacttgtggaaaatattttcccgctcttttaaaagagaagtgtgtctttctcgtacaccacttccaggggaggtcgcgcgctctatgtctaaaagccccttggattaaaggcagaccccccccttcatgataa

SEQ ID NO: 530278 - DNA, 917 bp, Homo sapiens
taatactaactatcgatcaggctggaattgcctactcttcaatcagccacatagccctcgtagtaacagccattctcgatccaaaccccctgaagcttcacccggcgcaggcattctcataatcgcccacggcacttagatcctcattactattcttgactagccaaagtcaaactacgaacgcactcacagtcctggtcataatcctctctcaaggacttcaaactctactcccactaatagctttttagattgacttctagtcaagcctccctaacctcgccttaccccccaatattgaacctactgggagaactctctgtgctagtaaccacgttctcctgatcaaatatcactctcctacttacatggacgtcaacatactagtcacagccctatactccctctacatatttaccacaacacaatggggcgtcacatacaccccaccaaattaacaacataaaaccctcagtttcacacgagaaaaacagcctcatgttcatacacctatcccccattctcctcctagtccctcaaccccgacattcattaccgggtttggctcttaaaaatagagaaccgggaaacccctgaatacaagagcgcagcggggccggccagttctcgcccccgggacacaggggtccgcccgacgcaccttaatcacagggcaagcggacaccagatagcggccactacaaggaaaaaccaccacggacgccacattacccacaatcccaacgggaacaccacgcaccaagacgcaccgcagacggaaaccctacgcctctaagccgaacaccaacgggacaccggccaccggaaaaagcccgcggactagacccccggcatacgaccaccacagacaccccacacaacagccacccagacaaaatacccccacaaagaacaca

SEQ ID NO: 530279 - DNA, 213 bp, Homo sapiens
  misc_feature (50)..(50): n is a, c, g, or t
  misc_feature (77)..(77): n is a, c, g, or t
  misc_feature (83)..(83): n is a, c, g, or t
  misc_feature (209)..(209): n is a, c, g, or t
caggagtcagaggtgatgagccgggcaggtgggtggaaagccggcggcgntcagagaatggatgccaagcgagactnccaatnactcaggacgtcccagtggagtcacagcgtgagcccagcaccgaggttttcagagtcagatgactgcagagaagatgctgatggcactactggccaaaacgggcttcactggagctggggtgtgtncatt

SEQ ID NO: 530280 - DNA, 7118 bp, Homo sapiens
gcggaggcctcctcgctggggaggcagagtcctcgcgtggtctcctgcctcgagcacagcctgtgcccaggggagccgggcttgcagacaacagcagtggtgtccatgggctctggagaccatcagttcaacctcgcagagatcctgtcacagaactacagtgttaggggggagtgcgaggaggcctcgaggtgcccagacaagcccaaggaggagctggagaaggacttcatctcccagagcaacgacatgccctttgatgagctgcttgcgctctatggctacgaggcgtcagaccccatttcagaccgggagagtgagggtggtgacgtggccccgaacctcccagacatgaccctggacaaagaacaaatagcgaaggatttgctttcaggggaagaagaggaagagacgcaatcatctgctgacgacctcaccccgtccgtgacctcccacgaggcctccgacctcttccctaaccggagtggatctcgtttcctggctgatgaagacagagagcctggctcttctgcctcctccgacaccgaggaggactctcttcctgccaacaaatgtaagaaggagatcatggtgggacctcagttccaagctgacctcagcaacctgcacttgaaccggcactgtgagaagatctacgagaacgaagaccagctgctctgggaccccagcgtcctccctgagagggaggtggaggagttcctgtacagggcggtgaagcggcgttggcacgagatggccgggcctcagctcccagagggagaagccgtgaaagacagtgagcaggcgctgtacgagttggtgaaatgcaacttcaatgtggaggaggccctgcgaaggctgcggttcaacgtgaaggtgatccgagatgggctctgtgcttggagtgaagaggagtgcaggaactttgagcacggcttccgtgtgcatggaaagaactttcacctgatccaggccaacaaggtgcgcacacggtcagtgggcgagtgtgtcgagtactactacctgtggaagaagtcggagcgctacgactacttcgcccagcagacgcggctgggccggaggaagtacgtcccgtccggaaccacggacgcagaccaggacctggatggcagcgaccccgatggccccggccgtccgcgcccggagcaagacaccctgactgggatgcgcacagatccactgagcgtggatggcacggccggtggtctcgatgagcccggagtggcctctgatggactcccgtcctcggagccagggccgtgttccttccagcagctggatgagtcccccgctgtacccctgtcccatcggcccccagccctggccgacccagcctcataccagccagctgtcactgctccggagccagacgccagcccaaggctggccgtggacttcgccctgcccaaggagctgcccctcatctccagccatgtggacctcagcggggatccggaggagactgtggccccagcacaggtggctttgtcggtcaccgagtttggactcatcggcattggggacgtgaaccccttcctggccgcccaccccacgtgcccggcccccgggctacactcggagcccctgtcacactgtaacgtgatgacctgctgactcctggccgcgggcggcgtatgcggcccagactggacttagcgctgccgctgggcccgcctctgtcagtcttcctgaccccttccccaccccccgggccttggggtagcacctccttctgcttcagaacacgtcaggactggggtgaggtggctgggccgtgagcccttgcccctgtccacacagaatggacccacggccccacccagcgccgtcagcgcccggcactgccacccgggtccgggccgctgcctgcacgtgggatccgtcgggcagccggggacagaagagaccccgccgttgggacgcagggcagagccggccacctagtcccttccagccagcagaggcgagggaaggcgtcactgccccggcggggagacgggcaggacgccctgccccgcaccagcagcctccgccggggcgccctcagctccctgcttggctctgtctctccacacccggcagggccgcgggctgccccagccctgggggtcgtgggcagctgctactcagtgccaaccccgtggggcacagagccatatacctcgctgtccggcccccaccccagcctcgccttcccaccccatcgtctccacttcaggaaaagccgcactttacacccccacctgcctcttccccctccatccctgctccccgatcctgagcggttggggtggggtccctcagcaaccccaggcgtgggtttgaggagacaggtgatttacatcccctttgctgtcctcccccggtaccaaggcagggagcctccggaggagccggccctgctggccacgcaggggccagactccagcctgtttccccagccctgcaggtcttccttctgtgggaagcttcctagcaagatggcttggagtcctggtccccctcctccctggccctctcgtttgtttctgtttctgtttacacgttggagtggggtcctccgtgggcggcggcgcgccctgccccgggtgtcgtccggcctcttgtgctcgagcccctttccgagttggactcgaccatccctcaccccaccaaggaccacactgtgaagtgataactgccttgaacccccctttgctgttttatttattaaacttgatttgaagcccggggtgccttgtggtggatcgggtgggggctggggcggcaggtgtcctcgtcatctcacttgggggcctgcatgtctcttggagggtccaggataagtcgtgagcaacacgggcgagggggtgcaccgggggcatgacgtggtgggctacgtattgttcacgtcagtaagggaattgtggccacgatgacgggatgtgaggagggcccacgtctgggtagaggtggtcggggcagcctcctagaagtgatatttaagctgaaacatgaaggagaatgggcctcctttgctgaaagtttgccgagaggcctggcaggcgtgacagcagatgcagaggacagaggcctgggtctccaggagaagctgagggcacagagggcagaggttgggcggggtggggacagtaggtcatgaggccaagttttgttcttggtgtggaagccactttaggtctgcattgtttttttgttttgttttgctttttttttttagacagggtctcacactgtcgccaggctggagtgcagtggtgcgatctcggctcactgcaacctccgcctcctgagttcacgcgattctcctgcctcagcctcccgagtagctgggattacaggcgcccgccacctgggattacgggcgcccgccaccatgcccagctactttttatattttttgtagagatggggtttctccttattgcccaggatggtctctatctcttgaccttgtgttctcccgcctcggcctcccaaagtgctgggattacaggcgtgagacatcgcgcccggctgaggtctgcattgttaatagcgccctgcagggacggtgcaggctggttgggttgcatattgtccacatcagtgagggaaatgtgggcatgcatggtgatgggatatggggagggccggcccccagctgggaggtgactgtggcttggcctcagggactattggtgaaggaccaggaccacttgcatgatgggtgtgggagagtcaggggtcttgctggtgagcctgtgccaggagctgtgagaaccagggccagccactgggcaacctgggtgtttggggatgggcgtagaggagttttcattggagcgccgcagcctgctgacgttttcttcagatgtgcaaggtcttctgtcttccagcttgccctgcctccagcaggaaatcttcagtcctctcttggtttttttcctccaactgctttgaagatttttcagtaccactggttttgagcagtctgatgaggatgtgctttggtgtattgaggtgtctgatgagggtgtgctttggtgtattgaggagtctgatgagaatgtgctttggtgtattgaggtgtctgatgaggatgtgctttggtgtattgagtctgatgaggatgtgctttggtgtattgagtctgatgaggatgtgctttggtgtattgaggtgtctgatgagaatgtgctttggtgtattgagtctgatgaggatgtgctttggtgtattgaggtgactgatgagaatgtgctttggtgtattgaggtgtctgatgagggtgtgctttggtgtattgaggtgtctgatgaggatgtgctttggtgtattgaggagtctgatgaggatgtgctttggtgtattgagtccgatgaggatgtgctttggtgtattgaggtgtctgatgagaatgtgctttggtgtattgagtctgatgagaatgtgctttggtgtattgagtctgatgaggatgtgctttggtgtattgaggtgtctgatgagaatgtgctttggtgtattgagtctgatgaggatgtgctttggtgtattgaggagtctgatgaggatgtgctttggtgtattgagtctgatgaggatgtgctttggagtattgaggtgtctgatgagaatgtgctttggtgtattaagtctgatgagaatgtgctttggtgtattgagtctgatgaggatgtgctttggtgtattgaggtgtctgatgagaatgtgctttggtgtattgagtctgatgaggatgtgctttggtgtattgaggagtctgatgaggatgtgctttggtgtattgagtctgatgaggatgtgctttggagtattgaggtgtctgatgagaatgtgctttggtgtattgagtctgatgagaatgtgctttggtgtattgagtctgatgaggatgtgctttggtgtattgaggtgtctgatgagaatgtgctttggtgtattgaggagtctgatgaggatgtgctttggtgtattgatgaggatgtgctttggtgtattgaggtgtctgatgaggatgtgctttggtgtattgagtctgatgagaatgtgctttggtgtattgagtctgatgagaatgtgctttggtgtattgagtctgatgaggatgtgctttggtgtattgaggtgtctgatgagggtgtgctttggtgtattgaggagtctgatgaggatgtgctttggtgtattgagtctgatgaggatgtgctttggtgtattgaggtgtctgatgaggatgtgctttggtgtattgagtctgacgaggatgtgctttggtgtattgagtctgaagaggatgtgctgtggtgtattgaggtgtctgatgaggatgtactttggtgtattgaggtgtctgatgaggatgtgctttggtgtattgaggagtctgatgaggatgtgctttggtgtattgagtctgatgaggatgtgctttggtgtattgaggtgtctgatgagaatgtgctttggtgtattgaggagtctgatgaggatgtgctttggtgtattgaggagtctgatgaggatgtgctttggtgtattgagtctgatgaggatgtgctttggtgtattgaggagtctgatgaggatgtgctttggtgtattgagtctgatgaggatgtgctttggtgtattgaggtgtctgatgagaatgtgctttggtgtattgaggtgtctgatgagggtgtgctttggtgtattgagtctgatgaggatgtgctgtggtgtattgaggtgtctgatgaggatgtgctttagtgtattgatgaggctgtgctttagtgtattgagtctgatgagtatgtgctttggtgtaatgagtctgatgaggatgtgctttggtgtactgaggtgtctgatgaggatgtactttggtgtattgaggtgtctgatgaggatgtgctttggtgtattgaggagtctgatgaggatgtgctttggtgtattgaggagtctgatgaggatgtgctttggtgtattgagtctgatgaggatgtgctttggtgtattgagtctgatgaggatgtgctttggtgtattgatgaggatgtgctttggtgtattgaggtgtctgatgaggatgtgctttggtgtacacgtacagtatgtagcctttgagattggcttctttcatattcactgaaggcttcgccatgtcttttcgtggcttgatggctcatttcttttcagcgctggatgatactccatcctgggcgtgtgctgcagcttgtttatctacgtacctattgaaggacatcttagcttccaagcttcggcagttacgcgtaaagacatcttagcagcttccaagctttggcagttacacataaagacatcttagcagcttccaagcttcagcagttactcataaagctgctgtaaacgcccatgtgcaggtttttgttttgacacaacttttcagcccatttggatgaataaagaaacctgattgccggaccgtgtgatgagaccgtgtttaatgagaagctgccatttcactcccaccagcaatgagtaagcgctcctgaggcccatgtcctccccagtgtttggtggtgtcagtattttgtgtttggccattcgaataggtgtgtagtgggatcttgttttccatagcctttgaagatgtgtacattttcgtacctttctggcgctcttaagttcttcattcagactccgtgttgccaagagggataattttctttgagtctgaagtgccgtatttaatatatattgccttgtagttcctctgcagtgacattctgcctaggcttagctcttacgtggatcaaaaggccctaattcctcctcctcttttgaagtgcatttttacaggatatacggttctaagtggactgtgtttttctctgcgcatgttaaggtggttctattcatgctgttttctactgttctgatgaggaattttctcattctgttttccttactgtgaaatctcttacttctgactatatacatgattttcttttatttttggactttggccgtttgtgatgcacctgggtctagctttctaaactgagctacttcgacctgagggtgggtgcattttaacagattttgaagtcttgactgtt

SEQ ID NO: 530281 - DNA, 312 bp, Homo sapiens
  misc_feature (33)..(33): n is a, c, g, or t
  misc_feature (112)..(112): n is a, c, g, or t
  misc_feature (123)..(123): n is a, c, g, or t
  misc_feature (142)..(142): n is a, c, g, or t
gataacccatttgcccagtgactttttttttantattaataaagtatttgttattgccagatgtggtagctcgcacctgtagtcctagcactttgggaggccaaggtggganaattgcttgancccaggagtttgagtccancctgggcaacaaaattagaccccgtgtctcaaaaaaaaaaaaaaaaaaagccagacatgatggcatgtgtgcctatagcccccgctactcaggaggctgaggtgaaaggattccttgagtccaggagtccaaggttgcagtgagctgtgatcctcccagtgcactccagc

SEQ ID NO: 530282 - DNA, 214 bp, Homo sapiens
agaatgagccggtaccgcgctagcggcattagtgaacgcagtatgtaggagtccaagccaggatcaaacctgagccactacagtgacaccagatccttaactcactgcaccacaagggaactccatgattgttcttaatggcatcttaaatggtgaattctttcaagaagttttgcaatttacttttccagacgttcacttaatgccgctagcg

SEQ ID NO: 530283 - DNA, 367 bp, Homo sapiens
  misc_feature (89)..(89): n is a, c, g, or t
  misc_feature (94)..(94): n is a, c, g, or t
  misc_feature (134)..(134): n is a, c, g, or t
  misc_feature (137)..(137): n is a, c, g, or t
  misc_feature (145)..(145): n is a, c, g, or t
  misc_feature (160)..(160): n is a, c, g, or t
ttctttccttccttccttctttctttctttctcttctttcttttctttctttctttctttcgagatggagtcgctctctcactcaggcnggagngcagtggcgccatctaggctcactgcaacctccacctccnggnttcaagtnattctcctgcctcancctcccgagtagctgggattacaggtgcttgccaccatgcctggctaattttggtatttttttttttagcagagttgggctttcaccctgttggccaggctggtctcaaacccctgacctcaagtgatctgcccgccttggcctccttcattctctgtgaacatgtaactcaggaccccttttccctcttgcggtctgtggccagct

SEQ ID NO: 530284 - DNA, 905 bp, Homo sapiens
  misc_feature (905)..(905): n is a, c, g, or t
ggagaaataggacacactattatgaacttactgtgtgaccttcgaaatcaccagtataccttgcataatatagatcactgtggatcatatggaactgggaaacaagctgcataaaaatacctcggaacacgtacagtgctgtactgacccgtacctaaattcttccaatgagcatgtcattagcatgggagcaagtttcagtacagcagcagattctcatctagtctgtatacagactgatggactttcaatgaaacacaggccaaccagtgccactgccatcctaagaacacgtgacaggtgcacagtttgggtatccaatggagctctaaaaaccatcttcaggatttcttgctaagtccagcatagtggaagatggttactggttacaaataatccagagaccatgaatggttgggctagttaacgagaaccagaaagactttaacaattacatgtgggacagtttgatgcagtagacctgagagaataaggggatatctgtggtagatgctgagaaaaaaaaaaaaaaaaacaaaaactttgtggggggcggggacgaaaagatttaaacaccaatgttgggcggcgagccccaagacgacatggaacccgtggacaaaccgctggtcccaagaggaacctccggggcccaggcaagtgtgcggggtccaccaaaaaaaaaaaacgcgcgcgagacccagtcttcaacccacacccacaaacgggagtaagagggccaaggggctcaacagggggccacggaagcagatataccgcgcgagtggggagaacaagcagcaccacaaaagcagacacaaccaaagcagacagagccgacacaatagagtcaaaacaaagcaagaacaaaagaagacaaaagcaccgacacaagagaagcgagn

SEQ ID NO: 530285 - DNA, 101 bp, Homo sapiens
atgcacgttatgatatagaggaaagcactataccagggatactgagaagaaatccatcataccattacctacatcctgtgaggctgaagacattgaataac

SEQ ID NO: 530286 - DNA, 425 bp, Homo sapiens
tgccctctggatttgtgcactgtcctgtgtgcacagtttgcatgaaaattgcgtagactcagtggtgggaaaattaggtgctgaactgctgattctttgttgaggaggatggtctcaacatcattatggagaggccaggtgtggtggctcatgcctgtaatcccaacactttgggaagctaatgcaggaggatcccttgaggctgggagtttgagaccagcctgggcaacactggagacttcgtctctacaaaaaaaaaaatgtttttaactagccagtcatgttgagcacatactgtgtagtcctagctactcaggagactgaggtgagaggattgcttgagcttaggagttcgaggttgcagttgagctatgatcatgccactacattccagccttggtgacagagtgagatcttgtctctta

SEQ ID NO: 530287 - DNA, 384 bp, Homo sapiens
tgtggcgttctcgaggattccgacggcgggttgtactgctgggattataggcgtgagccacgtgcgcctagccaatttttatttttgagacaggtcttactctgtcagccaggcgggagtgcagtggtaccatttcagctcactgcaactgatagggaaggggaaagggaagtactgggaagggaagagcatgatccctttaaatgatatggaaggagggaagagtgtggtccctggctaggcctctacccccgggcctatgcccatggacctgggtgaggacaggcattttggttttcctgcccaaatgttgcatttcccaagaccacccgggcctgccataccaccatcctgtgcctataaaaaccccgagacgctagcagg

SEQ ID NO: 530288 - DNA, 102 bp, Homo sapiens
  misc_feature (69)..(69): n is a, c, g, or t
cgctgtttagaggatccgttcaggtgtgttgagaatgaggagtggtgtgtgggtgctggagtcccgggncggcaggcgtgcaggaagggccgctacaatttg

SEQ ID NO: 530289 - DNA, 171 bp, Homo sapiens
caggacctgaagcactggggatgattacagttcttcctaaaatatggatggctgctctttttctaaagagtgttaacactacaaactgtaaagtctgcaaaatagttgcattagactgttttggtaaacacatcctgcaacatacagcaccagcacagttgtcccccgtgc

SEQ ID NO: 530290 - DNA, 103 bp, Homo sapiens
tcttctcccctgacatctacttttttagagatagagtttctgtcacaggctggcagtgcagtggttgtgatcatagctcatatgtagcctttgcaactccatg

SEQ ID NO: 530291 - DNA, 327 bp, Homo sapiens
cagccctgatggcaggtcacgaagactccaatggctgcatcaactacgaagcttctgtcaagcaccatcatgtctctctcgaatggagctctcacagaacaagcatagtataggaagactggctggcaacttattataatcacacccatgacaaactctccaggtctgtttaccatcattcaggaccacaaagcaatctggacggctcacgactgagcaactccctgcatttttatacatctacagataatctactgacattgaattcataccacacaaacaaagtgtcttgctgctcacgatgagacgaataaacttattgaccac

SEQ ID NO: 530292 - DNA, 564 bp, Homo sapiens
  misc_feature (90)..(90): n is a, c, g, or t
cattttttatggtgagcatcaaaagccgggaaggttgatgttgaacagcacacttaagcaagttattccatggagctgactctcatcgantatgatatggcgcattatcatccttgtaaggtagcagcggccgcttcctgtttgtctcagagggttctaggccaaggaaaatggaacttaaagcagcagtgtgccacgggatacacagagaatgaagttttccaattcctgcagcacatggccaagaatgtggtgaaagtaaatgaaaagttaactccattcttcgccttcaagaataagaaggcaagcagcaaactcctgaagatgggcatgatccctcagctgaactcaaaagcggtgaaagaccttgcctccccattgatagtaaggtcttaggttgccgtggcccctggggaagtgtgcttccttgtgcccttttttttatgggtttggaactccccatttggcacatagtcctcgggtttatttcatgaaacttcttctcagaccagttttttaaacaaaaattgaggaaaaataaagcgattggtttttcttaaggta

SEQ ID NO: 530293 - DNA, 142 bp, Homo sapiens
aaggcagttaatacatgactcagcagatgctgtagcattcgctgcatgggtaaattgagaatagaaattggcccctaggaaaggcagacacctctatgcgtagcctcacgaaaagtgggaataagccttcggaaaagaaatt

SEQ ID NO: 530294 - DNA, 1586 bp, Homo sapiens
  misc_feature (29)..(29): n is a, c, g, or t
  misc_feature (317)..(318): n is a, c, g, or t
  misc_feature (320)..(320): n is a, c, g, or t
  misc_feature (322)..(322): n is a, c, g, or t
  misc_feature (328)..(331): n is a, c, g, or t
  misc_feature (333)..(334): n is a, c, g, or t
  misc_feature (341)..(341): n is a, c, g, or t
  misc_feature (1151)..(1151): n is a, c, g, or t
  misc_feature (1210)..(1210): n is a, c, g, or t
  misc_feature (1229)..(1229): n is a, c, g, or t
  misc_feature (1353)..(1353): n is a, c, g, or t
  misc_feature (1439)..(1439): n is a, c, g, or t
  misc_feature (1441)..(1441): n is a, c, g, or t
  misc_feature (1448)..(1448): n is a, c, g, or t
  misc_feature (1459)..(1459): n is a, c, g, or t
aatggacacagaaattggcccgtggtatnactgagactgcaatagaaagattttctgacctgtcatcggggaccaccattatgacacacggacactttgctcaagaacccactgattggaccacatcgaataccgagatgtgcgaggtggggcaggtgtgtcaggagacgctgctgctcctagatgtagaactcacatcaaccctggtggggacaaaaggctgcagcactgttggggctcaaaattcccagaagaccaccatccactcagcccctcctggggtgcttgtggcctcctatacccacttctgctcctcnnancngtgcannnntnncagcagnagcagcgttctgctgaactccctccctcctcaagctgcccctgtcccaggagaccggcagtgtcctacctgtgtgcagccccttggaacctgttcaagtggctccccccgaatgacctgccccaggggcgccactcattgttatgatgggtacattcatctctcaggaggtgggctgtccaccaaaatgagcattcagggctgcgtggcccaaccttccagcttcttgttgaaccacaccagacaaatcgggatcttctctgcgcgtgagaagcgtgatgtgcagcctcctgcctctcagcatgagggaggtggggctgagggcctggagtctctcacttggggggtggggctggcactggccccagcgctgtggtggggagtggtttgcccttcctgctaactctattacccccacgattcttcaccgctgctgaccacccacactcaacctccctctgacctcataacctaatggccttggacaccagattctttcccattctgtccatgaatcatcttccccacacacaatcattcatatctactcacctaacagcaacactggggagagcctggagcagccggacttgccctatgggagaggggacgctggaggagtggctgcatgtatctgataatacagaccctgtcctttctcccagtgctgggatttctccatgtgagggggcagcaggacacccagggatctagcgtgggggaggagaggagcctaatgagaaaatgaccatccaaagcctgcccttcattggtctggttcacgtctccaaaccagcttggatggtagcanagacttcagggtgctccagccaaacatatttgggcatcaccatgacctgggaggggaanatgcactgagacgtatgancttccagcctagcagccagggccctagcacaaacaggaggctcgccccatctgagcaactgcaggagaggttagtacagtcatgcattgcttaacgacagggacgtgtcgttagaaatgtgtcnttaggtgattttatgaccataggaacattgtagcgtgcacttacaccaacccagatggtacagcccaatacacacccaggatggangntagagtngactgctcctnggctacaagcctgcagtgcatgttatggtgtgaatactgcaggcaatcttaacaccacggcaagtatttggcatctacacacatctaaacatagaaaaggtacagcataaatacactattgtcatct

SEQ ID NO: 530295 - DNA, 1004 bp, Homo sapiens
  misc_feature (29)..(29): n is a, c, g, or t
  misc_feature (317)..(318): n is a, c, g, or t
  misc_feature (320)..(320): n is a, c, g, or t
  misc_feature (322)..(322): n is a, c, g, or t
  misc_feature (328)..(331): n is a, c, g, or t
  misc_feature (333)..(334): n is a, c, g, or t
  misc_feature (341)..(341): n is a, c, g, or t
aatggacacagaaattggcccgtggtatnactgagactgcaatagaaagattttctgacctgtcatcggggaccaccattatgacacacggacactttgctcaagaacccactgattggaccacatcgaataccgagatgtgcgaggtggggcaggtgtgtcaggagacgctgctgctcctagatgtagaactcacatcaaccctggtggggacaaaaggctgcagcactgttggggctcaaaattcccagaagaccaccatccactcagcccctcctggggtgcttgtggcctcctatacccacttctgctcctcnnancngtgcannnntnncagcagnagcagcgttctgctgaactccctccctcctcaagctgcccctgtcccaggagaccggcagtgtcctacctgtgtgcagccccttggaacctgttcaagtggctccccccgaatgacctgccccaggggcgccactcattgttatgatgggtacattcatctctcaggaggtgggctgtccaccaaaatgagcattcagggctgcgtggcccaaccttccagcttcttgttgaaccacaccagacaaatcgggatcttctctgcgcgtgagaagcgtgatgtgcagcctcctgcctctcagcatgagggaggtggggctgagggcctggagtctctcacttggggggtggggctggcactggccccagcgctgtggtggggagtggtttgcccttcctgctaactctattacccccacgattcttcaccgctgctgaccacccacactcaacctccctctgacctcataacctaatggccttggacaccagattctttcccattctgtccatgaatcatcttccccacacacaatcattcatatctactcacctaacagcaacactggggagagcctggagcagccggacttgccctatgggagaggggacgctggaggagtggctgcatgtatctgataatacagaccctgtcctttctccca

SEQ ID NO: 530296 - DNA, 1286 bp, Homo sapiens
agcggcacagctgatggtctggcagctgtgcacatgctgaggtctggcagctgtgcagcgaggtcggcagctggctgcgctgcttgtgctcttcctgcgagactctgaatcgatggctgaaccactgtgctcagcgtatggcagaccgtcgtgggctctgtgctgctggaaaagctggttgctcaaagagggaagacatgactaaagttggaattcgagaccaggcgaggaggtggatgtgacccccactgttcgacaccatggtgcctgctgggatgtgaccatgctgctggggcaatctacgctttacgtgttatttgaaaaaagccagtacatggcaaatcccatgacaagcgtgacgcaagtcaaaggcaaggatcatcaaaggggagagatgtcatcggcagcatgatctcaagtcccggtgcatacatgtgaacaaaacaagtgccaccattacgagtacttcatcgaagattcgcttcccatgttgtatcgtggggactacttacaagcggttccgatgcaaaacttcaaacgcctgtttgactactttgggataccccaaaaagaagaagtgggatgttgcatgatccaagagagggggcctggatatgaatcatacgagtgaactaacattgaatgttgtccaggtgccatggcctgcattgggatggcaccaatgttggcggaggaccattccaggaaagctggatatacgggaacagacattgtagcgcgcgaggcagctccagtggacggtgtatgtggatactgataacgacgacaaataaccttaaggagcacggttcttatcgaaaagtggtgggtagaggagatgaaagcttgattgaacgtgttgactacgatgtttccacagagccaggatttgatagatgtttccagggtacatgtcccttcgatcaacaagggtggtgtctcacacagtgacacgacctgtcccacgggagaacttctgtgacgaattacccaaccaagattccagacacagacccaacacgccaatgcggggtgacaccggagtaaatgatttggatagagacaaaagacacaaattggtggggccgaaaagaaaaaaagatgaataaaacacaggtgtagccaaaaaaggaggtaaacacaagggagattttagacaccaagtgtgggtggtgtgaaagatgagaccagactattcgtgatgagacagagaagatagatagagtgagagaagaactcaagacatggaagaagatctgtcctaaataacgtatatgcagcaacat

SEQ ID NO: 530297 - DNA, 317 bp, Homo sapiens
ttgttccacttatcgcagtttatgttgacttagagctagttggttacatacatatttgattatccccacgatcattgaaattcatttaaaaatctatcttatatattgacaaattgtagttgtagatacatgtggcaaacaaagtgttgttaggatttttttaatataatgtggaatgattaagttatttaaaatgtatgtcacgtcaaatatgtaactgtcatggtggtgagaacattagaaatgtgatctcttagcagtactgaaatgtacagtactcagttatttttattcagcatgctgcactatgcatttca

SEQ ID NO: 530298 - DNA, 270 bp, Homo sapiens
agagcagagtactagctggtgtataccatgatggagagcaagcaattaagtttaaacagcaagaataaaacctttaaaactatgtagggacaaatttaactctgctgtctttcatagttcccaagattatttctattttgtaaacaagctctatctttgagttttatattgatactcatatgaataatttattgagtgctttctatttaccggacactgtactaggtgtcttctgtacattcccattcaatataccacggtgctataacg

SEQ ID NO: 530299 - DNA, 589 bp, Homo sapiens
tcataggccgtactagggatagagagtggagctcgggctgtcactaggtgacgggaaacccgatgctaaaggactagcaagcggggagggatggtggataccagtgaactcacaggtcgacctctttgccatagcctgggtgggtttcatccatggagcattaaaggatctctggcgctagataccctgggttcccacacaactctggggagagaggaccaagattgaggggatgccaccagcccctctagggcccttagcactggatctctgctggagcctcttcaacgctgcccaggaataacagtgttcccatcttccttctgtctgccttctgccaagtctcctgctgaggcattatccctgcgcaaaaggatggatcaccatttggctcttggtggccttcctaggaaaacctgggttatggattgattccaaggtccttgattccaccttgccattggaaggtgaaaatcaggataagcaaagaaaactctccctggaggaaagaaatcgatcggcgaggaacaattcggggttgttgccgactgcgtgcatgcgaggaggacctcctagaggattcacaagc

SEQ ID NO: 530300 - DNA, 436 bp, Homo sapiens
  misc_feature (10)..(10): n is a, c, g, or t
  misc_feature (12)..(12): n is a, c, g, or t
  misc_feature (21)..(21): n is a, c, g, or t
  misc_feature (419)..(419): n is a, c, g, or t
gcctcgcganangggagaggngacagttggcaaagatctgagagtagcctctaggagctgtgagtgatccttggctgacatccaacaaaaagatggagacctcaggcctacaaccacagggaaatgaattctaccaatgacctgaataagatgaaagagcaccccaagcctcagatgagagcatagtccctgccaacacctggcttgtagcctggccagactctgaacagagagccttgcaatgccatgctagattcctgacccataggaactatacttctcccctgggaccttgttcccagggtccgtgtggaagctggaacactccgcatgatctccctggccaccataggcaagctattgaagtttctttacacatgcaggttggcaggacattacagttttgtttccttttttgnaggcacctacggtagga

SEQ ID NO: 530301 - DNA, 640 bp, Homo sapiens
atctggcccaatgtccatactatattaacatgtaaaggtgcttatgaaacagtattgtggagtgtgattcacctgtgttgcttcttaaggaagtacgactctacattaaaaaatattgaagggaaacaaaataccaaaatgcgatcgcctggattcctaatgtccatcctgcttccgcctttgggctgatggtgtataagcagtggccaactccacagctttacattttctcagtgatcctatgctctaagacatttgtgaggtgacttgtcttcacaaacagatcgtttctatgtaccgtgtctactctctttcgtggattacaaataacatccattcctgatgtttctggcacaatactttcaccgctgtatcctacaactaccatccatctctactttgaccaagactacctttgacaccagcggcacagacacccagtctcacacaccagcatctcttggcaacacccacaacaaccaaacatctaattcaataacagctctgcccccgccaccgtgcctgtcacactcactttcccaccccccgcacccggcctgcagcgcctaacccaccatgaccattcacttgccacccaagagttcacgcacacacggtcgctctgagacccactccacca

SEQ ID NO: 530302 - DNA, 515 bp, Homo sapiens
tagacttgggcgtgagctaggtcagagttaaacaacctgccattgatgaaacccctctctgctgaaatacaaaattagcttgcattgtgacgtgtcctcagccttccaagtagctgggttacagtgcccaccaccatgcccagcgaatattttgtatttttttttttagtagagatggagttcaccatgtgggccaggctggtctcgaactcctgaccttgtgatttgcccacttcggcctcccaaagtgttgggactacaggtgtgatccatcacacccggccaacttttctttttttttttttttaggagacagggtcttgctctgttttccaggttggtctcaattcctgggcccaagcagttctcccacctgggcctgccaaggtgctagtattataggcgtgagccactgcgcccagccctttatagtttttttcttttttttgagatgaagtttccctctgtcaccattgcactccaacctgggtgacagagagagactccgtttaatt

SEQ ID NO: 530303 - DNA, 454 bp, Homo sapiens
tagaaggatacactctgcacaaacgccaaggttggagagtatgtagttaactttaataacaagaagtgccgcaaccagactaatagaatgaaactacacccacatgatgtagtgctatgtagcatcaagacaattcggagttaaaccaatgatgaatttcaacaggagatggactttgaatagaagtactgagaataaaaagaggtttcccgaatacataaaacacatgttgaattacatttatatccacttacatacattctcttgctggtacccgaagataaagactcatcgcataaatacttatgtgatcacataaacacactggtgctggtatggagcatgagtctggaacagcgaaggccagtgaggaggctgctgtggtcttcctggtgagcaaagcaaggtagaggattggatatgagggaagactcaaaataggatgctgaaaaaa

SEQ ID NO: 530304 - DNA, 524 bp, Homo sapiens
  misc_feature (481)..(481): n is a, c, g, or t
caggtccctctttcctggacctccaaagcattttttttgagacacggcttcactctgtcacccaggcaggagtgcagtggtataatcacagctcaccgcagacttcacctcccagggctctggttatcctcccacctcagcctcctgagtagctgggaccacagcggggcaccaccatgcctgatatttgtttttttttttttttttttggaaagggagtctggctcggtcacccggggggtcgtgatctcagctcattacaagctcggcctccggggttcacgccattctccggcctcagcctccgcgattagcggggactacgggcgccagccaattcaccgggctaatttttggtattttaagtagagagggggttcctcggtgtaagccgggagggtctggatctcttgacctcatgatcggccggcctgggcctcccaaggtgcggtgattacggacatgagccacctctttgggnccggggaacctattaatcagatgttggactttttgaacccatc

SEQ ID NO: 530305 - DNA, 654 bp, Homo sapiens
  misc_feature (424)..(424): n is a, c, g, or t
  misc_feature (606)..(606): n is a, c, g, or t
atctccaccttcctggcggccatataatataatcagccttaccagtaattaaaccaatcgaaactggaccgaatgaattagaatcagctgaatgttcagtattatcaccttccacccagcagtgtccctgaggaactttaacatactcatttttataaccttttgtacgaattatatcactttcaagtcctacaattcgtttaacgatagtcacatcaggatccatgggagaaattaatgtgacaatatctccttttgaaatactgtaaaaatttgttgaccatctatttaaataaataaaatcggatgattctcaatgtgggttaaattcatgttgcattgatattccttcaactcttgcaatacttgccacattatcaaggaatgtgactcctacaggtaccgctaatgatataaatttggnggacatcaccacactacctatttttacgattaatttaaaccgattaagcttttcaagtaaaatcatcactctgttcattatggcacataaatttcatttatactcataccgaattcagcactagactagaatcctttcaaagtgtttacatatcaaaacctatatacttagataataactangataagaatcattttttaaatagatactgataagagaccacataatat

SEQ ID NO: 530306 - DNA, 162 bp, Homo sapiens
actctcaggatcccctgatatgcttgctttttgtaatttctggtgctttgaaaatctttttggaggtataaaaatctcaaccaaagttatgctcatccaaacaagctgacctttaatttaatttcaccacaactaattcttcagtgcctcatgactgaaacc

SEQ ID NO: 530307 - DNA, 161 bp, Homo sapiens
caaccctgggctcatgcaatcctcccgctttcagcctcccaaagtgctggtggttacagccagtgtgacaccgtgtctggcccttttctttatcataggagaagggttgttagactcccaggaaacgtcacctggaaccaagaatgtgaactcaagtgacc

SEQ ID NO: 530308 - DNA, 159 bp, Homo sapiens
tgggtggatcacctgggttcaggagttggagaccggctgacagacatggtggggcccatctctactaaaaatacaaaattgcgcgggcgtggttggtgcatgcctgtagtcccagctactcaggaggctgacacacaagaattgcttgaacctgggagg

SEQ ID NO: 530309 - DNA, 222 bp, Homo sapiens
tgggttgggagaaaatgaatgttctatacatttccatagagttcacatcctgcatgttaaaatggcagtgagtgctcatgcccgtggccccacatgctccagtgccatccctctacgtggcatgcccacatgtgcccccattttcttctagccagaatctttttctgaacatgcccgggcaaaggaaaactgtgattcacattgcttgatttttgttcactg

SEQ ID NO: 530310 - DNA, 315 bp, Homo sapiens
  misc_feature (293)..(293): n is a, c, g, or t
ctgttgattgatgtttggaaacattatctcagtgaccctgctctctcctctacacatgcgcacgctaacacacacacacacacacacacacaatgacacatggtggtctggtctaatatagtgtgtctgaattcagagggcagacattaacagccaagttttgttttttttcgagagagagtctcactctgagtgcccagtgctggagtgccgtggcaccaatcttggctctagtgcaactctctgccatccgtggattcaacgcaattcactctgcctcagccctcctgagnatcaaatattcaacgccgtcag

SEQ ID NO: 530311 - DNA, 351 bp, Homo sapiens
  misc_feature (95)..(95): n is a, c, g, or t
  misc_feature (143)..(143): n is a, c, g, or t
  misc_feature (191)..(191): n is a, c, g, or t
  misc_feature (194)..(194): n is a, c, g, or t
  misc_feature (209)..(209): n is a, c, g, or t
  misc_feature (256)..(256): n is a, c, g, or t
  misc_feature (259)..(259): n is a, c, g, or t
  misc_feature (261)..(261): n is a, c, g, or t
tccttcagctggtgaaagaataaacaaactacggtacatatataatgaaatactatacgacaataaagaggaacagacaactgatatatgtagcnaaatgcatgaatctcaaatgcattatgctaggtgaaggaaggcaaccnaaaaaactatatactacatgattccatttgtgtgataatctgaaaaangcnaaactgtagtacagnaaacgaccgtgctgccgggactggagtcgaggagtatctgactacanaangnaggaggagatttcggaggttgatggactgtctatatcttgattgcaatggtttacatagttataggcattcgccaaacctctgagggttg

SEQ ID NO: 530312 - DNA, 203 bp, Homo sapiens
agcaagtcatctttctccttgtcttgcaggcataatacatgacactactgtatgtgtcctcagatcaatttaatgatactatctttccaaacttagttcgatattaaatgtattattgacctgagaccttaatgacaaatcactgctattagacaattgaagtgttccatttcacttcgtaattccaaataatcatcagttat

SEQ ID NO: 530313 - DNA, 340 bp, Homo sapiens
aacaacctcatcaaaactactttctggtcaagagagaagcaataattattattaacattattgacggtcaataaacttgattgcattatgggccagcactattaagggagccttatcagttgtgagtgaggaccagtcgttgtttgagtgttcctacggacgccacactggctaagacagagatgaccgcgtcctcctccagcgacttttggcagacttccaagatgagccacgcgtcctagcaggattggctgtttcaccccagccaggtcacatcaaatggatgtaacctggccaggtgatggctagggactttctgatgatgcagttggccaagggg

SEQ ID NO: 530314 - DNA, 692 bp, Homo sapiens
  misc_feature (291)..(291): n is a, c, g, or t
  misc_feature (332)..(332): n is a, c, g, or t
  misc_feature (365)..(365): n is a, c, g, or t
  misc_feature (398)..(398): n is a, c, g, or t
  misc_feature (408)..(409): n is a, c, g, or t
  misc_feature (412)..(412): n is a, c, g, or t
  misc_feature (418)..(419): n is a, c, g, or t
  misc_feature (426)..(426): n is a, c, g, or t
  misc_feature (444)..(444): n is a, c, g, or t
  misc_feature (449)..(449): n is a, c, g, or t
  misc_feature (471)..(471): n is a, c, g, or t
  misc_feature (517)..(517): n is a, c, g, or t
  misc_feature (525)..(525): n is a, c, g, or t
  misc_feature (551)..(551): n is a, c, g, or t
  misc_feature (584)..(585): n is a, c, g, or t
  misc_feature (604)..(604): n is a, c, g, or t
  misc_feature (619)..(620): n is a, c, g, or t
  misc_feature (632)..(632): n is a, c, g, or t
  misc_feature (635)..(635): n is a, c, g, or t
  misc_feature (666)..(666): n is a, c, g, or t
  misc_feature (672)..(672): n is a, c, g, or t
tatatacatacacatatatgtatacatatatacacatatatgtatacatatatacacatatatgtatacatatatatatattctacagtaaaacgtagacgtcctcgtccttggcattttcactgttctgtacaaggctgcttgtttttttattgccaaagtcaaataaacgggagactgtcatgctcatgcatgaatagaatttagtcaaataaaaaatttggtcattggtactgactttctctctctctctctctctcttttttttttggacagagtctcgcactggtngcctggggctggaatgcagtggtgcgatctcggctcactgnaacctccgcctcccgggttcaagtgattctccngcctcagcctcccaagtaggtgggattacaggncgcccgccanncangcccanntaatttnggtattttagtagagatnggggnttcactatgtgggccaggcggntctcgaactcctgacctcgtgatgggcccacctcagctcccaaagngcggtatnacagatgtgagccaccgacccagccngagtttctcttctctcttttaaactttattttnngaaaaacccggtagacttntggggggagcatttnngtggataatttncantgatctaagctgagtgatttttaaaagaatngaatgnggttctcaccagtatatgtc

SEQ ID NO: 530315 - DNA, 1010 bp, Homo sapiens
  misc_feature (1010)..(1010): n is a, c, g, or t
ggcttcagctgtggagagaggacctgctggaaggagacgactgatgacatgcccagagtggaatgtggaatgtggaaacatgtccatgcgggtgagccagtgggtgcacgccatggaatgggacagggtgggtggagctggggtggacagtggtgaactgtggggtcctggatggacgccccaggcctcttggccagtggcctccctgatcatgctcccgtggccactacccctggcctcctcggcctcaccttgctcttcgtgggccctcacttccctgttcctctggtactgctaccggctgtggctcccaagacatgcatgtgccctaggggctgggagcctgagctagggcggtgttctgtggtgtggcctgtgggatgctcgtgagtgcctggtctgggccaagcccatggtgtggtcctggggatcccggggaaggacctaggacggaatggcctaagtgagccggcggcttcgggcctactgcaaggcgctactcctgtggctgggatggggtacgagtgagtgccggtcacgctcaagtggtggttggcaccagtgccctgggacgacggtccagagagtcctaaggtatacaaacgcccaggcatgcgtatctacacttacccgagaacctggcttttcaagtccaccatttagagagaccggcgggtaacggcacctagaggaagtcgacgttgcaatgtaccgtggacgaggcaggattatcccatgacaattattgcagggaaactacgaggagtgtgacgcctgggacattctccaggggaactacctccatacagccatcaagtgggattggacagcaccagcatgggtccgtccacgagatgcaaaaaaaagctccttgctagaaactaagcaatgcctaggtgaaacccaagctaaagtagacgacgtgagcatggaggagccatataggggaacctagacgggggagatcagacgattatagacgtagacagaagcatggaagataggaagcn

SEQ ID NO: 530316 - DNA, 141 bp, Homo sapiens
  misc_feature (111)..(111): n is a, c, g, or t
  misc_feature (134)..(134): n is a, c, g, or t
ttcgacgacaggtgtgggaggccactcactgccaagtatggcacaggctggagcagccaggagatggctaaaatgtctggatccttggtcctagtgttatgttccagtctngccacctgtgctcaggatgcagncctggga

SEQ ID NO: 530317 - DNA, 138 bp, Homo sapiens
cccctcacccacagaggttttgtcttagttgttttgaaaaatcataaacgtctctgctcctctcacctgaaccactcttactatctacatccctaatgtggatagtattacacatattaaatgtgtacctcgtcccat

SEQ ID NO: 530318 - DNA, 248 bp, Homo sapiens
ctgaggattccaacgcttacgaggtcaggagattgggatcatcctggctaacacggtgaaaccctgtctctactaaaaatacaaaaaattagctgggtgtggtggcatgtgcctgtagtcccagctactcaggaggccgagttgggaaaatctcttgagcctgcaagatacgggttgcagtgagctgtgatcacgccactgcactctggccttctggcctcggtgacagagcaagaccctctcttcct

SEQ ID NO: 530319 - DNA, 414 bp, Homo sapiens
  misc_feature (187)..(187): n is a, c, g, or t
  misc_feature (241)..(241): n is a, c, g, or t
  misc_feature (311)..(311): n is a, c, g, or t
gtcgacggcctacgcgccccaggcaaattccaagcaggcaatcttaggggaacagagacgaggagaagatgtgaagacttccaagaattgggttgttggcaagaacaaccacaattctataaccaggaacacggcaaagctgggacgggaagacagaggaagctgcaaccatgacaggtgaccctgnaggtgggcaggtgatcagcaaggtcggcagagcaaggggcttacgcagaagganctggcacgaaaatcatgagaagcacaggtgatcgcggactatgagagcggacgggccatacccaaataancaggtgcttggcacaatccgagcggggcatttgggctcaagctccggggcaaaggacatttggaaagcccatcgaggaagggggctacggggggaaatgaaca

SEQ ID NO: 530320 - DNA, 403 bp, Homo sapiens
  misc_feature (23)..(23): n is a, c, g, or t
  misc_feature (30)..(30): n is a, c, g, or t
  misc_feature (398)..(398): n is a, c, g, or t
atttattcccccctgggacagancccagancttaactttattagtaaactgtaacttttttagaagtaaagaaaaaaaaggttacctacatcctagttaaattcacttccgattggttgaaacacaagggaggggctgggccgggtggctcacaccctgtaatcggagcactttgggaggccaaggcaggtggatcacttgaggcccaggagttcgagaccagcctggccaacatggtgaaaccttgtctctactaaaatacagaaattagctgggcatggtggcacatgcttgtaatcccagctacttgggaggctgaggcaggagaatcgtttgaacccgggaggcagaggtttcagtgagctgagattatgccactgcacttcagcctgggcaancaaag

SEQ ID NO: 530321 - DNA, 352 bp, Homo sapiens
ccccctccccgggtaaaagcaattcgcgtgcctcaacctcccgagtagctgggattacaggcatgcaccactatgccccgttaatttttgtatttttagaagagacggggtttcaccatgttggccaggctggtcttgaactcctggcctcaagcaatccgcctgcctgggcctcccaaagtactgggattacaggcatgagccactgtgcccggctgccaatttactttttatatgacacttaaaaactgggagactaaactgggtgtggtgggtgtacctctaaccccagatccttggaaggctgtggtggaaggatcacttgagcccaggagtttgagaccaacctggg

SEQ ID NO: 530322 - DNA, 1037 bp, Homo sapiens
ggcttgcgaaggcacagattccccgatccactagactcacgacgcagtatgcaccagcaggcagtccgacatcgaggacgtcctccgggcactcccacgaccaggagttaaactttgggatgtgcccggtgcatgttggtaccacaaggacttgagaggccgaagatccaccccttgaaaaatgagagaacagacaaatcgcaggaaaatctgggaaatccatcaaaaaatgaggataacgtgcaaaagcgcgcctccacagttcccggctctcccggtgccgagcggcggcgttctgttctttcatcgtttactctgccttttcgtggcgtccgtcgtctcattcgtcatcccgtgtccagaccggccggcgtccacagcgaatgtggccggctagactacagtgccgctgctcactctatgacttcctggctgtgcgcctgactactacccggggacacggatccaagatgtcctttcccctttataaaaacaccaacagcagcaacaatttccagccgatcctgtgtggacgcaaggctcaatcctctccctgcacctatagcagctgcctgtgtcagggggacaaccggcagcacgctcctgcggagagacctgtggcccaagacggtggccctcgtgcagctgtgctgagccaccagcaaagaggcagagacgcacatactgcatgcatcatgccgcgcacacccagcacctcccatcgacacaccttgcccacaccgcgacccctgctcgaccaacgcagcctctctccaccggcactgcctcaacccgcacccccacgcagccgcgcccgctgcgtgcccgccacgcacccccaaccggccggcctcaaacccaggacccgccagacagccaaccgcccacccaaccgaagaacgaacaccacaggcccaacagcaccaccccgcaccacaacggcccccaccaaggaaggaggacaaccacaacccgcccaacccaccggcacaccgcacacacgcacccaagaccaaacccaagacacacacacacga

SEQ ID NO: 530323 - DNA, 274 bp, Homo sapiens
  misc_feature (22)..(22): n is a, c, g, or t
  misc_feature (51)..(51): n is a, c, g, or t
  misc_feature (113)..(113): n is a, c, g, or t
  misc_feature (164)..(164): n is a, c, g, or t
  misc_feature (173)..(173): n is a, c, g, or t
  misc_feature (191)..(191): n is a, c, g, or t
  misc_feature (194)..(194): n is a, c, g, or t
  misc_feature (216)..(216): n is a, c, g, or t
  misc_feature (235)..(235): n is a, c, g, or t
  misc_feature (246)..(246): n is a, c, g, or t
  misc_feature (259)..(259): n is a, c, g, or t
  misc_feature (272)..(272): n is a, c, g, or t
cattcacgtcataagtttattnacaaacatatctagtatggcatatgagtnctagtttgacccacttccagaggctgcacctcttaaaatgctcttcatatctgttaaatggnggaactgaaacatccttatgttttaagcagttggtgtcttacgagtttttnttttttttntttttttttttttttaanttnttcaacactgacattttatttnctgaagttttatcattttnacaaaacaaancaaaatgaacccncgggccgtgactncc

SEQ ID NO: 530324 - DNA, 1098 bp, Homo sapiens
ctcctcctgctcctcctcctccatccatccaaaccatcctcctccttcatcactcctcctcccggtctgagggcgaggagacatccgagtcaatgaccctgggtgctccgaggctcttcttagcagccgcgcagcagccgcggcgacgtcactgtcctctcggcctggcacacagcgctccggccgccgaatgcccgtggacgcgcatctcttcccagagttcctgcttcctgggccagaccaaagccgcgaggagaacgcctcagggatcttgacctgctgtgagtgccttgaagaggtgagccgtgggcacgatcaaagagacacctaggctcaaggaccaatcaaggagtatggctgcccctcccaaaagctacccaaccgtgtcaggaacccgaccaccaagagcaggagccctacactgggaaggagaaccaacatgcagcagaccacgaaaaacccacatctgacaacaggagcccccgaggacaggaggaggcatcccaagggggagcatccagacatggcctatagggcccagagggccacatgacccaatagcccagcctgcacacatgatacaccccaggctagaccataggcagaccaagcaaacacgtagcgcaacatacacataacataggcggcatccgccaaacaaacggagcccactagcaccgctgggcccaagcattcattgcgtcgagacaccctggatgcgcatccaaggaccctagctgcccgacccagatgaacgccacttaactacctcgcagcccgacacagagctccctgcggcccacagctcccggcgcgcccacccagcaaaccccctaggagaatggagccaggcacccgaccacgcaggccaggcgagccagcaacgccgcacaaggcgcgatgacgatgcgacggcagcggagacgaaagcaacgccatgacccacgaaaccacgaggcgggaacgaccatgaggcgacacacgagccggcaatagggcgccaagcagggaggccagccaccccgcaagcgcccaacaaaggcgagcggtgcccacagtacgcccaaccacacgacccccacccggataccacaagcc

SEQ ID NO: 530325 - DNA, 110 bp, Homo sapiens
actaagagtaggacgccgcgcggatttcttccggcaagcgccgggggcacgacaggccccgcccgccagatcgcctgccgcaagctggattccttcattgacacctcttg

SEQ ID NO: 530326 - DNA, 128 bp, Homo sapiens
  misc_feature (40)..(40): n is a, c, g, or t
ggggggggcccccccccccaaaaaatcccccggggggaantttcgccccccccccccccccccccaaaaaattttggggtggggggggcccaaaaaaatggttcccctttaaaagggggttcccccca

SEQ ID NO: 530327 - DNA, 308 bp, Homo sapiens
gccgtgccctgtccctgaccaagacccccgccatcgtgtgcgccccgtggccccctcatgcatgcccgcctctctgcatggtctcttgggagaagagagataacgtccccctccccgccccagccccttttttctgttggtttagcacaaatacgtacccccactccaccccccgcacctccagacttcacccacagtcgatgtaattgttttataactgtttaatcctattcgatggaaaccatgcttctgtcgttttatactttgctaggtagactttattatccccctactatgccctcattttt

SEQ ID NO: 530328 - DNA, 327 bp, Homo sapiens
cacctcttatcccaagcctgcggtaaacactaatctgttttctgtctctatggatttgggaattttatgtaaatggaatcatacaatatgtggccctctctgccttcttccttctattagcatgttttcaaggttcattcatgatatagcatgtatcagtactacttcatttctttttatggccgaaattactccattgtgtggagcttcggcgtgtgcatgcacacgccgagggtccagactctactaaaaatacaaaaattagcaggttgtggtgagccgagatagcgtcattgcactgcagcctgtgtgacaaaagtgaaactc

SEQ ID NO: 530329 - DNA, 1232 bp, Homo sapiens
  misc_feature (254)..(254): n is a, c, g, or t
  misc_feature (558)..(558): n is a, c, g, or t
  misc_feature (982)..(982): n is a, c, g, or t
ggagagaactagtctgagttttttgtatggttattttttttgtgggaataaaaaaaaatttattgggggccctaagaatatatttttttttctcttgcaaagtttgggttcccgggaaaactgtcacagtcgggggggcaggcattggaagacccatctttgggggccagaccggggggacattcttctggggagatggtgtgggaggggcttgccagattgtggctggtgtgggttgcgccatctctccacanaaagggtatggctcacaaagggattacgatgggccaacacccgcgtaaactcctgtggggcacagaaatgttcccctctctttggggctcttatatatattgtgggtggtgtaaccgccgcgggcacaagctcttaacaaaaatgggtgtcttggtccatatatcgcggacgcaactctccgagagggccacacaaacacaacacacaaggtctctctgcgtgggcgcgtgagagagagagagaataaagctctctctctgtgagagagccccgagagagggggggcaaggtcttacacacacncgggggtctctcctctagggggccctcacagggagcggtggggcggagagagaaacacaccggggggggcgacatatcgagtatcccccttgtgagtagtgccccgtgggggcacagagtttgtgtgacaccagaaggaggggtctctcccagaggaggcttatttcatctctctctcacagagaggcgagagcaacagaagagagagtggtgttccccctctcagaggggctgttgtgtgtgtcgccccaccacagaggggggagaggcaccacattgtgtggcccccaagagtggtgttgagaagacactgtgtggcggcccctatcattctgtgttgagccgggcagaataatatcaacccacacaacagcaggtgtggtgcccccccgtgttgtgttgaacaatagtcgcccccctctcngggggggggggggcaaagtgagacacacagagccctccggggcgcgacgggagtattcttaaaaaaaacgcgcgagaaataacgaggagacaccccacggcgagaaaagagaaccccacccctttggggccaagaaagggggagcagccaccccaagagtggggccccccggggaggacacccagcggggagcaacagaaagagttggtcccccctgtagaacagagaaagtcgcccccctttttaggag

SEQ ID NO: 530330 - DNA, 128 bp, Homo sapiens
gagagacaagcctgcacagtgcccatcactgaaccctgcgaattacgaaagctactacatccatgactgccccgaccccccttgagacaggggcggcatgcagaagcatcccaactgactagagagca

SEQ ID NO: 530331 - DNA, 471 bp, Homo sapiens
aagaacggataggatgatatcgcatcaaatacaggaagattccacatcatttaccaatatgctaatacaccgagagaatatttagacaaattcattcttcctcaggttcatgacaggagagattgtaactacgtttattatctaatttttcagccaaatatttaagaatcaaatgaaattcaacctcatgaaggtgtaagagacgtacacctcatgaaggtgtaagagacgtacacctcatgaaggtgtaagagacgtacacctcatgaaggtgtaagagacgtacacctcatgaaggtgtaagagacgtacacctcatgaaggtgtaagagacgtacacctcatgaaggtgtaagagacgtacacctcatgaaggtgtaagagaactagaaatgttgaaccacacacacagaattggtcctcgataccgcaccaccagccttccctacactccccgcagcactcgagaac

SEQ ID NO: 530332 - DNA, 463 bp, Homo sapiens
  misc_feature (125)..(125): n is a, c, g, or t
  misc_feature (231)..(231): n is a, c, g, or t
  misc_feature (251)..(251): n is a, c, g, or t
ctctcacatccagggtggcggtggttcgcggaccatccgagcgcatcgtcgacgcgatcgatgccgagtgtcggctccggggcggcccaccttcgcccgaaccaccgacacctgctgcgcgcttnctgtccgcggctccgacgacatcacattcgttgcgcgcctgctggattcgttaccccgatcgacgtgcgccggcctcagcgcccgcctgcacatcaccgattctcncgcagcgctccgacaagccntcgctcgctgcgcggctgccggatcccacgatcgcatcgtcgaattcaccggatcgatgttgttggcctccgaaccggtgcaggagtcgttgccgccatggccgcggtgaccatcgccgtgctggccgagtacgaccgcgtccacaccgccgatctggtggcgtcacttcgggccttcctcgaggccaacgggcactgggagaccgcggccc

SEQ ID NO: 530333 - DNA, 288 bp, Homo sapiens
  misc_feature (75)..(75): n is a, c, g, or t
  misc_feature (143)..(143): n is a, c, g, or t
  misc_feature (153)..(153): n is a, c, g, or t
tgagcctgtggtcctagctgctcgggaggctgaggcaggagaatagcctgaacctgggaatcggaggttgcggancaagatcgccccactgcactccagcctggcaatagaccgagactccgtctccaaaaaaaaaaaaaaantacaattttnatttcttttactttttttagtaagttaaatgtatataaaaatggcttcggacaaaaatatctctgagttcttgtgtattttcagtcaaaacttttaaacctgtagaatcaatttaaagtgtttggaaaaaatttt

SEQ ID NO: 530334 - DNA, 417 bp, Homo sapiens
aataacagaaaccaggagtgaagagtccagggagcatgtgtggtaagagaactcgggagcccaccaacatttaagggttaggcacaccaggtgtgatggctcatgcctgtaatcccagcactttgggaggccgaggcgggcgaatcgcttgagcccaggagtttgagaccctcctaggcaacatggtggaaccccgtctctacaaaaaatacagaaattaggccgggcgcggtggcttatgcctgtaatcccagcactttgggatgccgaggcgggcggatcgcgaggtcgggcgatcgagaccattctggctaacacagtgaaaccccgtctctactaaacatacaaaaaattatccgggcgtggtggcacgcgcctgtagtcccagctactcaggaggctgaggtgggaggatcg

SEQ ID NO: 530335 - DNA, 388 bp, Homo sapiens
  misc_feature (334)..(334): n is a, c, g, or t
  misc_feature (338)..(338): n is a, c, g, or t
  misc_feature (358)..(358): n is a, c, g, or t
cgtttcttcgtcaattccggcgaggtgtcccgcaacgagttcgacggtttcgccaaaccgctgttgttgcatgcccgtgcttatgcctgggcaccacggatatttcgcacgcagcgcagcctgtttgaacaggacatttctcgccagcgtggcattcccttcagtatccgcgaactgaatacctccggtgaattggcgccagcggccgagcgcgatgaatacgtaccggtgctgtacagccagacgcagagtttgctgggctcgccgctgggctttgatttgctggccagccctgcgccgtgcagcgctggagcgtgcacaacaaagcggccanttgncggtgtcacagcccatgcanttgtatctgagtatcgacggtaccggctga

SEQ ID NO: 530336 - DNA, 102 bp, Homo sapiens
gtgttgtcgtgtggcgctgttgctggtgtggcggcttgtgttgggctgtcctttgccctgagctcagagccgtcacagatatctgatcctcactgaatcgtc

SEQ ID NO: 530337 - DNA, 278 bp, Homo sapiens
tagatggtgagagcctcaaagtggactgtccactgccttaggctgtgggctcacgtcatacatttcccttcccaaagtctacagaattccccgcattccactttgtaatgtaacccagtgagtgtcattccagttgtggttacaggcccttggaaaacccactctgctcctgctgtgaggtacaggcagccatgtggcatcaactctaaacactctaaatgtatcttctcctgggacatcaaactgctgattaagtaaaactcttttggaaagataaa

SEQ ID NO: 530338 - DNA, 382 bp, Homo sapiens
  misc_feature (4)..(4): n is a, c, g, or t
  misc_feature (24)..(24): n is a, c, g, or t
  misc_feature (68)..(68): n is a, c, g, or t
cacnaaaggaacttaccctatgtnagaaaaaaccacctgtaccccccaaagcctattgaaatacaaancaaaaaattttaaaaaacaatagtgtaactacacaaattaaattacatggattgggctgggtgcagtggcccacgcgtgtaatcccagcactttgggaggctgacatgagcgtatcatgaggtcagcagtttgagactagcctgaccaatatggtgaaaccctgtctctactaaaaatgcaaaaattggctgggcatggtggcacacgcctgtagttccagctactcaggaggctgaggcgggagaattgcttgaacccaggaggcaaagtttgcagtgagccaagattgccccactgcactccagcctgggtg

SEQ ID NO: 530339 - DNA, 684 bp, Homo sapiens
agattaccattagaacatacccacagatagaaactaagatctcaactttttctccaaaagaaaatatggcatttttatctccctgaagtaaacacgaaggaaggggttaaaatcaccagaacagagtttagagaaggtacccatgcaggcccctttctgatgagagtaactagatgaggcccttagatgcacaaaacctggcggtccttgaagatctatatatctttcacataccggtgaccaattagagacctctgctttcagccacacaaagtgtgatgcacttaccaaggcattatccaaaatgtaagacagtgttctctgtatcacctgtaagaaagcgctctctaaatcagctgtgagaagctcccagaaatttgaagccacataagcccgtgagtttcatatacgaaggcttcaacatttgatttgtcttttaccgacgcgtgtacccagaaaattctcaaagtctagggagtgtttcgagaacctcaattttgtttcaccggaccaagggcaaaaattccggcttgaacaaaaagtttactttaagggcaatgcctgaaaggattttgccgccaacaccgcgaaggttaagggcaacccgccaaatggaacaattcccccgacctaagccgggtttggaacacatcctttccccccattgcggtggagtctctctgg

SEQ ID NO: 530340 - DNA, 176 bp, Homo sapiens
aagggggtaggagagtgtggtcaccttcctcatgatcttccggtcgtaaaacatcacttggtctctcttccggaaccggtactgaggagtgggcgtgcttgtcgaacatgtctaagccttcgtgaacatgaaaaggatgaggtcttgctatgttgcccagactagtctcaaactcc

SEQ ID NO: 530341 - DNA, 84 bp, Homo sapiens
ggatttgctggtgcagtacaactaggcttaatagggaaatttttaaattaaaaagtgtttcactggaaaaaaaaacgttagaag

SEQ ID NO: 530342 - DNA, 1108 bp, Homo sapiens
gcaactttgctcccagtgggtctgtgaagcttggcactgtatcgggctacatgtgctcacgtgcttgcgtgaatccgtgagtggacccgagaaggaagagccagattggacagaggatgcgtgctggaggtcggcatcaatcagctttccttgccttttgacatattcgttgcgtgactcgtcacttacgagttgatctgtttcgtgctgggagcgagtttgccgaagtcttcgtagggataagctcctcgcctctggtcgttgcccgttgcgctcgtgagcgtagggttgcgcgttcgtgcgtcctttaaagggggcttgtcccagtggccatccgagtggtcttgcttcgcttcaagtagtgatgagctggggctcagtttcccctctgccgatctcgtccttggccgatgccctggctagcgtcctcgtggttgtctcggtggcctttggagaggtcttggtcataataccatacacatgtgaagtcggtctcactgccgagaattaccttgtatcgtggatatagcatgagcaggggtggtagttaagccacgtcggacatgggcgcggaccgtgtaggccagcggaggagtggatcacaaaatttacccacttatccttaagcaggtcatctagctccaaacaattaaggtcccagggcaacccttgagtgggcaggtggtacctccttccaataccttttcataccctttttccgaggcaacatgtttgcgactaccttaatctgcctggacactcacgtgagtgcctctgtcgcagacctctctgcccacttgggtcccgtcccatctgtgtttgcccctcagctcctctcgggaaagtccattgcagccgtccgcccttttggccctcttggttcctccccatagggggatatgcaaagagttagtcatctctcaatggcaattgaaggtcggtcgccttctgtctcgcgcccgggatatgcgcccaagggtgtgtcgtctggaagcaggcggctcttttaggggccccttggagggagtccccttaagctctatcctatagggtcatctgggggccctacggtgagaagcgcccaccctcccttggttacctctcggcc

SEQ ID NO: 530343 - DNA, 139 bp, Homo sapiens
gaatctctctctttcgcaactcattatcaccagcacaatcaagtgttttaacgaggcacctgcatttcggtccccccggtagatggctacgtgatggttttacagccctgaggagcccaatgatcagcctgatgtggcg

SEQ ID NO: 530344 - DNA, 178 bp, Homo sapiens
ctggatttcatcttgattattggttagagaaaactttgtgccttaagcttaattgtcacactcattacattatgtaatgtttctctccaatctgtattacaatatgtgtagtaagtcctgaacactctctttaatgctttgccacattcgcttacattctgctgagtgtcttctctcc

SEQ ID NO: 530345 - DNA, 296 bp, Homo sapiens
tgatatatcattaaccccatttgaaatggtcgaggttgtctggtattggggtagttattcctggtatcatcgcgaacacaattcaacaacaaggtgttgtaataacattatcatctactatgttattaacatgtattacatatgtcatcttgttcttatacagttttattaattaatcaagaacaaggagcgcgtaattacaatgaaaaagaaaaaacgattaacaccaagcgaatggttgctcaaacaatctaaacgtcataaacgtagaaacactttatacacaagccgcttca

SEQ ID NO: 530346 - DNA, 399 bp, Homo sapiens
ttcttgcgtgcgatatcatgagagctgggtgtgtaggagcacacatggtgatagcccctgcactctggcactcagcacctgactctggcgagggacgggtgggaggcggggatacggtcacctctgtgttgccccagggccatcctgccccttggtggagtggggcataaaagggcagtgctgtgctggcgggagtcggccaggctctccaggggcagggcaggtggccaccttgctgagtccttgcttgccctatgtgctgatgatgaggccaggggtatgagtggtcagatagtccctgctgaggcctttcacagttcacagggagatgagtcgtgactggttacggggtgtcaccacggaaatgagtccctatgttcacgagcccagtggggatat

SEQ ID NO: 530347 - DNA, 110 bp, Homo sapiens
aagatttccgagctctgatggacatgcagtcatacatactagcatttattctctatcagtgctggatttctattcaagaggctatctgattccctaccctattattactt

SEQ ID NO: 530348 - DNA, 101 bp, Homo sapiens
caagatgtcatgccaagtatgcgaggtcaggccatgagtgcagatgcctgcaagaggtgacctctggctcagaccgatggatccgcaagagttggaagtga

SEQ ID NO: 530349 - DNA, 145 bp, Homo sapiens
  misc_feature (120)..(120): n is a, c, g, or t
tgaggtgattagaggatccgtctagcctgccagtgcggtgctgttgaggcgcgtaagagccaaaactaccacctccaccagaagcaacgaggagccccactcccaggtgtcagcgaaggncaagtggaacctgaacttctacctc

SEQ ID NO: 530350 - DNA, 118 bp, Homo sapiens
atccctgaggacactgtggagcagaaggcagaaagcgtgtgcacgaattatagtctcacacggagagccgggatcatgaacatggcggcagggacgctggcgacagctagaaccacgc

SEQ ID NO: 530351 - DNA, 174 bp, Homo sapiens
ggtcgtctcactgcctgctcgcgcggcgccgtgtgctggctctctgccaccttcggctttgtgttgccagctgccattgtgtgtttgcagctgcttgtgtgtttgcgctgccttgtgtgttgccgctgcttgtgtgtagccgctgccttgtgtgtttgccgccgccttgtgtgt

SEQ ID NO: 530352 - DNA, 735 bp, Homo sapiens
gagcggtaccaccactcctatagatcagtgcttttccgcccgtgtccccgcctcccccgagcgccgctccggctgacaccgccgctcgctccgagttttcaggctcgtgctaagctagcgccgtcgtcgtctcccttcagttcgccatcatgattatctaccgggacctcatcagccacgatgagatgttctccgacatctacaagatccgggagatcgcggacgggttgtgcctggaggtggaggggaagatggtcagtaggacagaaggtaacattgatgactcgctcattggtggaaatgcctccgctgaaggccccgagggcgaaggtaccgaaagcacagtaatcactggtgtcgatattgtcatgaaccatcacctgcaggaaacaagtttcacaaaagaagcctacaagaagtacatcgaagattacatgacatccatcaaagggaaacttgaagaacagagaccagaaagagtaaaaccttttatgacaggggctggcagaacaaatcaagcacatccttgctaatttcaaaaactaccagttctttattggtgaaaacatgaatccagatggcatggttgctctattggactaccgtgaggatggtgtgaccccatatattgattttctttaaggatggtttagaaatggacaaatgttacaaatgtggcaattatttggatctatcacctgcatctaacggctctgcttgtcatcccacacccag

SEQ ID NO: 530353 - DNA, 369 bp, Homo sapiens
tgtgcgagtctgctgatgtgctgatctgtatgtgaggtagttctctctcttcctaatgggatgtcttcttagctgcctttcctctaactatggacatcaacgatcgagacccatgaacatatgcacagtgcccagccactgcatggggccgatgggtgtggcgaccaggaacacagaggccaatatagtgacaaactttcgagtagtaatgatgatggagcgcgtagtcgaccaccctacatgaccggcatgatgatgaccctctgaccctgggcactggatcagcccaaagagccggatgtcatagatgatggccgtgtacctttgagcaaagttcatgaagtcccagagctccccggtgaacgggat

SEQ ID NO: 530354 - DNA, 217 bp, Homo sapiens
tatgtgcgtgtgtgtggtatgtatgacgtgatagctatgtgtggtatgtgtggtatcgtgtggtgtgtgtggtgtgtgtgtctgtgtgtgttgtgtgggtgtggtgtgccctatgcgtagtatgtgtggtgtgtgtgtggtatgtctgcgtggcgtgtgtacatgtgtgttgtgtgttatgtgcgtgtgtgtgctatgtgctgcatatagctatttg

SEQ ID NO: 530355 - DNA, 648 bp, Homo sapiens
cctgaccacgttgtatcactgaggaagtggtccgggtccatagctgtgagtcgtccaggctcaggcgcgcatgtcgccttcttggtcagctgccagcgtgggcctgggggaacaggctatagaacaataagccgcgctccagcgccttctccagcgtgcggcaatggatcagcgcgtggcacatcatggcgaaagtgccgcgtttgctcggcccttcggcaaaccccaggtattcgtcatccaaccccagccagagcatttgcagcaagcgggcaaattgctctggagcgatgcgggcgcggggttcggtcagcagttccggggtgatgcccacctgctgcaacacccccgagtagtcgaaaccggctcggcgcgcaccgccgagggccgctcgggcgtaatggctggcgatggtacgttcacgcatgcaagggcctcatccatggagtggcggatggtagccatcacccagtggggcgacaaggcggatatccgccaaattgtaggacgagacaggatgagtgggcggaaatccgccactgtgttgcactctccggagtcgcccgtgaaccccaagccctgatgtctaaaggccttcagcgcgtttaagcaaagtggcacgctgtttgcgaataacattcggtgctc

SEQ ID NO: 530356 - DNA, 556 bp, Homo sapiens
caagccctcctaaatcaggcaatttgtggccaggattggcaccaccacacaaaaaagctcagtctgcatctccaaagagaaaaaaacagcacaagaaatacagaagtgttatttcagacatatttgatggaacaatcattagttcagtgcagtgtctgacttgtgacagggtgagtatgagggtattagaatacacagaaaattcgtgtcaaatgatttttaaaaatgtgacaagatgatgtgaaaagtttaattccttctctttgctattgatgagcatacatgcatttattggtgtttacatcaacacaaatttgattctaggtgtagaatttttttttggaagtagcagcatccctgttttaaaggatggtgacccatccattggacagggcacatattatcccttccgtccatcctattttgggttacatataaaggtgagaaagttgctccagccaacaagaattgggtaacaccctgcatatcctcccccagctgaatgaaatttgtatactgggaatcctgttgaattccccaggttccaactgtgaat

SEQ ID NO: 530357 - DNA, 945 bp, Homo sapiens
agcggggtcttgctgagcgcgaggcggtggaggctgaggcctgaggcctggggcggggtggcggcctgggctggctgttggcctcgtcgccttcccctgctgggcgccgcgggctccgcgggcggtatcggagtgtcgtgcggcgtcgtggccgacgctgagcacgcgctcttgtcggacgtgacagggccctgtcggaacgagtgatggtgcgtggctcatgggcgcagggagagccctcgggatgtcgggcccgtgacctcatgcagccagctccgtgcgcgtggtcccgggtacgggtaacaggtccatgaaggcgcgaacgggacgtagtaggaacgtcgatctcagcaggacaattgttgcgatactatagctccagtatctagtgcggagtgatgctttgagagccgtatcttgggggcgtagtccatgaccacaagtcgcccaggagtagacttacacaagaggcaacgattgctcatcacgaattaatcccctgggccctgggtgtacgcccacaacttgtgagagaaagcactttgtgactcaaacggaaaggtgatcttctactaggacaatgggaaaccatagatatacacaagcctaggatacacgtagaggaatttgaacaccacagggggaagcagagggaacaacgcagatatttaaaagccattttctacagtagaggcacggcctagtactacataggaaccaaagagcgtcccccaaaaggacaacgtgggatgtcgcgaagtatgacttactatttggagtcctacagtggcgacaccttagggggagagttcactccatgacatactcattggaggcccactatagacagggatcacaatttgggacaaattggcacagagagtacaagcatgattggaacaatgacgaccaacaagagtggaactttcaaaggtgacacccttg

SEQ ID NO: 530358 - DNA, 286 bp, Homo sapiens
caagccctcctaaatcaggcaatttgtggccaggattggcaccaccacacaaaaaagctcagtctgcatctccaaagagaaaaaaacagcacaagaaatacagaagtgttatttcagacatatttgatggaacaatcattagttcagtgcagtgtctgacttgtgacagggtgtctgtaaccctcgagacctttcaagatcttgtccttgccaattcctggcaaggaggaccttgctaagcgcattcacaagtcatccaacttcatagtcaagtctgatgtatgcg

SEQ ID NO: 530359 - DNA, 371 bp, Homo sapiens
  misc_feature (30)..(30): n is a, c, g, or t
aaaaaggaggagttttttaaacatttggcncccctaaagggggagttttcccaattggggtttcccaaaatgacaggggggggggcctccaagttttttaaaatccgatttgtccggaaatcccttgcccgggtttttccagtttttaacccaatttaaaaaaaaaccctcgggaattttttcaagggcaaaaagtacaagcccctggcccttgggcctaaaaaaacacgttccatgcccccccggttccacaagcccgaggagaaccttaagaccaaaaaacaccaggggaaggagggggtgtcccccctggggaagtacggggtcaaggccttaggggggctttttcaataaagcccaggggggtgaga

SEQ ID NO: 530360 - DNA, 468 bp, Homo sapiens
  misc_feature (387)..(387): n is a, c, g, or t
  misc_feature (448)..(448): n is a, c, g, or t
  misc_feature (467)..(467): n is a, c, g, or t
tttttaatataactattaaaatataattcaggtaccgtatgatttgcccatttaaagtgaacaaatcaatggtttcagtgcattcacagagctcggcaaccaccatcatgatcaattttaaaacattttcatcaccccaaaaagaaaccctgtatccatgagcaggttcctgccatttcctcctcccactaagccctgacaatctacttttttttgagatagagtatctgtcacaggctggagtgcagtggcgcaatctcggctcactgcaacctccgcctcccgggttcaagcaattctcctgcctccagagtagctggggattacaggggatgtgccaccacacccatctaaattttgtatttttagtaggagggcagggttttntctctttcataggatttgcgtgttctgggacatttcatattaaatggacatcttaggatangtgaccttttgtgactggng

SEQ ID NO: 530361 - DNA, 246 bp, Homo sapiens
aggtcagaaagctgagctcaagtgatccgcccaccttagcctcccaaagtgtggggagccactgtcccggcatattattacttttggagacgaggtcttgctttgttttccaggctggagtacagtggctcaatcatagctcactgcagcctcaaactcctggccttaagcagtcctcctacttcagcctcccagagtgctgagattataggtatgagccactgcacctggcctctctattctcta

SEQ ID NO: 530362 - DNA, 568 bp, Homo sapiens
ctgtatactgcttaaatattgtaatagtctcctgatttcgtagagtcttgttaattcatcgttgctccccagacgtgcctcaattgttgtgtactcgaagtccttgagcacgtgttcttgatcagctacattaattcaatcagtgctcactgatatacttgctggagacctcagaatacacaagtgcctctctccacggtgcattctcgagacttccttgatctccagtggtccctagacatttgaccctattatgatctgacaagcatgtcttcagcaatgtgtaccgaactcgaatacgtaatcgtgtacatatctgtttgcctgatgacacatgtatacctcgacaaaaatgatactattccattaaccctttctatacacagataggcccaagatataattttcctaaaaatatggtgcttatgcatccgtcatctacctcggcataaaaccttcaacttgggatatgatacctgtaaataaggataaacagtacaaaatgctgtggtctaggctccactaccgtcattggtttttgtctacttatctggtattatctaaccac

SEQ ID NO: 530363 - DNA, 662 bp, Homo sapiens
gtgcatggtgactcatacttgttttcccagcactatgagaggccgaggtgggcagatcacctgaggtcaggagtttgagaccagcctggccaacatggtgaaaccccgtctctactaaagatataaaaattagctgcgagtggtggtggctgcctgcaatcccagctactcaagaggctgaggcaggagaattgcttgaacccaggaggcagaggttgcagtgagccgagactgcaccattgcactccagcatgagtgccaacggcgaaaagtctgtcccacaaacacccagcaacagcttttgtgcaatgatctaccattactacacctcccttcccttcattttcgctaagcctttgcaatctggggcatattccatacttagaagcatgtcttaatttggactagtcacattccaagtgctcagtcgctccacccggctcgtggtcactgctctactcgcatagcactagtatgtccaacaatatctgctgcgcctccgcaccaggggctacaaccataaccccagcatcttgccagcttgccccctgaccccttcacgctcctccgactattcctacttcccctctcctcaggtcgcctcacaccgacacccccctcttcacctccccccacccccctgaccgccccctccccccccc

SEQ ID NO: 530364 - DNA, 216 bp, Homo sapiens
ggactataggcacataccaccacacccagctaatttttaaaaacatttttagtagagacggcgtttcaccgtattggccaggctggtctcgaacttctgacctcaggtgatccacccgtctcgcctcccaaagtgctgggattacaggcgtgagacactgcacctgggctcttcttggagattttcttgacattctcttttagggtactggctgtg

SEQ ID NO: 530365 - DNA, 227 bp, Homo sapiens
gtatgtcttcagtaagccgtgattttcattctgggcttgtctgtagattttagaccctatgctgcttgaggcaactcatcttaggtggcaaaaaggcaggatggccgggcgcggtggctcacgcctgtaatcctagcactttgggaggccaaggtgggaggattgcttgagctcaggagtttgagaccaacctgggtaacatagtgagacaccatctctattatgaa

SEQ ID NO: 530366 - DNA, 355 bp, Homo sapiens
  misc_feature (22)..(22): n is a, c, g, or t
  misc_feature (322)..(322): n is a, c, g, or t
  misc_feature (333)..(333): n is a, c, g, or t
  misc_feature (347)..(347): n is a, c, g, or t
agaactgctaaggtctaagaangcctaactgaaagattggattcacctgctgggtgactcggatgaaggtagttctcctgctaaactctttgagcttagctgctccccacataggtacacgtagagtggatccctcctaggatgtcttggatggtatgttccacatctcctttaaaagaacttccactgcttccctctgagctctgtactcagccacgcccccagcatacttcttcatgccatttcagaactcatccatagaagagcttgactcttccatccctcttgatgagctcaccacctgactcactgtcccagccancatccacccancatcacgaagtcanctcctccc

SEQ ID NO: 530367 - DNA, 199 bp, Homo sapiens
  misc_feature (30)..(30): n is a, c, g, or t
gtccaggaagggtcaaaggcacaccccctncaaaaggaagttgggtgcagctggggctggcatggacttttctttcaaaaattcggtttttaaaaaaaggcaagcccaatgggttcttttttttttccaatgatttgtaaaaaacattttatgactggaaacttttttggacaacactccaataaacattttgatttta

SEQ ID NO: 530368 - DNA, 335 bp, Homo sapiens
aggataagggagacgtgtgttcatcttcactaatgaggatataataaaggccaggcgcgactggcttatgcctataacctccgtgctatgggaggctaaagtgggacgacgagcttgagcctgggggttcaagatcagcctgggcaacaaagcaagacctcatctctataacaaaaaattaaaaattacccaggtgtagtgatgtgagcctatagttctattaacagctactcgggaggctgaggtgggaggattgcttgagcccaggagctagaggcaacagtgagctatgatcgtttacctgcactccagcctgggtaaacagagtaagactc

SEQ ID NO: 530369 - DNA, 123 bp, Homo sapiens
atccatgctatgacatggatgaaccttgcaaacattatgcttagtgaaaaaagccagtctcaaaataccacgtattccatgatcacagtggtgaaatgtcaatggtacacttgaaggatggtg

SEQ ID NO: 530370 - DNA, 891 bp, Homo sapiens
tgtcggcgcggcaagcgatgtgatggcgggaaccaagaggaaccgggtgatggctttgcagtttcagggctgaaggaagtccatgaaagaagcgaaatagatgcggagccgccagattaaaagctgggacgcgaaagcaacccggaggtggctggaagaaggagcggaaccgggattcccaggcccctgtactttgcaatcgtaatcagcgggaacagctctcaaggacacggcactcccttcttttctgccacgagcactgaaacttctttcagaaaccaagacaactttacgtgccagagcactttggcgcacactgttgatgccttcatttctaagagccagtatactaacacagtggcatcggcacggaaataaggcatattccgggtagaatacacgcggacgggtattggcttgacacctggccggaaccggtggtacaatacacagtgccattcataatttggggggaagggggctcaagcaccaacacacacaggggattcctcctcaatacttgttggggttcttcacacattttcaaccctacaacggtgcaccccatccgtggcataaaaatttctcccttttgttccaacacaatatttccataccccttcgcctgacagcttgaaggatgaccttggcaacaccggtggtttgtgaaccgggttcctcgggcccctattgtggttctattagggacccgtgcttttggactgaatcacccaccatttattgccttggttcaaacgacagctcttcagtttcagaatcttaaagtaccaccacgggtattcatcccaaaaaggcaacatttgttggacccccgttgtcactttcccaattgggattacaaggatatggttccggaccttacgatctaga

SEQ ID NO: 530371 - DNA, 157 bp, Homo sapiens
tgatccacataacttgacacggaacaagttacctagggataacaggcaatcctattctagagtcatatcaacaatagggttaacgacctcgatgttggatccaggacattccgatggtgcagccgcttattaaaggttcgtttgttcaacgattaaa

SEQ ID NO: 530372 - DNA, 1095 bp, Homo sapiens
cccccttttttgtcgttgttccccccccctgggccacctcttctatttgtgtggggggcccccccgttttttccagcactttagatttcccccctttccgcaccaaattggggaagaaccctctttttctccctggatattttctaagggggatttcctcctcttgtggctcctctctgtccgcccccttctcaccacggttttgttgtgtcccttttctacatcttattatttggccccccttcctattttgtttgcgcctcccctctttggcacgtcacctgtccccccccccttcgttttttgtgcctcccgaataacagggggtggtatccctcaatatccccccctctggggggttgccccccccccccttttttcgttgtttaatattctccctcttttccccccccctctgtttatctcaccacactcttctatataacgccctcctctgcgcgcgtagatttttttgttttcgactctgtttctctcctctttaggagaccctcttagcacacacttgttttttctccccgcgcctctcctctttgggggcccccacgccctcacttttttatccccctcgttgcaccacccacctctctttaaccccccctctctcccaccacctcctcgggccccccctatatattttctctttttttgtcccacacacccacttttttctcgactcctcttctcccttcgccccctattgtggagggcctccctttcgccctttttgtttttctccctccctctcttcttttccacactatatctcccacttctctctcacacacatatatctcccaccccccacatagcacaaaatatttttcgtcccccctataacgcccactctctcctttttttatacctctcttttcgcccacaaaccctctctctctcttttttccccgtgatcggggggccacccccggtggagacccctttttcccctccttgtgtgcgccagtgtgcgcgctcccggtgctgtattatctttctcccccccttctctttttctctttattatcccccgtttttctccctttattgttacacaccaaaattccaatgggcccttta

SEQ ID NO: 530373 - DNA, 487 bp, Homo sapiens
  misc_feature (241)..(241): n is a, c, g, or t
  misc_feature (286)..(286): n is a, c, g, or t
  misc_feature (322)..(322): n is a, c, g, or t
  misc_feature (342)..(342): n is a, c, g, or t
  misc_feature (373)..(373): n is a, c, g, or t
  misc_feature (375)..(375): n is a, c, g, or t
  misc_feature (380)..(381): n is a, c, g, or t
agtatttagcaactttccatgttttcaatcaggtgggggtgggactagagttaaactgccatttattgatttctgacacaggcacagaatgacctgttttctccaagaggctcaatcttgttttcaagaatcctctctaccatataagatcctgcagacaaataacatctagtctgttgttctaaatgtctgagactagtgaacttttattcagttcaagtttctgttgaggcccaacagncaaagctctgttctagtgactctgaggggaacttggtgatagtanccagtacctgctctgagggcttcaagaggagtctantcctaatagaacctgtgctntctataagtgacagcatcaagagcagggggngncctgnngtggtcactcctgtaatctcagcactttgggaggctgaggcgggcagaggacgaggtcagcagtttgagactagcctgggcaacatggagaaaccccgtctctact

SEQ ID NO: 530374 - DNA, 187 bp, Homo sapiens
tattattaatacttaagtgagcagtggcttaaaattgcagatataagagaacccatacttttacaattctggcataagccgttcatctgtgtaaaaagtagcttcagatgtcactagaattattaaaaagcccaatttaaaaactgcaatataaattgaagtggaatgttttccacacatgtaaact

SEQ ID NO: 530375 - DNA, 797 bp, Homo sapiens
ccatgccattgtggctcggctgggtggggggctctgcgagacacctcacagagatctcgcgtcccgagcgtctcacctagcataatgcgtgctgccacaccgatggaagattcgatggacatggacattgatgccccctgaggccccagaacatatcttttcggattgtgaactaaaggccgacaaacgattatcactttaaggctggataatgatgaaaatgagcaccagttagtcttaagaacggtcagtttaggggctgtgcaaaggatgcgtggcacatgtggaagcttgaggcacatgacacttacgaaggcaggtccaattaaagtagcactggcaacttttgaaacatgtctgtacagccaacggttatccctctgccggcggcttgggaaataacaccaccagtggtcttaaggttgaagtgtggttcagggccagtgcatataagtggacagcaccttagtagctgtggaggaagatgcagagtcagaagattgacgaggaggaggatgtgaaacttcttaagtatatctggaaaaagcggtctgccccttgggagggtggtagcaagggttccacagaaaaaaagtaaaactttgtgctgatgaagatgatgaccgatgatgatgaacgaggatgatgatgaagatgatgatgatgatgatttgatgatgaggaagtggaggaaaaaggggcggtgaagaaatttatagaagaaatccagcaagaatggcaaagtcaattcagagtggaaagtcaaaccttttaaccagataaaggagaacttagaa

SEQ ID NO: 530376 - DNA, 367 bp, Homo sapiens
  misc_feature (357)..(357): n is a, c, g, or t
agcccaggtgcactgctcacacccccacctgcattttgaagtcatattattttttgttttgttttttaagacggtctggctctgtcgcctaagctggagtgtggtggcacgatcacagctcactgcagcctctatctcctaggctcaagccattttcccacctcagcctcccgagtagctgggactacaggtgcacaccaccacacctggctaattttttgtatttttagtagagacgggggtttcttccatgttgcccaggctggtctcgaactcctggactcaagcaatccgcccaccttgacttcccaaagtgctgggattatgggcgggtgtgagccattgcgcccagccttngagtcatgtt

SEQ ID NO: 530377 - DNA, 109 bp, Homo sapiens
ccttggcacgtggcagcctatacccttaactgaaattgtctttggtccagcctgcagctccctttgcagggtttcccttcttgtagaagggtgaggagggtagagtttg

SEQ ID NO: 530378 - DNA, 82 bp, Homo sapiens
ggtccgactctagaggatccccccaattaaccctcactaaagcactagttcactcccccccccccgctgctggaaatgctga

SEQ ID NO: 530379 - DNA, 1443 bp, Homo sapiens
gtcgttgttgcagataatccgtggcaatcgagctgatgggacttgctgagaccgctcagactcaccgggaacgtttgggaagatctttccagacatctcggagatcagagagacatcagacgtcaggcagatgaggaggactatgaagtacgactggatcgaggagagggcctacagtattgacgaaagattgcagccgactcgccgcagggcgttattaccctgcgatcgacgatgcattgatcgcagaagtgactcacgaggggcgcagtttgtctctgtatcgacgcgtatcgcggtcgtggtgattgctaagtggcgcctacagtgcacgtgatttcccccacaggaaaagagtgccaagtacatctgcatggactcaacagaatagcacttgacagataagctaatgaagaggtcacccaagatgaacctcgtcgatgggttcgcatacgattgaggctgggcaaggcctgagtggctagcgtatctgccttgggttggccctcaatgagttctacagaagaccacatgcaagtaaaggattggctaggagctagccaagcgaaatagaccctctttgtcgagcccgggcgtgactatcggggtaatacggtgggccctacacgactgtgttggtcaatctatgacccgccaagggggtagctatgcatgggggcacttgggcgcctgtaacggggtacgcgcgccccaaatccacacaacatttcctatggctgtgcagcaagacgcgaaagtccttggaaaggtcagtccgtcaccaaaagttggacatggctccgaagcaacgtatattccagtagtacggggtaatggtttacgggttgggaacaccgtgagacatatggggccaaggagggcggctggagaaggccttagagagcctagacaagggacaggccttcgtggtaggggctagcggctttgggggtgacccatactcaacattggttttcggcttgttggctttcccgcaccgtcctttcttcgtggccacgttgggacctttattcgatacttcatctagtgcgccacgcgtcgcgcatggggacaggctcttcccccctttgacccccaagacgtggggggggacattcccgcgccggtcactttcaagcgaggcataattgcccgcgccattcgggcgcaaccccccggcaaagacgccccaacgtcgtgttaccaaaagggaaaggcctatcaaggagggtagggtgggatacccaactaaaatgctctggacgccagcactgggcgactgggctactcgagcaagagaggggagcccccgccgagaaccaccactctgccacgcgacttaggggcccacacaccatgcgaagaagaccacaccgggggacacacatgtgaacgcagagcgcgacacaaagcacgagcgccacacggcagggcacagacgcc

SEQ ID NO: 530380 - DNA, 841 bp, Homo sapiens
cgcccttttttttttgtggtgggtcaattctggggtaaatcagattctggtattcatacaaaaacttggtttttctctgacaaactggacacataaaaacaaatttccaaatgtggacaggaacttaaatttgtggtggagatgccccagggtctgggtgagaactttaaaaaaaagaaaaagatcccagcttttgagtcttcacaaaacacacagtgggattgggggcaagtgaggggtggacagggacagggcccagccaggcgggttagcgtggcagcagttcttctttcatctcttggaaagaccttcatgtggaggggtttccggggatttcaggggtgcccaagaaaaagagtttcaggggctttacaacgtgggtgcaggcttctccattttgtggtatctcctctggggtgagttccaacaagaaagttctctgtacactagcgtgctccaaaagagaggccttcgaggggatacctcgaggtctcccagccttctttagcgcgaaccccttatcacacaaacccgcgggataaagcttccttcgaccttcgggcgggggccaaaaagttctcagtgtttatacttccgcttcataccccaagttatagcgtgggcacttcgggggtccccttcgaagaaaaggggggtgcccaactgtgccgtggaaggggccccccgacaaaaggggtcccaactctcatggggggtcatccaacacaggggacgctctacgcgaacaaagagaagctgagaaccgccaagaattggggggcactcttcttgaagacagggtctctgggccccactcggggcctatagggccaccacgggg

SEQ ID NO: 530381 - DNA, 1865 bp, Homo sapiens
aaaaacatgatgacaacaagaaacagaatttacatgcagcagtaaaagactcattggaagaatgcgaagtacagactaatctgaaaatttggagagaaccacttaatattgaacttaaagaagacattctatcctatatggaaaaattatggcttaaaaaacacaggagaactccacaagagcaactttttaaaatgctatcagatacgttcccacatccacatgaaaccactggtgatgcacagtgttctcaaaatgaaaacgatgaagatagtgatggtgaggagaccaaagtacaacacacagctcttttattgccagtagaaacattaaacatagagagacctgaaccatctctgaagatagtcgaactggatgatacttatgaagaggaatttgaagaagcagaaaatattgtgccttacaaagttaaattagctgatgcagacagtcaacgaagttgtgcttttcatgattgtcagaagaatagctttccatatgaaaatggcatccatcaacatcatgttttcgataagggaaagagagacttcttaaatctttgtctgagaaacagctctacttattataaagataattcaaaaggagaaacttcaaacacagattttgacaacatcgtggatcctgatgtgtattcttctgacattgaaaaaattgaggaaagcacctcctttgaaagaaatttaaaggagaaaaatataggtttagaaagtaatcaaaagtctgatgattcctgtgtatcacttgaaagcaaggacactttgctaggtagagatttagaaaaagctcccattgaggagaaattatctcaagacatcaaagaatccttggaattgagcaatctgtataagaggccaagctttgaagaatcaaaaactacaaagtcatcactgttgttacaagaaatagcctgcagaagtaagcctataacaaaacaatatcaaggacttgagagattctttatttttgatacaaatgaaagactcaacttacttccttctcatcgtttagaatgcaacaattccagtactaggattacacttgcagaagacagagaatggattccagaccatagcttaagtgaatatgctgataatgcaattgtcttgggtgttctgcagggtgctcagagtccatcatcaagtagaaaacagcaaaagatgggtcagaaatcacagagaccttcaacagcaaattttccactttccaactctgttaaagaaagctccagttgcctttcatcctctcatcctcgatcaagaagtgcagctgctcaatcatcatctagagctgcttctgaaatttcagaaattgaatatattgatattactgaccagaatgagctttccttagatgacactactgatcaacatactttagacaatttggaaaaagaattacaagtgctgagatctcttgcagatacttcagaaaagctttacagcttaacctcagaagagttcccagatttcagcagccaatcactgaatataagtcagatttccacagatttccttaagacctcacatgtgaggggtccctgtggagttgaggaattgagctgttctggaagagataccaaaattcagtctttgctgtcactttctgagagcagtacagatgaggaggaggaagattttctcaacaagcaacatgtcatcacactaccgtggtcaaagagtacttaaagattatttgttcattactgtttccattttgtacccagagtaaagcaaacaactgagaaaagtaaccaagtgattacctatccaagtgctggagattttgattactaatgtctttgatgtttcaaggctacaaactaataaaagtaaaattataagttc

SEQ ID NO: 530382 - DNA, 812 bp, Homo sapiens
  misc_feature (470)..(471): n is a, c, g, or t
gttaaggagctgggagaataagacagaaaataactacattagatacttcagaaaagctttacagcttaacctcagaagagttcccagatttcagcagccaatcactgaatataagtcagatttccacagatttccttaagacctcacatgtgaggggtccctgtggagttgaggaattgagctgttctggaagagataccaaaattcagtctttgctgtcactttctgagagcagtacagatgaggaggaggaagattttctcaacaagcaacatgtcatcacactaccgtggtcaaagagtacttaaagattatttgttcattactgtttccattttgtacccagagtaaagcaaacaactgagaaaagtaaccaagtgattacctatccaagtgctggagattttgattactaatgtctttgatgtttcaaggctacaaactaataaaagtaaaattataagttcaanngcttattcttccaatgatatattatatgtcaaccactaatctatattgcagattatgttagtaaaatatggtgaatttgaagaaataactgttacaactgtgtctataaaacctactatagggcagaacatgattatacttaaagaaatatttcatcgtccaattatattttaaataattatgtcatcaacaagagtgtgcatttgacagccaagtcacactagttagtatcatcaattgaacctataattacactgtttattttctggtttttaacatttatagaagttctggtatcttcaaaaatttgcaataaaagaaaaaaagaggaccaaaaaaaa

SEQ ID NO: 530383 - DNA, 249 bp, Homo sapiens
ttcagaggttcccatacaaaaattagctgggtgtggtggcattgtgcctgccgtctcaactactcaggaggctgaggtgggaggatcacttgagcccaggaggttgaggctacaatgagctgtgatcacgccactgcattccagcctgagtgacaaagtgataccctgtctcaaaaaaaaaaaatcgggatggcgatcaacatgcttagggagaaatactaaccatgggtaaggacaccggaaataagg

SEQ ID NO: 530384 - DNA, 799 bp, Homo sapiens
gccacattggcttatattgtctatgcgttcttctggtgtgtggtgttctttaccggtgggtttccgtttgtgcccgcccgtgtttacccccgcttttaacttataggcatgtgccccccccgcgtttttacctaattggtcgaatccaggccttaccggaatctccaggtccaatcgtaaagaagcccccgtcctttatctctaacctcatccagaagccaacggcccaatcatattcagaccggcttcgaaaatttcagaaattgaatatattgatattactgaccagaatgagctttccttagatgacactactgatcaacatactttagacaatttggaaaaagaattacaagtgctgagatctcttgcagatacttcagaaaagctttacagcttaacctcagaagagttcccagatttcagcagccaatcactgaatataagtcagatttccacagatttccttaagacctcacatgtgaggggtccctgtggagttgaggaattgagctgttctggaagagataccaaaattcagtctttgctgtcactttctgagagcagtacagatgaggaggaggaagattttctcaacaagcaacatgtcatcacactaccgtggtcaaagagtacttaaagattatttgttcattactgtttccattttgtacccagagtaaagcaaacaactgagaaaagtaaccaagtgattacctatccaagtgctggagattttgattactaatgtctttgatgtttcaaggctacaaactaataaaagtaaaattataagttc

SEQ ID NO: 530385 - DNA, 2210 bp, Homo sapiens
  misc_feature (1868)..(1869): n is a, c, g, or t
aaaaacatgatgacaacaagaaacagaatttacatgcagcagtaaaagactcattggaagaatgcgaagtacagactaatctgaaaatttggagagaaccacttaatattgaacttaaagaagacattctatcctatatggaaaaattatggcttaaaaaacacaggagaactccacaagagcaactttttaaaatgctatcagatacgttcccacatccacatgaaaccactggtgatgcacagtgttctcaaaatgaaaacgatgaagatagtgatggtgaggagaccaaagtacaacacacagctcttttattgccagtagaaacattaaacatagagagacctgaaccatctctgaagatagtcgaactggatgatacttatgaagaggaatttgaagaagcagaaaatattgtgccttacaaagttaaattagctgatgcagacagtcaacgaagttgtgcttttcatgattgtcagaagaatagctttccatatgaaaatggcatccatcaacatcatgttttcgataagggaaagagagacttcttaaatctttgtctgagaaacagctctacttattataaagataattcaaaaggagaaacttcaaacacagattttgacaacatcgtggatcctgatgtgtattcttctgacattgaaaaaattgaggaaagcacctcctttgaaagaaatttaaaggagaaaaatataggtttagaaagtaatcaaaagtctgatgattcctgtgtatcacttgaaagcaaggacactttgctaggtagagatttagaaaaagctcccattgaggagaaattatctcaagacatcaaagaatccttggaattgagcaatctgtataagaggccaagctttgaagaatcaaaaactacaaagtcatcactgttgttacaagaaatagcctgcagaagtaagcctataacaaaacaatatcaaggacttgagagattctttatttttgatacaaatgaaagactcaacttacttccttctcatcgtttagaatgcaacaattccagtactaggattacacttgcagaagacagagaatggattccagaccatagcttaagtgaatatgctgataatgcaattgtcttgggtgttctgcagggtgctcagagtccatcatcaagtagaaaacagcaaaagatgggtcagaaatcacagagaccttcaacagcaaattttccactttccaactctgttaaagaaagctccagttgcctttcatcctctcatcctcgatcaagaagtgcagctgctcaatcatcatctagagctgcttctgaaatttcagaaattgaatatattgatattactgaccagaatgagctttccttagatgacactactgatcaacatactttagacaatttggaaaaagaattacaagtgctgagatctcttgcagatacttcagaaaagctttacagcttaacctcagaagagttcccagatttcagcagccaatcactgaatataagtcagatttccacagatttccttaagacctcacatgtgaggggtccctgtggagttgaggaattgagctgttctggaagagataccaaaattcagtctttgctgtcactttctgagagcagtacagatgaggaggaggaagattttctcaacaagcaacatgtcatcacactaccgtggtcaaagagtacttaaagattatttgttcattactgtttccattttgtacccagagtaaagcaaacaactgagaaaagtaaccaagtgattacctatccaagtgctggagattttgattactaatgtctttgatgtttcaaggctacaaactaataaaagtaaaattataagttcaanngcttattcttccaatgatatattatatgtcaaccactaatctatattgcagattatgttagtaaaatatggtgaatttgaagaaataactgttacaactgtgtctataaaacctactatagggcagaacatgattatacttaaagaaatatttcatcgtccaattatattttaaataattatgtcatcaacaagagtgtgcatttgacagccaagtcacactagttagtatcatcaattgaacctataattacactgtttattttctggtttttaacatttatagaagttctggtatcttcaaaaatttgcaataaaagaaaaaaagaggaccaaaaaaaa

SEQ ID NO: 530386 - DNA, 214 bp, Homo sapiens
ggcccgaggacgtatggtttccccaaagccgagttgtgtcacgtggcaggtttacgtcaatagtccctttctttgttcctccatttgcaagtgtttttttggggcagactcccctccacctcatgtacttgctatattgaggatgaagttttttatggtgggcccctcaatatagtgccctgtagtgaatgtaaataaaaacaaaaaatttgga

SEQ ID NO: 530387 - DNA, 101 bp, Homo sapiens
tgtcgcccctctctgctgctccgcccctctctgctgctccgcccctctctgcaatctccgcctcctgggttaaagcgattctcctgcctccgcctcctgag

SEQ ID NO: 530388 - DNA, 399 bp, Homo sapiens
gctccgaccccttataatgtgtgcccagtggcgagaatattataaaagtaatattcataattcttttttattttttttgagacagagtctcactctgtcaccaggctggagtgcggtggcatgatctcaactcactgcaacatctgccttccgggttcaagcaattctcctgcctcagcctcccgagtagctgggactgcagatacacaccaccatgcccaggtaatttttgtattttcagtagagacagggtttcaacatgttggccaggatggtctcaatctcttgacctcgtgatctgcccgccttggcctcccaaggtgctgggattacaggcatgagctaccatgcctggccttctcatgtgttttctgattaaggctcttgacttccaaggct

SEQ ID NO: 530389 - DNA, 242 bp, Homo sapiens
  misc_feature (125)..(125): n is a, c, g, or t
  misc_feature (154)..(154): n is a, c, g, or t
  misc_feature (161)..(161): n is a, c, g, or t
gatcgtagatgttaaccaaatctacaaaatccactactcccccgttatcaacgggatacgttccaagacccccagtggatgcctgaaactggctaatgctgaaccctacatatactatgtttttnctgtacatatatatgataaagtttaaatnataaatnaggtacagtaacaacaataacagtaaaacaacagttataacaatatactgtaataaaagtcatgtgaatgtggtgtttctc

SEQ ID NO: 530390 - DNA, 466 bp, Homo sapiens
  misc_feature (27)..(27): n is a, c, g, or t
  misc_feature (117)..(117): n is a, c, g, or t
  misc_feature (155)..(155): n is a, c, g, or t
  misc_feature (167)..(167): n is a, c, g, or t
  misc_feature (178)..(178): n is a, c, g, or t
  misc_feature (201)..(201): n is a, c, g, or t
  misc_feature (270)..(270): n is a, c, g, or t
  misc_feature (278)..(278): n is a, c, g, or t
  misc_feature (321)..(321): n is a, c, g, or t
  misc_feature (323)..(323): n is a, c, g, or t
  misc_feature (335)..(335): n is a, c, g, or t
  misc_feature (367)..(367): n is a, c, g, or t
  misc_feature (369)..(369): n is a, c, g, or t
  misc_feature (458)..(458): n is a, c, g, or t
aagtatgtgggaaataagggaggaggnggaggtaaaagaggggagaggggagggagcagatggaagaataattaagtataataggagatgaataaggtataaggtaatggagaaggnggtgaggaaggaagaggaagatttgaagaggtgtgttntaggtaagtggnttaaaagaatnaagttggattaattggaatgggnaaaatggggaataaaatggcaaaaaatataatgaaaaatggatataaaattattatttatgatgtgttnaatgatgnatgaaaagagtttaaagatgaaggtgaaaaggtagtatattananagaagatgttgntgaaaaagatgaaagaattattaaaatgatgnanaaaagtataaatgaaatagaagattattaaggagaaaatgggattataaaaaaagtgaagaagggataattattaatagattaaagaantattgata

SEQ ID NO: 530391 - DNA, 255 bp, Homo sapiens
  misc_feature (191)..(191): n is a, c, g, or t
  misc_feature (217)..(217): n is a, c, g, or t
gtgatctagaggatccgtatgatctgtgctcacaaaaaaaaggggttcacaacaggcacaatatggcacaacagcacaataatgaatggcaaatgacaccgggcctctccaggctgggggacagggaccactaggaggagccaggagttcaaaatcagaaagcttgtgcccacttgttcatcaactccagngcaatcttaaccacataaatccaggntttccagaaccatcgtgacttttcaagaagacggccag

SEQ ID NO: 530392 - DNA, 190 bp, Homo sapiens
tagctggtaccggctaaaaagaatctgggctgggagtagtggttcactgtaatcctagcattttgggaggccgaggcgggtggatcacctgaggttgggaattcgagtctagcttggccaatatcatgaaacccggtctctactgaaaatacaaaaattagccaggcgtggtggcatgcacctgtaatcc

SEQ ID NO: 530393 - DNA, 716 bp, Homo sapiens
agcggatggttggatgaacacacatgtgaggggatctgaaccatctacaatcaatccatatgtgaccaatggaggagaagcaggcccaaaagacgaaggaaccctcataagaagatgagcctcagcagaaggagatgcgcgaagcccagtttgtccttaggaggcatgagtcgagagggcagaggctactgactccagttctggttgagaagacagacagtggacaatgccaatgagaaatcagaataacccccagaaagaccaaaagaagctctctgacaaagatagcaggtatgacaccaaagatcaaaggcctggtggcaggggtcacccctgtgtgcgtcgtggcactgtggcacgcagccctcgagtgcctgcatcattcagtgactgggtggctggctgagtactggtccagaggattctagagagaatgaggcagtgcacgggcatcagcctaagagggcccgttcgtcccggcaagggaagtgcggcagcagtcagcactggctagtacccaggcccgaaatgtgacacacttgcgcagaacgcgtattagccaagtgtgctcaagtgcatgttcggcatcactccgaggcattacctgggaggatgcctgttcctgtgcgttacacaggtgcagtcaatcaaagggacacagtacagaagtcaccaagccacaccaagctggctagtcatccatgaagagagaatct

SEQ ID NO: 530394 - DNA, 270 bp, Homo sapiens
  misc_feature (247)..(247): n is a, c, g, or t
ctcgggtcgatctagagatccccttaaatgggccagaattattctgtatacaccataatagtgaatacattcattgtacatttgtccaaacccacagcatgtacaacaccaagagagaaccctagtgtaaactatggactttagcgtatgatgtgtcaatttcggctcatcaactgtgacaaacataccactctggtgggggatgctgatgacaagggaggctgtgcctgtgtgggggaaatacatnggacatttctgtgcccatttcaa

SEQ ID NO: 530395 - DNA, 224 bp, Homo sapiens
ctccaagtcccaacaacgtgtacggactcagctgctgtccagctcacagcggccctggcaggaccacaaatatcctaagacaagctccccaggcccaagtcaggcctcggggtggcctatccaggctcagcacctgctactacgatgacatctgcaggcccccggcccagccgggggactgctatcggcccagctcgggcctagcggcggactctgcaggcccc

SEQ ID NO: 530396 - DNA, 437 bp, Homo sapiens
atgtagtcccaatgcactgtgaacagcctcacctctcgtgaccgttcagcagctgatacaggtggcactggggctgtgaaggtacgctcagcgcactgctcgtggagtggacaggtatggatacggtgtagttgagcacggctggtggtgtaggtgcctcggtcgatctcagacatgcagggctttcagagtctgagtgccagtcgtgatgcagtacttggtactctagctacagcacatggcccatgaagctgaagtggcgatagatgatggctcgactggtcttcgctcacggacaggcctcgttcagcatgactcgattagtcctcatcaggtaagcatgacatctggaggctggtctcgtaatacgtgactgacagtgagccagccaccatcagtcagcattcgcgatggagtatatcaagtcaatgtgctcg

SEQ ID NO: 530397 - DNA, 103 bp, Homo sapiens
gtccgtgtcacgtaaccatcacaggaagatgtctccaggtggttcccacaaccacctccttcagctccacgatgttcggatgacgcaggcggcgcagcagcgt

SEQ ID NO: 530398 - DNA, 158 bp, Homo sapiens
tcgagccggtaccgaattcgacaagtggtgcactgtggaaatcattgtgtccgggctgggaactgcttcagcgccctttacagagcctgacgtaacaagccggggagctgattccctagggcttcatctgatccataagctggcaactggtcgagatt

SEQ ID NO: 530399 - DNA, 233 bp, Homo sapiens
ttaggtactcaagatcgtctactcgcagtgggggtaggtggagtgtcgtgttgttgttccacctgcaggatgatgaagtcctcttctatgagatgactgagctcgctcagccatcttgtcctcttcacctgtaggagcttcttggctgcccccatcttcccaacatgtgtactattctgcgtagatgctagaccaaacagcttcccaggtttcgtcacttgtcgaggctagga

SEQ ID NO: 530400 - DNA, 153 bp, Homo sapiens
attcttatctaattctcagatcaggttttgaaagctttgggggtctttttagattttaatccctcctttctttatgggccaaatatgtccaaaaaaaaaaggtcttatatttttttacccaaatttataaataaattttgaaccccttctgta

SEQ ID NO: 530401 - DNA, 1078 bp, Homo sapiens
  misc_feature (890)..(890): n is a, c, g, or t
caacgtattcgaggaatcacaatataccaggagctacagatatgtgccttcatagacgtggacaattctaacttgacacagatcagtggaccgtgttgacccgatgaggtcaggagacgttgatgatgatttggggctgaaatgctcctagtatataggctgcatggtgtgaagcgattcacgtcgatcctgttatcgtacacaaatggaataagctccagtcaggctatgagactctgtcaaacgtgggcgagatggcgagaggatcggtgggaacactcttgattcaattgactaggtagtgcccacacacatgtgccgtgctacccgttcctgtcctgaattgataggagatatagcattgtctcgatctcgcaggggagaaacgcaattacccacatggacatagcccccagtcagccagtcatccaacagttcagcagttcttggatgagactgacagcgtcagatctggagcatgcctgtgttgatcagtaatgaagagtttttgccacctgttggatatggtacttcacccaatacagattggtggatcatctagtgggagaccatcacgtcagtctctcgactctcagggaattgagagcaaggtgtgattccaagagtcgtgattgaccagccttcgctggatacctgattcttgaagtgcctgtgaggtgccatcgctccacatgtgcccttggagcggtacggagacgggatccgtatgacagtaaaatacttagggttaccccgcagggggtaagcggccatggtccatgcagttaggcgtgagcaaaatgccacacgtattgtgggcgcacttgggaactcactctatgttgcagcgcttcttaagaatggttgcagcatgggtggagatccttaanatattggggagaaaatttggcaaatggcttacgcccttaaatgggaaacgaactcttggtgcccattatggtggggggttgaactgttcgatgcccggactaggatttgcacatttgtccattttagaaacggcaaaccgacaccaaaagtgtgagatccaagaagggtgaaaaagctcaacggaatg

SEQ ID NO: 530402 - DNA, 395 bp, Homo sapiens
cgtcctaggtttgaagcgacgtctaggtgggaggatctcttgagcctgggaggcagaggttgcagtgagctgagatcacgccactgcactccagcctgggtgacagaagactgaaaccctgtctcaaaaaaaaaaaaaaaccacaggcggggtgcgcgggctcttacctttattctcagcatttaaggaggggtgggaggtggttcatttgaggccaggagtttcaaaaccagcctacccaactttggtgaacccccattctctactaaaattacaaaataaaaattagctaggtgggcgctgtgtaatcccagcatatgtgggaggctgaggcttgagattcgcttgaacccaagaggaggagttcacagtgagcgagatcaagccactgcact

SEQ ID NO: 530403 - DNA, 249 bp, Homo sapiens
  misc_feature (219)..(219): n is a, c, g, or t
ttcgatgtgtgtcagagagggtgaataacttgcccacggtcacccagtcacctcatgatagggtatagcgcggtgtggcgtcgcgaggctgcctctccactgcgctgtgccactggactgcgccctccatgccttcagagtctcatgcttctgtcctgggccctcctgggtttacctttgtggccgtgagcaccacgtggtcatccctggtagcagggncggggcccagggactggagttcgagtatcc

SEQ ID NO: 530404 - DNA, 256 bp, Homo sapiens
  misc_feature (49)..(52): n is a, c, g, or t
  misc_feature (55)..(55): n is a, c, g, or t
  misc_feature (60)..(61): n is a, c, g, or t
  misc_feature (66)..(66): n is a, c, g, or t
  misc_feature (69)..(70): n is a, c, g, or t
  misc_feature (72)..(72): n is a, c, g, or t
  misc_feature (81)..(81): n is a, c, g, or t
  misc_feature (87)..(87): n is a, c, g, or t
  misc_feature (89)..(89): n is a, c, g, or t
  misc_feature (95)..(95): n is a, c, g, or t
  misc_feature (115)..(115): n is a, c, g, or t
  misc_feature (128)..(129): n is a, c, g, or t
  misc_feature (217)..(217): n is a, c, g, or t
tgggtgtgagatgagagctatgagcgcagcacagggaggaggtttctannnnaancagtnnactgnaanngnacaacactncccagnanggaaangggaactgtgtttacctaantctctgaaaaganntgtgtctacatgacaacaagcttggaagtttggcttgatccagcagtctataatatctatgtgtacgattttctgtctttgagtgttntttgacatttattattaacaataaaagctgagtgaaatg

SEQ ID NO: 530405 - DNA, 104 bp, Homo sapiens
tgacctactttccacaggtgattgcattgccactttggctgcctgttataatacagcaggtgttcaaatggggcagtgaagattcttgaaagtgcaagcagtga

SEQ ID NO: 530406 - DNA, 443 bp, Homo sapiens
tacaggaccccgcgcggctgcgcacgggatgacaagaagggccccctggaggaatggggatgggacaaagagcaataacaggggtgcgcttcctgcgatgcccagcagccatgaccgtcatgcatcttgccgagtttctccgcctacaagcatggatgtgcccagcccagtacaacgctggaggttctgtaccaggcacgagccactgaaggcactactacaccctcatggacttcgcctacgtctacccctggcggcggaacgggcctctccccctccagtaccgtgtccagcctgcctgcaagccgctcaccctagtcctcggcgcccaccccctccgagggcatccacaccagcggggcgtccgagtgtgagtcagtccgccacgaggctcccagccctgccaccctgcctgccacctcctcctccctgcccatcccagc

SEQ ID NO: 530407 - DNA, 275 bp, Homo sapiens
cttcttctcgtctcccaccccagcttcccggcattggaagaagggaccctcctctttcctgtctttggccacccaaatcctggaattcgaaagggtttgaaccgacccgaagttttcagcagcgcacggggtccccagctaatcgacgccgtaagtagcaattactagacacgcattccgccgccgctttctctatagcggcaattccccagatttctcgagctgctactacgaggcattactaccacagaacctctaagaacttcttctgagta

SEQ ID NO: 530408 - DNA, 154 bp, Homo sapiens
gaaaacaccccgcccccccgggggttttttttttttcccccgggggggttttaatttttttttttaaaggggtttttttaaaacccccctttttaaaggggggggggttttaccccctttccccccccagggggaagttccccaaatgtgccca

SEQ ID NO: 530409 - DNA, 100 bp, Homo sapiens
ttattgcgataacgtcaagctacctggcttgttctgaccgcaaacgcaagactatgcaaccgtcgagaggtgcgctcggacgctagggaatagctggatt

SEQ ID NO: 530410 - DNA, 371 bp, Homo sapiens
cctagtcgcaagctcattcctgtcactttggtgtacatgactcgataattcctgtttatgaccacaactaaaccaatattagaaggaagtgcttgcacttgtattctccgatacttttgctctgcaaggtgaacaggcaagaacagcaaggagtgtatatttaaaagaaaagagcaccttaactacgtaccaaaacacaattcttttgatctaatgattaatttgtgtgtgtcagaatatttaccaaccagaaagaccacataaggccgggcacggtggctcgcgcctgtaatcccaccatgttacccaggctggagtacagaagtgcgatcacagctcactgcagcttggatctcctaggctcaagctgc

SEQ ID NO: 530411 - DNA, 233 bp, Homo sapiens
tgttagttcagtgttttaatctgacgcaggcttatgcggaggcagcaatgtttcatgttcacttcatactacacattagttcttctcatagggtgcatagattggtccaattgggtgtgaggcagtcagttatatgtttgggatttttcaggtcagtgggtgttgagcttgcaacgctttcttaattggtggctgcttttaggcctactatgggtgcgcaatgagagatttgt

SEQ ID NO: 530412 - DNA, 101 bp, Homo sapiens
aatagaccagatgttattgaatccattgattcacaggtctttacagggaagcacgtcctccattagtatcccgcagacgatgagatatatagcacaagtta

SEQ ID NO: 530413 - DNA, 122 bp, Homo sapiens
tctcgacgtagatatagatgagatgatgtcattggatcgggggtgctaaatgcaatgaccaatatccttataagaagaggagacgtggccgggcgcggtggctgacacctgtaatcccagca

SEQ ID NO: 530414 - DNA, 1324 bp, Homo sapiens
agcctctggtgatcgcaattggcggcggtcattgctgtgtcctgccaccttgtttgtaccccgtgtgtttcgtttacgctgtcacaagcgcaatgccgccctttttttgatggggggctctcgtggaggcttctttcgtgcgctccgtgtgggctaacaccacgccgggggcccccccagctgtgcccactggtttttattcttaaagagggcccccttattgggccgtccctatgttgtatgggccctctttcgttgtgaaagatgatacacggtgtgatcccagacccgctttggatggttgtggacccctcgctggggaaccagagggtgaaatttattggagagagaccgcacccctcccccagaattcccgcgtcttaatttcaagggttcagcaagacccctttctgtttgtgcccctggaagaaaatacttgtgttgggggaaaagaattccccccacggagagtcctaaattggaaggcattgaaacctctggtggtcccccaataatattttgaaggaaaaagcttgggagacactcaattaattggggattttctttcgcgtctctaagattgtagtggggagatccccacggtcccacactggcggttctccccaataagaaggttttatatgccgcttttgtgacaccccgttttgggtaacacacaagagatggccacgccctccacggaaaggcttggttataaccctcgtaatataataagttcactgggaaattttcgtgttctggggaaaacccacaatatttggtggtcttcgcactttctcacagttggccacacccaatataggctctcttttgtgggggcctcctatattccctcataagaagtgtaaacccccaaggagaccacgaatgttcttgtagaaggaatttaggcacacaagtgaacacacgagaggggttcttacccacgagacgtccactctttataacaccacccccaccccggattgacccacagagaaaaaaaccacgaggctctttgctctttcttgagaatatgagagattcacccacaacacagcctggcccacggtataaaagtgtctcgtttgtaacgcacacccttggcccaatactggggaccacgaaagaggattttatgagaaaggcactttatgtcagctttgggaaactggagacgagtgaagaagtttaaagattattgcgttcacattcacttttgatgagcgacgatggtgctgtcaaggctaatggaaagaaaatgaatggccaagacttggagggagaaaatattgaaattgtttttgcccagccccccgatcca

SEQ ID NO: 530415 - DNA, 126 bp, Homo sapiens
cctaaggcgatttatcagctttaaaagactttcaactgaaatcaattacatttaagatagacatattatatagaaattacctatagctctttaaaaatcctatgacattaacatggtggtataggt

SEQ ID NO: 530416 - DNA, 807 bp, Homo sapiens
  misc_feature (21)..(21): n is a, c, g, or t
  misc_feature (23)..(23): n is a, c, g, or t
gaggtttgtggcattttctananaaaaaccgtttttctccggtcggcgccagcggggagtggggtgattaggtgtgacagtaaagctgaagcggggctgcatcgtcggacgtgggatgatatttcatatgttctctccggaacacatgagcaaggaacagagccagggaccctactgtagcaaactgaagacaagaactttttccccaagaaaaagtgtacagacagttggcagaggagcctgctttatttaacaggggcctggaatgtgaacagccactggggtacaggctccggagaccaacattcacaggctaacaccccttgacgtcacacacggaagcttgatattttttgtatgggggtagaaattatatccaggccaatattagagactatgctgtggtacctgctggatctatgatatgggagggtgtaggacactgatttgaaggggaattgctaattgtagggctgaaggatgatgatctgtgttggcattagagaggcgttaggagtctgcttgtggaggaagggaatgtaactttcagtggtcgggagagtctgttcgtgtgtgggccgcatagccggcccattcaccgagggttaatactatagcttagttcctcaaccgtgtcgcgatttttccgcggcgtatgcggtagatccacggaacaagaataccccgattaccccgcacccacggtagaaaagcgccgagattacgatatagcgcgcaggagcgattaggtggtgggtttcgcgtggggttgatcgtccgcttttttaaggatgtatagccgcgccg

SEQ ID NO: 530417 - DNA, 306 bp, Homo sapiens
  misc_feature (298)..(298): n is a, c, g, or t
tgctgggattacaggtgtgagccgctgtgcctggctacctgggtaatatttgtatttttagtagagatggggtttcatcatgttggccaggctggtctcgaactcctgccctcaggtgatccacccgcctcagcctcacagagtgctgggattacaggcatgagccactgcgcccagccagagtctgtggtatttttatacacctcattgcattttctaatttcccttgtgatttattctttgacacattgggtacttaagagtatgttaatttccacatagttcagcgtctgacggngatcctct

SEQ ID NO: 530418 - DNA, 924 bp, Homo sapiens
  misc_feature (6)..(6): n is a, c, g, or t
cgcgcntcgaggtggcgatgtctgcggtggggtctggtggtaacccgcgggtttaattagcgctctgttaccctccggtgtgcccaagggcctctctgtttgttccggttccctcgcgctccagaagactcccggggttcatatggggcccctcatcaactggccaagcctgcattctatcccgggcccttcatattccaggccccttccctttctatgcaccctggcgcccctttttttctcgcgcattcctcaggaggttgcctctcccccccctcttggggagttgtgcgcatctctcccctctggtgcaagcggactctggaagcactgtggccccctacaacccttgggtccgaaattatgttctcctgcccccctggtgcggtctcactcaaactccccaaatcacatccgcccccaatgttctttggcaattccctggacattgctctcctctggtctaaaaaagaataacatgtgctattctattaagaaccccacttgcaattctcaattttatgataagtctctagagagtctttcttcttcttgtaaaaacgcaacgctaatatgagttagcttctcaccgacccccccgtcatgtctctaatactatcaccctcgcccccccccccttggaaataggatttactatcctccacacaatatccctgggggggcttccaccttcttcatgtattgatgtacgagtgacaattgctctacctagttagtgagtaactttggccgaggagggaacatacacttggtcctcttggtatgagggcgaatcaactctcctggcgttattttacccccccaactaaggatgagaatataaacatagggggcgtcaaaaagaaggatgttttaaaaaaaaaggagttactcatataaaataaacaaacagcccacataaca

SEQ ID NO: 530419 - DNA, 526 bp, Homo sapiens
  misc_feature (252)..(252): n is a, c, g, or t
  misc_feature (479)..(479): n is a, c, g, or t
  misc_feature (507)..(507): n is a, c, g, or t
ataaagggtctgtgcgtgacccacctgtgatgagccctttctaaggagaagggtttccaagagatcaccccaccaggggtaggaatgagcaagttgggaatattatactgtcactgcacatggacctgtgcgaagacgtctggcgcgagctaggctcactgtacctacatacggatcttgatggctcacctgtccctgtggaggttccactgggaaggcaagatgcccaacaacaggactgctctgtcattngccaatgttacctacattatcatgtgagattttattggactctgtgccatagtgggcaacgtgctggacatctgcgaggtcaagctgaaccccagcctgcagaccaccaccttctatttcattgtctctctagacctggctgacaatgctgttggggtgctggtcatgccttatgccttgtgtcagcctgtgcatcacccacttctacagctggccttttatggctngcctactgcttatctttacccacagctncttcatgttctggtgggcg

SEQ ID NO: 530420 - DNA, 293 bp, Homo sapiens
cgtcgaccgcggggccctcgctctctctctctctatgggctctcgctctctctactctgtgcttgctctttctctgtgctcgttctctttctgtgctcgctctctctctgtgctctctatctctttctgctctctcgctctctctctcagggctctctcagggctctccctcccttggggcgctcgttctccctccctcggggcgctcgctctctctccctctcggggtgctcactctctctcctttcccggggcactctctctctcctttcgtcgacgcggccgcgaattta

SEQ ID NO: 530421 - DNA, 1395 bp, Homo sapiens
  misc_feature (675)..(676): n is a, c, g, or t
agcctggtgcgcatgcgccactgtaaaggccgttaggtctgtccctggcgcccgattagaatatttaattccagttggagcgtttttcctcaccttactgtattttatttcggtaaatacccacacattttaatttctgagaggcacaaattcctctcagactcattcaaattgaccgagtagtcttataaggtgccttttgtctcattgtaaatcctcagtaaagtttgcagtttaggatgataacgtgatttttgcgtaaaaataacaactcatttcacctgaaaaggaccacgacaggagcagggactcgagtttctttttattcgggcacttcagtagttacctcttgcttgggggtggtgccgcgtgtggacccgatggaccccggcgacgccgccattttggagtcttccctaaggatcctctaccggcttttcgagtcagtgctgccgccgctgcccgcggctttgcagagcaggatgaatgtgatagaccacgtgcgggacatggcggccgcggggctgcactccaacgtgcggctcctcagcagcttgttacttacaatgagtaataacaaccctgagttgaggcgggtagctgcctggggctgaggagaaagcggcggcggtctgggagcggggggctcagggcacgtgggaacaggcgggaagnngcggccgccggcgccagcggaggctccggggtctgcgagggcgtcctggagcggagcagacttcggagcgcaagttgggttcactgggtgccggcgtcaagtcccgcggggatgtggcgagcggcggcttggagacatagaaggcagaggctctgaggacgacccaggcgagggtttcctgaggcacctgtcgcggggcagcgcgactgtcacatcgctaggctgaatccttccctctcggctccttccagaagaacgtttttttctctcgctgcagctcagggacccagcctcctggtttttatgcgctagcccccgcatctgagattggtccccccgttaagtgtatcaggagggtccactttctggccttgggaaacccctgaaaacggggccgggcgcggtggctcacgcctctaatacgagccctttggggaggccgagcggggaggatcgcttgagcccgggagttcaaggaccaacctgggcaacatggggagaccctgctctacgaaaagtaaaattaaacaattagccgggcgtgatggtgcgtgcctgcgggccagctgctcgggaggctgaagcaggaggatccgcttgggccccgggagttcagctgcagtgagccgtgatcgcatcatgtccttaccgtgggcgaagaacgatgctgttcaaacagaacgggggacccttatgggagttttctccccacaaagtcc

SEQ ID NO: 530422 - DNA, 540 bp, Homo sapiens
agcgggggcgaggcgctagaggcggggtgcgccgtggaggccgcgggctttgcatcctgggagatctcggccttggccggctggacctgaccctagggcggattgcgcagcgtgtcgggacgtgacatgcgtacagccgcgtcagggaaggtgcgttcccagactgtgcaccaagttcagggtgccctagactgacccactttggagacgtgatagagcgaaacatggggcagggatttgaatgaagtgacaggcacgaacagacaagatggtggtgtacatggcgtatcgagaacgttcacgtgtgaaatccagaggatgcgacacgcgagtaaccagtcacagtccggagatggcaagttggaagtccgtagagacacctggacgatgataaccaaccaggggcagaatgaagaggaagaaatgtatcgaagaaggcacaagaccacagtgtagagcacttatcgagtgaccgccgatcgatagcgaattcaagagcggagagtaggacagcatcatgaggagtatatacacagcttg

SEQ ID NO: 530423 - DNA, 175 bp, Homo sapiens
  misc_feature (81)..(81): n is a, c, g, or t
cagatctttcctggtcagtctggagagcagtggactctacacgcgtatgccagtgactttgccctgtggaaggcggcaaancccaggaggtgttctgggcctctccctgtgggaccctgggatggctgggctggcacatctgagtgctctgccatcgctagtatggtattttggc

SEQ ID NO: 530424 - DNA, 1844 bp, Homo sapiens
agcctggtgcgcatgcgccactgtaaaggccgttaggtctgtccctggcgcccgattagaatatttaattccagttggagcgtttttcctcaccttactgtattttatttcggtaaatacccacacattttaatttctgagaggcacaaattcctctcagactcattcaaattgaccgagtagtcttataaggtgccttttgtctcattgtaaatcctcagtaaagtttgcagtttaggatgataacgtgatttttgcgtaaaaataacaactcatttcacctgaaaaggaccacgacaggagcagggactcgagtttctttttattcgggcacttcagtagttacctcttgcttgggggtggtgccgcgtgtggacccgatggaccccggcgacgccgccattttggagtcttccctaaggatcctctaccggcttttcgagtcagtgctgccgccgctgcccgcggctttgcagagcaggatgaatgtgatagaccacgtgcgggacatggcggccgcggggctgcactccaacgtgcggctcctcagcagcttgttacttacaatgagtaataacaaccctgagttattctccccacctcagaagtaccagcttttggtgtatcatgcagattctctctttcatgataaggaatatcggaatgctgtgagtaagtataccatggctttacagcagaagaaagcgctaagtaaaacttcaaaagtgagaccttcaactggaaattctgcatctactccacaaagtcagtgtcttccatctgaaattgaagtgaaatacaaaatggctgaatgttatacaatgctaaaacaagataaagatgccattgctatacttgatgggatcccttcaagacaaagaactcccaaaataaacatgatgctggcaaacctgtacaagaaggctggtcaggagcgcccttcagtcaccagctataaggaggtgctgaggcagtgcccattagcccttgatgccattctaggcttgttgtccctttctgtaaaaggggcagaggtggcatccatgacaatgaatgtgatccaaaccgtgcctaacttggactggctctctgtgtggatcaaagcgtatgcttttgtgcacactggtgacaactcaagagcaatcagtaccatctgttcactagagaaaaaatccttattgcgagataacgtggacctattgggaagcttggcagatctgtacttcagagctggagacaataaaaactctgtcctcaagtttgaacaggcacagatgttggatccttatctgataaaaggaatggatgtatatggctacctactggcacgagaagggcggctagaggatgttgagaaccttggatgccgccttttcaatatctctgatcagcatgcagaaccgtgggtggtttctggctgtcacagcttctatagcaaacgctactcccgggccctctatttaggagccaaggccattcagctgaacagtaatagtgttcaagctctgctacttaagggagcagcacttaggaacatgggcagagtccaagaagcaataatccactttcgggaggccatacggctcgcaccttgtcgcttagattgttatgaaggtcttatcgaatgttacttagcctccaacagtattcgagaagcacatggtaatggctaacaacgtgtacaaaatctgggagcaaaatgcaagacccataaccttgagccaacggacgtcttgaagacccaggaaacaggagaaagcaaaacatatcacataaagcctggaccaaggaagatacttaaggctgaggcgaaaaagcagactaataagcagagacagaaattg

SEQ ID NO: 530425 - DNA, 1695 bp, Homo sapiens
agcctggtgcgcatgcgccactgtaaaggccgttaggtctgtccctggcgcccgattagaatatttaattccagttggagcgtttttcctcaccttactgtattttatttcggtaaatacccacacattttaatttctgagaggcacaaattcctctcagactcattcaaattgaccgagtagtcttataaggtgccttttgtctcattgtaaatcctcagtaaagtttgcagtttaggatgataacgtgatttttgcgtaaaaataacaactcatttcacctgaaaaggaccacgacaggagcagggactcgagtttctttttattcgggcacttcagtagttacctcttgcttgggggtggtgccgcgtgtggacccgatggaccccggcgacgccgccattttggagtcttccctaaggatcctctaccggcttttcgagtcagtgctgccgccgctgcccgcggctttgcagagcaggatgaatgtgatagaccacgtgcgggacatggcggccgcggggctgcactccaacgtgcggctcctcagcagcttgttacttacaatgagtaataacaaccctgagttattctccccacctcagaagtaccagcttttggtgtatcatgcagattctctctttcatgataaggaatatcggaatgctgtgagtaagtataccatggctttacagcagaagaaagcgctaagtaaaacttcaaaagtgagaccttcaactggaaattctgcatctactccacaaagtcagtgtcttccatctgaaattgaagtgaaatacaaaatggctgaatgttatacaatgctaaaacaagataaagatgccattgctatacttgatgggatcccttcaagacaaagaactcccaaaataaacatgatgctggcaaacctgtacaagaaggctggtcaggagcgcccttcagtcaccagctataaggaggtgctgaggcagtgcccattagcccttgatgccattctaggcttgttgtccctttctgtaaaaggggcagaggtggcatccatgacaatgaatgtgatccaaaccgtgcctaacttggactggctctctgtgtggatcaaagcgtatgcttttgtgcacactggtgacaactcaagagcaatcagtaccatctgttcactagagaaaaaatccttattgcgagataacgtggacctattgggaagcttggcagatctgtacttcagagctggagacaataaaaactctgtcctcaagtttgaacaggcacagatgttggatccttatctgataaaaggaatggatgtatatggctacctactggcacgagaagggcggctagaggatgttgagaaccttggatgccgccttttcaatatctctgatcagcatgcagaaccgtgggtggtttctggctgtcacagcttctatagcaaacgctactcccgggccctctatttaggagccaaggccattcagctgaacagtaatagtgttcaagctctgctacttaagggagcagcacttaggaacatgggcagagtccaagaagcaataatccactttcgggaggccatacggctcgcaccttgtcgcttagattgttatgaaggtaagaaagaggttccattaggccagcacttcccctctgttagaataatctgggggctggccggacgtggtggctcaccct

SEQ ID NO: 530426 - DNA, 245 bp, Homo sapiens
attcggatccaacgatcgcttgaggccaagagtttgggaccagcctgggcaacagagcaagaccccgactctacaaaaaaaatttaaaaaattagccaggaatgatggtgcacacatgtagtcctagctactcaggaggctggggtagaaggattgcctgagcccaggagtccaagggtatagtgagctttgattacacgagtaccctctagcctgggtgacagaacaagatcatgtgttaaaaa

SEQ ID NO: 530427 - DNA, 1347 bp, Homo sapiens
agcctggtgcgcatgcgccactgtaaaggccgttaggtctgtccctggcgcccgattagaatatttaattccagttggagcgtttttcctcaccttactgtattttatttcggtaaatacccacacattttaatttctgagaggcacaaattcctctcagactcattcaaattgaccgagtagtcttataaggtgccttttgtctcattgtaaatcctcagtaaagtttgcagtttaggatgataacgtgatttttgcgtaaaaataacaactcatttcacctgaaaaggaccacgacaggagcagggactcgagtttctttttattcgggcacttcagtagttacctcttgcttgggggtggtgccgcgtgtggacccgatggaccccggcgacgccgccattttggagtcttccctaaggatcctctaccggcttttcgagtcagtgctgccgccgctgcccgcggctttgcagagcaggatgaatgtgatagaccacgtgcgggacatggcggccgcggggctgcactccaacgtgcggctcctcagcagcttgttacttacaatgagtaataacaaccctgagttattctccccacctcagaagtaccagcttttggtgtatcatgcagattctctctttcatgataaggaatatcggaatgctgtgagtaagtataccatggctttacagcagaagaaagcgctaagtaaaacttcaaaagtgagaccttcaactggaaattctgcatctactccacaaagtcagtgtcttccatctgaaattgaagtgaaatacaaaatggctgaatgttatacaatgctaaaacaagataaagatgccattgctatacttgatgggatcccttcaagacaaagaactcccaaaataaacatgatgctggcaaacctgtacaagaaggctggtcaggagcgcccttcagtcaccagctataaggaggtgctgaggcagtgcccattagcccttgatgccattctaggcttgttgtccctttctgtaaaaggggcagaggtggcatccatgacaatgaatgtgatccaaaccgtgcctaacttggactggctctctgtgtggatcaaagcgtatgcttttgtgcacactggtgacaactcaagagcaatcagtaccatctggtgagagccacaaagttaattcagtgttcttgaggccctttgcttgtctggaagtctgatgtatctgaagtagcaaaaagaaaaatgagatgctttgctgttggtgctgcagccagtctctgggatgtgttagtcttttatactgaatggtcccaaatgtaatcatgtaatcatctctgttggagacctgt

SEQ ID NO: 530428 - DNA, 536 bp, Homo sapiens
gcttatgggaaagtacctaaaaatggttgaagaacaagactgagaggctagaatatgaaagcttaaattctgattctgccccttcctagttagcatattcctgagacaaatatttgtcaacatggtattatctaagaacgtgtgccacaggcacccaggcgcattagacgtgactcacaagtagtatctcagcaatatggtaccaatttgacacacaacaaacacaatagaaactacaacatactgtacagacatacacgtagaactactacgtgaagtagttcattctattcaaacataagaattgcactactactccttactgataaatttcatcatttttagtgagactagggttttccaggccatctagataaaaaatcaagtactatatggacaccaacatggagcagaaaatgagggcagcagtgtccaatctcattccaggtgagaagtagcacagtgtccaataggtgcatacatctccttagtaagtagttgtgatatacaatgaaatagaaatgaaaaatatatta

SEQ ID NO: 530429 - DNA, 292 bp, Homo sapiens
gcatgcgaagatgccaaatcatccgagacatgatggcacggaaaagactttggtaatatcctctcacaccactaagaagcagtagcctttgtccaggtctaaatacaactcgtttcaagattacagaacattgggcattttacaaagttaattgtcagaggaagtaccacttctgtggtcttgcagtaggcgagcccaaacaaaaataagccaagggactaatagtttcgcgtttcttaaattcttgcaaaactagttaagtacacgttaggggttaaggatcctctcttac

SEQ ID NO: 530430 - DNA, 1732 bp, Homo sapiens
agcctggtgcgcatgcgccactgtaaaggccgttaggtctgtccctggcgcccgattagaatatttaattccagttggagcgtttttcctcaccttactgtattttatttcggtaaatacccacacattttaatttctgagaggcacaaattcctctcagactcattcaaattgaccgagtagtcttataaggtgccttttgtctcattgtaaatcctcagtaaagtttgcagtttaggatgataacgtgatttttgcgtaaaaataacaactcatttcacctgaaaaggaccacgacaggagcagggactcgagtttctttttattcgggcacttcagtagttacctcttgcttgggggtggtgccgcgtgtggacccgatggaccccggcgacgccgccattttggagtcttccctaaggatcctctaccggcttttcgagtcagtgctgccgccgctgcccgcggctttgcagagcaggatgaatgtgatagaccacgtgcgggacatggcggccgcggggctgcactccaacgtgcggctcctcagcagcttgttacttacaatgagtaataacaaccctgagttattctccccacctcagaagtaccagcttttggtgtatcatgcagattctctctttcatgataaggaatatcggaatgctgtgagtaagtataccatggctttacagcagaagaaagcgctaagtaaaacttcaaaagtgagaccttcaactggaaattctgcatctactccacaaagtcagtgtcttccatctgaaattgaagtgaaatacaaaatggctgaatgttatacaatgctaaaacaagataaagatgccattgctatacttgatgggatcccttcaagacaaagaactcccaaagcttgttgtccctttctgtaaaaggggcagaggtggcatccatgacaatgaatgtgatccaaaccgtgcctaacttggactggctctctgtgtggatcaaagcgtatgcttttgtgcacactggtgacaactcaagagcaatcagtaccatctgttcactagagaaaaaatccttattgcgagataacgtggacctattgggaagcttggcagatctgtacttcagagctggagacaataaaaactctgtcctcaagtttgaacaggcacagatgttggatccttatctgataaaaggaatggatgtatatggctacctactggcacgagaagggcggctagaggatgttgagaaccttggatgccgccttttcaatatctctgatcagcatgcagaaccgtgggtggtttctggctgtcacagcttctatagcaaacgctactcccgggccctctatttaggagccaaggccattcagctgaacagtaatagtgttcaagctctgctacttaagggagcagcacttaggaacatgggcagagtccaagaagcaataatccactttcgggaggccatacggctcgcaccttgtcgcttagattgttatgaaggtcttatcgaatgttacttagcctccaacagtattcgagaagcacatggtaatggctaacaacgtgtacaaaatctgggagcaaaatgcaagacccataaccttgagccaacggacgtcttgaagacccaggaaacaggagaaagcaaaacatatcacataaagcctggaccaaggaagatacttaaggctgaggcgaaaaagcagactaataagcagagacagaaattg

SEQ ID NO: 530431 - DNA, 977 bp, Homo sapiens
ggcgccatgacccagccggtgccccggctctccgtgcccgccgcgctggccctgggctcagccgcactgtggcgccgccttcgtcactggcctcttcctggggaggcggtgccccccatggcgaggccggtgagagcagtgccatgcattctcccccagaggacagctctgcgctgtgtgcaggtatcattcgtgaagccgcatccgatgctgggagcacccggctgctgcagtaagccttgaggcatgctgacccatggagcagctcgcagggggattctatcgatgcacctgctgtagcatagccctaggctcttgggcaaccatgtgcgctggcatcagtcctagggtccacagaagggtcggctggagcctgggcaaccgttcacgggctacgtccgtcccttggccctggccctggccgctgtcccgcggacgggtcgcgtggtgacctgcgaggtggacgtcgcagcccccggagctgggactggccctgtggaggccaggccgaggacgggagcacaagatcgacctccggctgaagcccgtccttgtgagacctctgtgacgagctagctgtgccggcgggtcgaggccggcgaccttcgacgtggccgtgcgtggatgcggacaagggagaactgctccgtctactacgagcgctgcctgcagctgcttggacccggaggcatcctcgccgtcctcagagtccttgtggcgcgggaaggtgctgaacctccgaaacggggacgttgcggccgagtgtgtgcgaaagctaaacgaacgcatcggcgggacgtcagggtctacatcaggctcctgcccctgtggcgatggactcacgtttgcccttcaagatctagggctggcccctaagtgagtggctcgagggaaaggttgcctgggaaccccaggaattgaccctgagtttaaattcgacaataaaagcggcgctggacaccgaaaaaagaacaaat

SEQ ID NO: 530432 - DNA, 1209 bp, Homo sapiens
  misc_feature (675)..(676): n is a, c, g, or t
  misc_feature (1206)..(1206): n is a, c, g, or t
agcctggtgcgcatgcgccactgtaaaggccgttaggtctgtccctggcgcccgattagaatatttaattccagttggagcgtttttcctcaccttactgtattttatttcggtaaatacccacacattttaatttctgagaggcacaaattcctctcagactcattcaaattgaccgagtagtcttataaggtgccttttgtctcattgtaaatcctcagtaaagtttgcagtttaggatgataacgtgatttttgcgtaaaaataacaactcatttcacctgaaaaggaccacgacaggagcagggactcgagtttctttttattcgggcacttcagtagttacctcttgcttgggggtggtgccgcgtgtggacccgatggaccccggcgacgccgccattttggagtcttccctaaggatcctctaccggcttttcgagtcagtgctgccgccgctgcccgcggctttgcagagcaggatgaatgtgatagaccacgtgcgggacatggcggccgcggggctgcactccaacgtgcggctcctcagcagcttgttacttacaatgagtaataacaaccctgagttgaggcgggtagctgcctggggctgaggagaaagcggcggcggtctgggagcggggggctcagggcacgtgggaacaggcgggaagnngcggccgccggcgccagcggaggctccggggtctgcgagggcgtcctggagcggagcagacttcggagcgcaagttgggttcactgggtgccggcgtcaagtcccgcggggatgtggcgagcggcggcttggagacatagaaggcagaggctctgaggacgacccaggcgagggtttcctgaggcacctgtcgcggggcagcgcgactgtcacatcgctaggctgaatccttccctctcggctccttccagaagaacgtttttttctctcgctgcagctcagggacccagcctcctggtttttatgcgctagcccccgcatctgagattggtccccccgttaagtgtatcaggagggtccactttctggccttgggaaacccctgaaaacggggccgggcgcggtggctcacgcctctaatacctcccaaagtttaaggattacaggcgtgaaccatcgcttctggcctcttttgtgttatttgaatgcacccagcgtggtctttactctgggcccctggacttgttgtnctt

SEQ ID NO: 530433 - DNA, 128 bp, Homo sapiens
ttcagcaagcggcttatcgaaccgagccggttagtcaagaagaacactccagaggagtagaggtgaaaacagcattgcccggggtgaggcgcaggaggaggaagggtccacgtataggagtggatagg

SEQ ID NO: 530434 - DNA, 486 bp, Homo sapiens
aagagtgccatggaaaggctgaagcgcggcataattcacgctaaaggactgattcaggagtgcttggcagaaacggaacggaatgccacatcctacctgccttgttggttttgaaggatgcccatctttttacaagaagagaagttacagttcatctcccctgttcagatgaaacccttgttttcaaaatggttacagttgcgtttttcctcccatggttcaccttgggtcttgaacctacagtccttcaaagaattggataaaaaagaattttgcacccttaatttagggaatttggcacgtttttaaaggtagctttagggaaaacctcagcccccaagaatttcttttatcaggctctatctctcaaaaacagattggacttctaaaaaaataaggataatccaaccgcggacaagggtttaattttttaatacaaaacaaaaaacctggggggttttttgccccccccccaagaaaacaacc

SEQ ID NO: 530435 - DNA, 146 bp, Homo sapiens
  misc_feature (112)..(112): n is a, c, g, or t
ttcagagccctctgacacatcatcttcatcatcttcatcttcatcatcatcttcttcctcttctctctcaagtactcgctcttctccacctctcttgctgcgagacgggcgngcgctggcggccggcggccgcgtccgggcctgtc

SEQ ID NO: 530436 - DNA, 150 bp, Homo sapiens
cattaccttacctccagatcaccctccctgagaggtgataagaaggagtgacccgggcagttctgccattagagacccagcatgtaagagatccccagagtccgcaagattcagatggtatttagattacaagaaaatcaacagagagac

SEQ ID NO: 530437 - DNA, 220 bp, Homo sapiens
atcaagcaagagatgaccatggaatataagcaggagttgaagaaactacatgaagaattatgcatactgaagagaagctatgaaaagcttcagaaaaagcaaatgagggaattcagaggaaataccaaaaatcacagggaagatcggtctgaaattgagaggttaactgcaaaaatagaggaattccgtcagaaatcgctggactgggagaagcaacgct

SEQ ID NO: 530438 - DNA, 252 bp, Homo sapiens
taacgggcagtgaatcgagctcgtgtacccacggcattgtcagaggcgtatgaaccagagcgactccatcttgaataggggctgggtcaaatggatctgagacctgctgggctgcattcccaggaggttaggcattcttagccacaggatgagataagaggtcagcacaagatacaggtcataaaggccttactgctaaaacaggttgtggtacagaagccggccaaaacccaccaaaaccaagcaacccct

SEQ ID NO: 530439 - DNA, 239 bp, Homo sapiens
gaaacacttcgtccatactgacctttaactcatgtgtgtggactttcggcgtgtgcacacacgccgagtgtccatcctgcacacgccgaggatccacacacttacttgaggtcagatcactactggacgaagttagttgcgcaactaacttcgtccattcatgacttgtagtcaccacaggggatctaggttcattcggctgtgtgccagggtacctgagctcgcacattcgtaatcca

SEQ ID NO: 530440 - DNA, 866 bp, Homo sapiens
gtttcttttagcagtttcataatttgaggtcttagatttaagtctttaatccatttttacttgatttttgtatatggcaaaagatacgggtcttgtttcattcttctgcatacaggtatctagtttttccagcaccattttttgaagagactgtccttttcccaatgtatgttcttggcacctttgttgaaaatgagctcactgtaatatatggatttgtttctgagttctctattgtgtttcattggtctatgtgtgtttttttttttttttataatgccagtaccagtgatgtttgggttactataggcttggtaggtgtaattgtgaagtcacataatgtgatccttccagtttggtggttttggcttaggctcctttgttctttttctctttctccttttctcctttttttttttttgggaagaagggctctctcctcctcgtgttccgcccgaggcggaaggtgcaggtggcaacatttctttcgagctctccacgtgcaaaccctccaaccctcccagaggatctcacaagcattatcctgtgtgtgtgccctacagctctcccgaagataaacgggagactcaccgggtgtggtgtgcccccatgtgccccaggcttaaatttggagaatttttaacgataagaaaacggggtttacacattatgttgtcggcacaggcgtggtcctagaaaacctcctggaaccccaagaggccgaaccggccataaccataagccttccccaaaagggcgggggaatcaacgggccaaacccaccgaggacacaaacctgaaaggatccctagggggggaacaaaccccattagggacaaacccgggaccctggggagacgccaaaa

SEQ ID NO: 530441 - DNA, 484 bp, Homo sapiens
  misc_feature (13)..(13): n is a, c, g, or t
  misc_feature (28)..(28): n is a, c, g, or t
  misc_feature (208)..(208): n is a, c, g, or t
  misc_feature (285)..(285): n is a, c, g, or t
  misc_feature (322)..(322): n is a, c, g, or t
  misc_feature (388)..(388): n is a, c, g, or t
  misc_feature (484)..(484): n is a, c, g, or t
ccggcgagaaaantgagatcccgcgagnctcccaggatgaagtctggctctgttgcccaagctggagtgtgttggcaccatcttggttcactgcaacttccacctcccaggctccagtgattctcctgcctcagcctcaagggtagctgagattacaggctggagtgcagtggcatgatctcacctcactgagaacctccaccagctngggttcaagtgattctgctacctcaacctcccaaatagctgggactacagggtctcattctgtcacccaggttgganctgcagtggcaacatcatagctcactgcagccttganaccctgggttcaaagtgatcctcctgcttcagctccttgagtagctgggggctacaggcacttttncctacatttttcaaagggctgcatcatcacatctggccacagcattctctaatcattgagggattttctcaggaaaatcacctgtgaaatattttn

SEQ ID NO: 530442 - DNA, 137 bp, Homo sapiens
tcagcaagaccagacagctttacttacccccatgaagaactgatcaaataacaaaaacacatgatctcagtgtatcctcccaaagctgtcagatgagctgctgatgccgtgtctagattgccatgtcccaacaacag

SEQ ID NO: 530443 - DNA, 714 bp, Homo sapiens
  misc_feature (674)..(674): n is a, c, g, or t
aatgaccagagtcagctgtaaagcacataaggggaactttgtgatgcaaacacaagtatcaacagctgaattgatcaagcagaaaaaagaatatcagagcttgaagactgtcttgccaaaataaggcaggcagagaagattagagaaaaaagaatgaaaaggaatgaacaaaacctcaaagaactgtggaactatgtaaaagaccaaacctatgactgattggactacctgaaagagacaaggagaatggagccacgttgggaaaacacacttcaagatatcatccagaagaacttccccaacctagcaagacaggccaacattcaaattcaggaaatccagagaaccccagtaagatactccacaagaagatcaaccctcaagacacatagtcatcagattctccaagatcaaaatgaaggaaaaaatgttaaaggcagacagagacaaagggcaggtcacctacaacgggaagcccatctgactaagagtgggcctctcagcagaaaccccacaagccaggagacaagtgggtccaatggtcaacattcttagagaaaagaattttaacctagaattcatatctgccaaactaaccttataagtgaggagaaatcttttagacaagcaatgctggggaattatcacaccggcctgctttgcagacctctganggagtgctaagatggaaaggaaaactggtcccgccactgc

SEQ ID NO: 530444 - DNA, 876 bp, Homo sapiens
ggtcgactttgaatgagaaagactcaatgactggtttgacaagagcctagtgaccctgtgagtgttattaattttattatcccaagtggtttgacaagagcctagtgaccctgtgagtgttattaattttattatcccaagagaataacgaaaataggacctattgtttagctctcaagctaaaattttataccattatctatatgagcactatctgaagagtctcccacagaatatacttatgggagaaagagttgagtacagtcataactttaatataaaaacaaccctttaaatatgaaaatagtagcatggctctaagtccaaaatgtagagagacgattatggagatagaaaccttgagatctatttctagattatcctggcactcaggctcctatgattttctgtttagacaataccccataaagtatcacagtgaatttaaacatcacatttgcattttctagggtatttatgatgatttttctgagtgtactttctagatgagacatagaaatatggtggttaaaaggggtctttggaattagattgcttatatttgaagtcaggctctgacatgtataagccagctatgggatcttaagcaagttttctaccctctacatttcttcagtttcgtcagctaaaaaatgcaggtagtaatagcacctccctaattatgtgagtgagaagaatgagtgagataatgttaataatcccttagcccataagaaaggcccaagcaatgctgttattttgttcttaccttggtttaagatgtatttcaaacacaacatggatttgaataaagaagtgacctgtgattattccattcagttaccaaatctaaactaaattgatgacaaaaaaaaa

SEQ ID NO: 530445 - DNA, 391 bp, Homo sapiens
agctcctaccgcctcggatcccggcacgatctttgcttcgtggtgcttctcctccccgcgcctgtgtccttcatctagtctgcacctcattggtcatcagtgcttgcgacggcgcatgtataagtgtcatggcttccccatgcatcacacgccaatatccgcttgttaatccgcagccagggagcatagaacacgaagtccggggcttttttgtcaatgggcttcattgactaatttcttatcattgaaagagatgttcctgatttcactccaggcgaagcctatcttggcgagttagtctgtcattctgctcatagatcttgagacccagggcatcctcccccagccacagctctgagcctttcttgttcttgatgctgaagtagttcac

SEQ ID NO: 530446 - DNA, 526 bp, Homo sapiens
ccaagagctggcccggagcagccaggagcacctccagcgcaagcaaatctgggggcgcgggaatgacacaccgggtgaaatgaatgcttcctgaaaggacaagcgatccggctgctacttattcacctgccgaggggtgtggattatagggggaatatccagactttcagagtagcggcagaagtgcgggaggagctgtgccggcaaatgggtatcacggagcctcaggaagtgcaggaattcgccctcatcctcatcaaagagaagaggcagctggtgcgggccctggagccgggcgaatacctcaacagcgtgttagtgggccaggacgagagcctgcacagccggcggctccactgggagaccccactgcacttcgataactccacctacattagcacccactacagccaggtgctgtgggactaccttcaggggaagctgccagtcagcgccaaggcagacgcgcagttcgccagggtgggcggcctgcagcatctcagcaaggccaaaaggaatacccctc

SEQ ID NO: 530447 - DNA, 505 bp, Homo sapiens
caccgaaggtcagagagatcagtattcatggtgctttattgttcgagagtaaaaggtcgtgacagagagaccattaagatggggatataagagcttataatgataacttaccgtccacattcttctataagattgcctatggtttctgcctcatcttcagccattttaaatatattacttagtccatcgagtactacttgcacaacttgtcgagattcgaatctcgacaagttgtgcatggtggtgggtgcctgtaatcctagctcctggggagactgaggcaggagaatcacttgaacccgggaggcagagtttgcagcgagccaagatcgcaccatggcactccaggctgggtgacaagagcaaaactccgtctcaaaaaaaaaagccatttaaggcagctggcagtgactcaggcctgtaatcccagtgcttggggaggctgaggcaggaggatcgcttgagtctaggaggtcaagaccaggctgcacaattggtcgagatt

SEQ ID NO: 530448 - DNA, 452 bp, Homo sapiens
tacagtaatagatcagtgagtgataagttgataagagaaacaagacatgatagtgttaaaggtcgtaataaaaatacagaaattgcccaagaactttctgtaatctatgtaagtaatcataatggtaaatagcaataagctagtcatgtattacatttatgcagtatgtttgtaggaatcctctttgtgtttccatatgtaaccagtatgtgacccttaggaaattcttagttgagactattaagtgaagaggttcatagttttaagatatttaagtcacagaagcatattagtgtattttctgtatgtaatatagttggcattgtaattcaggtatgccagatatgacacatggacaagtgttttaaatcgtttttcctatgtctcgctcccgtaatctggaagaaatgccacaagctgtgaaaattaatgtcagtttggcttgggatact

SEQ ID NO: 530449 - DNA, 121 bp, Homo sapiens
taacgcgctgatagcctcctaacgcgctgatagcctgcaacgcgctgatagcctcctaacgcgctgatagcctcctaacgcgctgatagcctcctaacgcgctgatagcctacaacgcgct

SEQ ID NO: 530450 - DNA, 194 bp, Homo sapiens
gacgagttcaccctggggtgtacgtctccctggacaagttcctggtttctgtgagcaccttgctgacctccaaataccgttaagctggagtctcggtggccatgcttcttgccccttgggcctccccccagaccctcctccccttcctaaacccgtacccccgtggtctttgaataaagtctgagtgggcggca

SEQ ID NO: 530451 - DNA, 206 bp, Homo sapiens
tcggtcgctcggacacaagttggtgcattgtcttgagaatgtcttggaatgacactgagctcatctccacagattctgaagtttggctcagtggccctgggctagttcctaaagatggttgtgtcaacccaatagatttttccacttggtgacagttgtcagaggtcaactttgcttcttttccttgatatcctggtccgagcgga

SEQ ID NO: 530452 - DNA, 106 bp, Homo sapiens
cataccttgaccttctaattactagccccacaaatacctacgcacacttccagaaactggtgcaccagatgttccctaaacccaggattaacccgagcgctaccat

SEQ ID NO: 530453 - DNA, 95 bp, Homo sapiens
  misc_feature (12)..(12): n is a, c, g, or t
  misc_feature (54)..(54): n is a, c, g, or t
  misc_feature (57)..(57): n is a, c, g, or t
  misc_feature (75)..(75): n is a, c, g, or t
  misc_feature (77)..(77): n is a, c, g, or t
ggacataaattnagtgtacaataaatgtgtgtgtgtgtatatatgtatatgctnacntgtgtatggaaagtatcncngcagatacaataaaaact

SEQ ID NO: 530454 - DNA, 465 bp, Homo sapiens
agatgttccattagaaagtttttcagaggaaggccgggcgcggtggctcacgcctgtaatcccagcacttcgggaggccaaggtgggcggatcacaaggtgaagagatggagaccatgctggccaacatggtgaaaccccgtctctactaaaaatacaaaaattagctgggcatggtggtgcatgcctgtagtcccagctatttaggaggcagaggcagaatagcttgaacccgggaagtggaggttgcagtgagccgagatcatgccactgcactccagcctgggagacagagtgagactcttccaaaaaaaaaaaaaagtttttcagaggcaaatcacagctattgacccaagagtggctcacacctgtaatctcagcactttgggaggccaaggcaggcagatcacctgaggtcgggagttccagaccagcctgaccaacatggagaaacaccgtctcttaa

SEQ ID NO: 530455 - DNA, 137 bp, Homo sapiens
caccatgcagaagaactttcttactctctgtgcctcttattagcatctaaattcttactaagtcctgtcttatttattactgttgtgtggctcttaactgttggaagtaaagaactgacagtgctgaatgtatcgtt

SEQ ID NO: 530456 - DNA, 1709 bp, Homo sapiens
  misc_feature (1172)..(1172): n is a, c, g, or t
tttgtgtgtgtttgttttcgttggattttttttgtttttgtggtgattggttgttgtgatttttagtgtttgttgtttttgtcttttttttttgtattgtgttgtatttgttgttgtattggttgtggggggcctattggttggtgttggttgtgttgtttatgtgttgttgttgtttagagtgtgtagtgttgttttttgatttgttttgtgtgtgttgttttgctgtgttatgtgtattgtatgttttgtttgttggtgcgtgttatttttgtttgtttgtgttttttgttatgtggagtaagtgagtgacgaaagaatatgtaaaacgaagctcggtagagggagcggatacgagaaacagaatgagcgtagccgtctctcggcgttgggttgattcactctcattgcgtccgctcttcatcgcagagctgagttgcgtgttggtctttctcgcggcacaggggggtgtgtttccacccgccggggtggctgctcgtgctcctccttcgctgttcccgcgggtgtatttcgtcgcagatcccccagaggctgttgttgatacttttctctcgcggtcactatcggggcgcttcacattgtcacacaaagtggtgtttcctgacccagagggttttttcgttgcgggcccacacttgtttctggggtgccccgccagcggttgggcccccccgcgccatgggggaagccagagctggggctttcacctttctctccaaggttggtttgttttcttgtgtgccctgcctctgggcctttatattttggcctctgccgggcttatttgtcccccgtggtgttggggaggtggcgcacccccagggcgtcacctccgttgtgcacagggccacaagtgttttgccttgagtactttggttgtatgggcatctatgtactttggtgttcgccccccctgttctctggttgtcaaaaaagccgtttgggatggaatgggcgcccccttagaaatatgtcttgtcaaaggtctcttgggtggtatagccctgcccaatattgcttggcatatataggggtgtcccctgggcctaagacgccccaataggtggtgtcttgagagagagacgtttctctctcagaacgattatccccccacctttgttggggtccgcgctcttgccctgattcctgtngattatagaggagccagaccacgtgttgccggttgggggtgcataccgagaagccactggggaccaagataaggctttgcttggaggcttggcgcaaggtctcacccaagtgttgcgcccaggtagagcgtccaagatagggcgttatatatggatgtattgtatcgctctgtgatataccctgcccacctcccacacttctgtatacttcacgtggctggagagaacgcgttctcacgagaactgtgttggattcacaattgggccacatcttaaaggtgtatagtatagtatgacagagtctggggtatatgagtaagcaacatgcacttcgtgaaaaccttcacgaaaggaaaaggaaaaatgttttgtggagcccactttggtttttttttttgcgtgtggccgagtttaagagtattagagttttaaaatccgtgacttttttatgggaaccacgttggccccaaaagtttgtccccagagaatttgagaccccatttaaaaagtttaatgtggaagaaaagaaaaaaaaaa

SEQ ID NO: 530457 - DNA, 381 bp, Homo sapiens
  misc_feature (128)..(128): n is a, c, g, or t
  misc_feature (145)..(145): n is a, c, g, or t
ggtgcacggggccccccggggcgtggggggaagaggtggttggatcaaaaccccccggaccccccggccgcccccctatatggggggccccttgggggggggggcccccaacccgggatttgggtttnagggggggccgggttgnttccgggaaccccccccatcccaaaggggggccccccccccccaccaatttttccccccaccgggggaagggcagggcaccccaatggggccccccccaaagcccaaaaagggggggccatttccccgggggttgggggaaaatttttttccctgggcctccccccccccccttgggttttttttttggccccccggcccgggcccaaaacccaaggggggttcccccccccccca

SEQ ID NO: 530458 - DNA, 726 bp, Homo sapiens
gattttaaatacactgacacgctactgttggttaaatttaaacatgttttacctgcagaaattctctcacaaataacctgcaataacttgcaaatgccatacccttttgaacacttccttttctccatgtcatacacattcaacacatgttcggctggcatttttgccaccacatgtccaattctcctcaacaacatgtgtccgctcatcattctctcgttacctgccagctgtcagctacacacggtttcagacgaaaaccccgatcaatttatcagtcgcgcatacctgtcactctaggtttccaacgccacgcccaaacatcaaaccagtgccagctccacgaaacattggccacacacacacaacacaacacacacacacaccacacacacacacacacaccaaccccattctttgtcgccgcccgcccctcgcgccgcccccgccaaaaacccctctcctaaacacacccaaccgcgcgcttacgcgagcgcgccccgaggccccccacccaccacgcactaccctctccacaaccctccggcccaaccctcgacactccccaccacgcagaagaccccctgcggcacacccagcacaaaacgcgcgcccgcgacccaactcccaccacaccctacctacaaccccccccgcgccgtgcaccacagcccgccccctctcaccaaacaccccacgcacggactcaccccacccacaaccatg

SEQ ID NO: 530459 - DNA, 182 bp, Homo sapiens
  misc_feature (35)..(35): n is a, c, g, or t
tcccgggggggcccccccccttaagcccccccccnaggggggggcccctccaacccgggagaaagaaaccctttttggtttttatttttggggcgggggggggtaacccccccccccgcccccgcccccgcccccggccgaaaggttttttttttttaaaaggcccttggggttttccggga

SEQ ID NO: 530460 - DNA, 702 bp, Homo sapiens
tcggaatggacacgcgtcgagtaaatggaaaacaaaagtcaaacccgtctagcacatattattgcctatacttcagttacttgtgccagtgaaggggtggccagaaaaaaaatcccaagtaccctcatcatcgcttactagccatcatgccccctcttcctctggcacattcctaagagctctattcataagcagcaaacggactgtgtcgattgcatctcttcctgacctacctggtggaggtgctaattggcgcatggacagaaaggggcgagccagagctcttggctttgtggatgcagaggcctgcattctgcatcggtctgtgtgcctgtaatttaggatggctttctgacaggtaagaaaatgagatacggttgatgacttaccatgcttttatattttggcagtttacaattctagacttttcctactatgtcgatcttttttttactttatattctttggaggtaacaatattttggagtcttaagaatttgattttataccattatgactgtaacaccttagggatctttcctgtagtcatatagttttactattgttagagagatctctgagattttgcaagagaaccaagcattccttaatggcagaactttgaaagttgatttgggaggcttttgctgcaggatctcaagaatagagagagagatgattctacttaaatgtttaattcta

SEQ ID NO: 530461 - DNA, 243 bp, Homo sapiens
  misc_feature (92)..(92): n is a, c, g, or t
  misc_feature (108)..(108): n is a, c, g, or t
catgattcccaaaaaggttaaaacctattccaaaaagctgtgccccagagaaatgtccttcgcctctcctatttcccctgccctggtttccnccaaaaggaaccagtncgtttattttaacagctttcctgaactataattcatataccataaaattcacccgtttaaagtgtatttagtgttttttagtattcatggaattgtgaaaccaccgcaatcaattttagaacatttttatcacct

SEQ ID NO: 530462 - DNA, 116 bp, Homo sapiens
cttgaccgggaaactggagtcctccatagggtttggttttgtagacttcaacagtgatgagtgatgccaaagctgccaagagagtgccatggatagacggtgaatattagattgga

SEQ ID NO: 530463 - DNA, 106 bp, Homo sapiens
gggcgtggtgcggagggcggtaggaaagggaaccagatagggaataataacgaacacctgctacgtgacaggccctgggctaagtacctgcccgggcggccgctcg

SEQ ID NO: 530464 - DNA, 154 bp, Homo sapiens
aaacatttctgggacacccgacgggagtgaggagcccctaaaggggtggggaggctgaccccttctttttgaaggcaaccacagggaggggactcacacggggcttttccactgggttccccttctttgttaactttttaaaagggcttacaaa

SEQ ID NO: 530465 - DNA, 80 bp, Homo sapiens
catggactcagtcctggtcctcagtaactctcgtttctgtgtggacctcgcttggaatggatctgtccctatcattcctt

SEQ ID NO: 530466 - DNA, 380 bp, Homo sapiens
ctgtgagaggctattctttcccagcacctgttggcgagatgagggtggtccagaaaccggggacctcactgctgcgatccacagagagctcctgggaaggggccataacattcacatgcttggagcagtcccagaacggaggccaacctgacttctatgcggttgaaccctacacgaagaaagaacttgttgctgttactttacctgacatgattcgcacttacaaagtcatggctgctgagaatattcctgagaatcccctgtggtctccgtatactaatattgacctggaccatgcctttggaaagtattactccaggtcttgggaagcatcagagccaatgggactggatggccctggaactggatatatcgactgg

SEQ ID NO: 530467 - DNA, 120 bp, Homo sapiens
gcaggactagaccaggcgccccgaggggaggacaaggccaaggaaggtggcgggaggacaaaggacaagtgctaacggagggggccgaaaacggaaagttcctgagggtgcgcattacgg

SEQ ID NO: 530468 - DNA, 379 bp, Homo sapiens
  misc_feature (108)..(108): n is a, c, g, or t
  misc_feature (115)..(115): n is a, c, g, or t
  misc_feature (209)..(209): n is a, c, g, or t
agagacctgctccttcccccagccggctccgaggagctgcatttctgcacaatgtacagtagccctcccgccccatctgtggttttgctttccacggtgaaagagttnggatatntgtccctgtcaaattgtcatgcccaatgctggaggtgggcctggtggcaggtgtttgggtcatgggggcagattcctcatggcttacttctgtnctcgaaatagtgagtgagttcttgccagatctggctgtttagtgctgtggcaccctcaccacccccgtgttgctcctgttcttcccgtgtgatgcgcctacccccacttcatcttccaccataactggaagcttcctgaggccctagagctgtacctcaaccgtggtacc

SEQ ID NO: 530469 - DNA, 3741 bp, Homo sapiens
gacggggtttcaccatgttggtcaggctggtctcaaactcctgacctcaagccatccgcccgcctcggcctcccaaagggctgggattacaggcgtgagccagcgctcccggccctgacctcattttttttttttctatttttaaaatagggattctagttctgttgcctgggctggagtgccgtggcgccatctcggctcaccgcaatctctgccttccggattcaagctattctcttgcctctgcctccggagggactgggactacaggcgcgcgccaccatgcccggctaatttttgtatttttagtagagacggggtttcaccatgttggccaggctggtctcgaactcctgacctcaggtgatccacctgcctcggccttccgaagtgctgggattacaggcatgagccactgcgcccggccctgacctcattatttctacccaccccctcccccaccactaccaccatcttcatctccagcctcagagatgcaaactcctggaccgcctgcccctttcctcagataaaccaaggtcgtaagttcaggctccgcctccccgcagggcctccccaaggtcacccgcttctttcctcgctcagctccttggtggcgttgtccgcgtgcccctccacagcggggccggcgctctaggctgcagcgggccgttcacacagcctcatcatctcgctggtttccggtgctcggcggctactctagccctcagccgggccctgggactctatcccctaaggccggttctctatggtcgacatcgcccctttgtcccgaatttcctccgggaggacgctctggtgggatccaagcacttcccccgctgcgtctgtggtcgcttttaggtgcaactggagaaggcactgaagccctacgagattcacaccgtcttcggtctcctggggtcggcgccgagtgggaggatggcggaactgctgccgcccacccctcgtcttctggctgcctccctctttgtgccccacaggctccccctctccacctcctggggcccatcatgaatggtgccccttccccagaggacggggcctccccctcgtctcccccgctgcccccacccccgccccctagttggcgggagttctgtgagtcccacgcccgggctgcggctctggactttgcccgccgttttcgcctctacctggcctcccacccccaatatgcggggcccggggccgaggctgccttctcccgccgttttgctgagctcttcctgcagcactttgaagccgaggtggcccgggcctctggctccctgtcgccacccatcctggctcccctgagccctggtgcggagatttcgccacatgacctgtcccttgagagctgcagggtgggtgggcccctggctgtgctgggcccttctcgatcatctgaggacctggccggccccctcccttcctcagtctcttcctcctctacaacctcctccaagccgaagctcaagaagcgcttttccctgcgttcagtgggtcgctctgtccgaggctcagtccgtggcatcctgcagtggcgggggaccgttgaccctccctcctccgctgggcccctggagacctcgtcaggccccccagtcttaggtggaaacagcaactccaactcctctggcggggctgggaccgttggtaggggactggtcagtgatggaacgtcccctggggaaagatggactcaccgttttgagaggctgagactcagtcggggagggggcgccttgaaggatggagcagggatggtgcagagggaagagctgctgagtttcatgggggctgaggaggcagcccctgacccagccggagtgggccggggaggaggggtggctgggcctccttcagggggaggagggcagcctcagtggcagaagtgtcgcctgctgcttcgaagtgaaggagaaggaggaggaggaagtcgcctggagttctttgtaccacccaaggcctctcggccccgactcagcatcccctgctcttctatcacagacgtccggacaaccacagccctggagatgcctgaccgggagaacacgtttgtggttaaggtggaaggtccatccgagtatatcatggagacagtggatgcccagcatgtgaaggcctgggtgtctgacatccaagaatgcctgagcccaggaccctgccctgctaccagtccccgccccatgaccctccctctggcccctgggacctcattccttacaagggagaacacagacagcctggagctgtcctgcctgaatcactcggagagtctacccagccaggacctgctgcttggacccagcgagagcaatgaccgcctgtcgcagggggcatatgggggcctctcagaccgcccctcggcatccatctcccccagctctgcctccattgccgcctcccattttgactcgatggaactgcttcccccagagttgcccccccgcatccccattgaagagggacccccagcagggacagttcatcccctctcagccccctaccctcccttggacactccggaaacagccacagggtccttcctgttccagggggagccagagggcggtgagggggaccagcccctctcagggtatccttggttccacgggatgctctctcggctcaaggctgcacagttggtgctgactggcggcactggctcccacggtgtcttcctggtgcgccagagtgagacaaggcggggtgaatacgtcctcaccttcaacttccagggcaaggccaagcacctgcgtttgtcgctgaacgaggagggtcagtgccgggtccagcacctgtggttccagtccattttcgatatgctcgagcacttccgggtgcaccccatccctttggagtcgggaggctccagtgatgttgtccttgtcagctatgtcccatcctcccagcgacagcagggtctgttttcttaccattcctatccagaaccgaccacctcccatgacccaccccagccccctgaacccccttcatggacagatcccccacagcctggggcagaagaggcgtcgagggcgccagaagtggcggcagcagcagccgcagcagccaaagagaggcaagagaaagagaaagcgggcggtggaggggtcccggaagagctggtccccgtggttgagctggtccccgtggttgaattggaagaggccatagccccaggctcagaggcccagggcgctgggtctggtggggacgcgggggtgcccccaatggtgcagctgcagcagtcaccactagggggtgatggagaggaagggggccaccccagggccattaacaaccagtactccttcgtgtgagccaaccccacccgctccaccctttttaaaccccccagccctgctcgtgagattgggctgggtagggacagaggaggccgaaatccctcccccatgcttcctgacccttgttggccaagggcatctttgatggtacaagcagaggctcgggagaggctcccgtcacacactacaggtcccctccccagggcaggggatttgggctccatgagctccttgaggggctcttctggtcagccccaccctgggggccatttccccattaactacccccagcccgaggcagggtgagggggaagggctgtcagttacattaaggtggttgttgttgttgttttaaacaaaatggagaagcataaataaataaaaaggtttatctcggttcaaaaaaaaaagtggaccaaaacag

SEQ ID NO: 530470 - DNA, 325 bp, Homo sapiens
  misc_feature (108)..(108): n is a, c, g, or t
  misc_feature (115)..(115): n is a, c, g, or t
  misc_feature (209)..(209): n is a, c, g, or t
agagacctgctccttcccccagccggctccgaggagctgcatttctgcacaatgtacagtagccctcccgccccatctgtggttttgctttccacggtgaaagagttnggatatntgtccctgtcaaattgtcatgcccaatgctggaggtgggcctggtggcaggtgtttgggtcatgggggcagattcctcatggcttacttctgtnctcgaaatagtgagtgagttcttgccagatctggctgtttagtgctgtggcacatgctcactgcccgcctgccaattttatttttacaaaggcaggttgttttgttaactgaggaa

SEQ ID NO: 530471 - DNA, 1384 bp, Homo sapiens
  misc_feature (54)..(54): n is a, c, g, or t
  misc_feature (64)..(64): n is a, c, g, or t
aagaaagcgaaagagggagagaagggagagagaaaaaaggaaaaaaaaaaaaanaaagaaagancgtgcccctctcagccccctaccctcccttggacactccggaaacagccacagggtccttcctgttccagggggagccagagggcggtgagggggaccagcccctctcagggtatccttggttccacgggatgctctctcggctcaaggctgcacagttggtgctgactggcggcactggctcccacggtgtcttcctggtgcgccagagtgagacaaggcggggtgaatacgtcctcaccttcaacttccagggcaaggccaagcacctgcgtttgtcgctgaacgaggagggtcagtgccgggtccagcacctgtggttccagtccattttcgatatgctcgagcacttccgggtgcaccccatccctttggagtcgggaggctccagtgatgttgtccttgtcagctatgtcccatcctcccagcgacagcagggccgggagcaggctgggagccatgcgggggtgtgcgagggagatggatgccaccccgatgcctcctgcaccctcatgcccttcggagcgagtgactgtgtaaccgaccacctcccatgacccaccccagccccctgaacccccttcatggacagatcccccacagcctggggcagaagaggcgtcgagggcgccagaagtggcggcagcagcagccgcagcagccaaagagaggcaagagaaagagaaagcgggcggtggaggggtcccggaagagctggtccccgtggttgagctggtccccgtggttgaattggaagaggccatagccccaggctcagaggcccagggcgctgggtctggtggggacgcgggggtgcccccaatggtgcagctgcagcagtcaccactagggggtgatggagaggaagggggccaccccagggccattaacaaccagtactccttcgtgtgagccaaccccacccgctccaccctttttaaaccccccagccctgctcgtgagattgggctgggtagggacagaggaggccgaaatccctcccccatgcttcctgacccttgttggccaagggcatctttgatggtacaagcagaggctcgggagaggctcccgtcacacactacaggtcccctccccagggcaggggatttgggctccatgagctccttgaggggctcttctggtcagccccaccctgggggccatttccccattaactacccccagcccgaggcagggtgagggggaagggctgtcagttacattaaggtggttgttgttgttgttttaaacaaaatggagaagcataaataaataaaaaggtttatctcggttcaaaaaaaaaagtggaccaaaacag

SEQ ID NO: 530472 - DNA, 196 bp, Homo sapiens
ccagcccctgttatgcaaagagcggagagccagcgacgggagctggagccccacgcccagccagaagctggggagggcctagctgccctactatcaccactccccatacaagcacgcgcacattccggcgtacgcccagcactaccagagctacatgcagctgatacagtagaagtcggccgcacggagaggtcag

SEQ ID NO: 530473 - DNA, 1187 bp, Homo sapiens
gagagatgagagataagatagacgagagatgaggatcacgcagcagatgatataccatagatgacgaccagagataaaaagaggacgagagtgaaatacgtcctcaccttcaacttccagggcaaggccaagcacctgcgtttgtcgctgaacgaggagggtcagtgccgggtccagcacctgtggttccagtccattttcgatatgctcgagcacttccgggtgcaccccatccctttggagtcgggaggctccagtgatgttgtccttgtcagctatgtcccatcctcccagcgacagcagggccgggagcaggctgggagccatgcgggggtgtgcgagggagatggatgccaccccgatgcctcctgcaccctcatgcccttcggagcgagtgactgtgtaaccgaccacctcccatgacccaccccagccccctgaacccccttcatggacagatcccccacagcctggggcagaagaggcgtcgagggcgccagaagtggcggcagcagcagccgcagcagccaaagagaggcaagagaaagagaaagcgggcggtggaggggtcccggaagagctggtccccgtggttgagctggtccccgtggttgaattggaagaggccatagccccaggctcagaggcccagggcgctgggtctggtggggacgcgggggtgcccccaatggtgcagctgcagcagtcaccactagggggtgatggagaggaagggggccaccccagggccattaacaaccagtactccttcgtgtgagccaaccccacccgctccaccctttttaaaccccccagccctgctcgtgagattgggctgggtagggacagaggaggccgaaatccctcccccatgcttcctgacccttgttggccaagggcatctttgatggtacaagcagaggctcgggagaggctcccgtcacacactacaggtcccctccccagggcaggggatttgggctccatgagctccttgaggggctcttctggtcagccccaccctgggggccatttccccattaactacccccagcccgaggcagggtgagggggaagggctgtcagttacattaaggtggttgttgttgttgttttaaacaaaatggagaagcataaataaataaaaaggtttatctcggttcaaaaaaaaaagtggaccaaaacag

SEQ ID NO: 530474 - DNA, 249 bp, Homo sapiens
agctctccaaagcggcatgcgagtatactggcggtcgttgaatatagtacgtccaagctcatctgcagctgggaacgcagacggttgagtcttccctggatcggtcagccccttggcatctggtgtcaaagaagatgatggctttgaggtaggcatactcattgtcatcgatctgcagcgcctggaagggcagcacccggctctccagccgaaggatctcactcttcagctggaagatttcagcctcat

SEQ ID NO: 530475 - DNA, 3408 bp, Homo sapiens
gacggggtttcaccatgttggtcaggctggtctcaaactcctgacctcaagccatccgcccgcctcggcctcccaaagggctgggattacaggcgtgagccagcgctcccggccctgacctcattttttttttttctatttttaaaatagggattctagttctgttgcctgggctggagtgccgtggcgccatctcggctcaccgcaatctctgccttccggattcaagctattctcttgcctctgcctccggagggactgggactacaggcgcgcgccaccatgcccggctaatttttgtatttttagtagagacggggtttcaccatgttggccaggctggtctcgaactcctgacctcaggtgatccacctgcctcggccttccgaagtgctgggattacaggcatgagccactgcgcccggccctgacctcattatttctacccaccccctcccccaccactaccaccatcttcatctccagcctcagagatgcaaactcctggaccgcctgcccctttcctcagataaaccaaggtcgtaagttcaggctccgcctccccgcagggcctccccaaggtcacccgcttctttcctcgctcagctccttggtggcgttgtccgcgtgcccctccacagcggggccggcgctctaggctgcagcgggccgttcacacagcctcatcatctcgctggtttccggtgctcggcggctactctagccctcagccgggccctgggactctatcccctaaggccggttctctatggtcgacatcgcccctttgtcccgaatttcctccgggaggacgctctggtgggatccaagcacttcccccgctgcgtctgtggtcgcttttaggtgcaactggagaaggcactgaagccctacgagattcacaccgtcttcggtctcctggggtcggcgccgagtgggaggatggcggaactgctgccgcccacccctcgtcttctggctgcctccctctttgtgccccacaggctccccctctccacctcctggggcccatcatgaatggtgccccttccccagaggacggggcctccccctcgtctcccccgctgcccccacccccgccccctagttggcgggagttctgtgagtcccacgcccgggctgcggctctggactttgcccgccgttttcgcctctacctggcctcccacccccaatatgcggggcccggggccgaggctgccttctcccgccgttttgctgagctcttcctgcagcactttgaagccgaggtggcccgggcctctggctccctgtcgccacccatcctggctcccctgagccctggtgcggagatttcgccacatgacctgtcccttgagagctgcagggtgggtgggcccctggctgtgctgggcccttctcgatcatctgaggacctggccggccccctcccttcctcagtctcttcctcctctacaacctcctccaagccgaagctcaagaagcgcttttccctgcgttcagtgggtcgctctgtccgaggctcagtccgtggcatcctgcagtggcgggggaccgttgaccctccctcctccgctgggcccctggagacctcgtcaggccccccagtcttaggtggaaacagcaactccaactcctctggcggggctgggaccgttggtaggggactggtcagtgatggaacgtcccctggggaaagatggactcaccgttttgagaggctgagactcagtcggggagggggcgccttgaaggatggagcagggatggtgcagagggaagagctgctgagtttcatgggggctgaggaggcagcccctgacccagccggagtgggccggggaggaggggtggctgggcctccttcagggggaggagggcagcctcagtggcagaagtgtcgcctgctgcttcgaagtgaaggagaaggaggaggaggaagtcgcctggagttctttgtaccacccaaggcctctcggccccgactcagcatcccctgctcttctatcacagacgtccggacaaccacagccctggagatgcctgaccgggagaacacgtttgtggttaaggtggaaggtccatccgagtatatcatggagacagtggatgcccagcatgtgaaggcctgggtgtctgacatccaagaatgcctgagcccaggaccctgccctgctaccagtccccgccccatgaccctccctctggcccctgggacctcattccttacaagggagaacacagacagcctggagctgtcctgcctgaatcactcggagagtctacccagccaggacctgctgcttggacccagcgagagcaatgaccgcctgtcgcagggggcatatgggggcctctcagaccgcccctcggcatccatctcccccagctctgcctccattgccgcctcccattttgactcgatggaactgcttcccccagagttgcccccccgcatccccattgaagagggacccccagcagggacagttcatcccctctcagccccctaccctcccttggacactccggaaacagccacagggtccttcctgttccagggggagccagagggcggtgagggggaccagcccctctcagggtatccttggttccacgggatgctctctcggctcaaggctgcacagttggtgctgactggcggcactggctcccacggtgtcttcctggtgcgccagagtgagacaaggcggggtgaatacgtcctcaccttcaacttccagggcaaggccaagcacctgcgtttgtcgctgaacgaggagggtcagtgccgggtccagcacctgtggttccagtccattttcgatatgctcgagcacttccgggtgcaccccatccctttggagtcgggaggctccagtgatgttgtccttgtcagctatgtcccatcctcccagcgacagcagggccgggagcaggctgggagccatgcgggggtgtgcgagggagatggatgccaccccgatgcctcctgcaccctcatgcccttcggagcgagtgactgtgtaaccgaccacctcccatgacccaccccagccccctgaacccccttcatggacagatcccccatgcttcctgacccttgttggccaagggcatctttgatggtacaagcagaggctcgggagaggctcccgtcacacactacaggtcccctccccagggcaggggatttgggctccatgagctccttgaggggctcttctggtcagccccaccctgggggccatttccccattaactacccccagcccgaggcagggtgagggggaagggctgtcagttacattaaggtggttgttgttgttgttttaaacaaaatggagaagcataaataaataaaaaggtttatctcggttcaaaaaaaaaagtggaccaaaacag

SEQ ID NO: 530476 - DNA, 3045 bp, Homo sapiens
  misc_feature (3004)..(3004): n is a, c, g, or t
gacggggtttcaccatgttggtcaggctggtctcaaactcctgacctcaagccatccgcccgcctcggcctcccaaagggctgggattacaggcgtgagccagcgctcccggccctgacctcattttttttttttctatttttaaaatagggattctagttctgttgcctgggctggagtgccgtggcgccatctcggctcaccgcaatctctgccttccggattcaagctattctcttgcctctgcctccggagggactgggactacaggcgcgcgccaccatgcccggctaatttttgtatttttagtagagacggggtttcaccatgttggccaggctggtctcgaactcctgacctcaggtgatccacctgcctcggccttccgaagtgctgggattacaggcatgagccactgcgcccggccctgacctcattatttctacccaccccctcccccaccactaccaccatcttcatctccagcctcagagatgcaaactcctggaccgcctgcccctttcctcagataaaccaaggtcgtaagttcaggctccgcctccccgcagggcctccccaaggtcacccgcttctttcctcgctcagctccttggtggcgttgtccgcgtgcccctccacagcggggccggcgctctaggctgcagcgggccgttcacacagcctcatcatctcgctggtttccggtgctcggcggctactctagccctcagccgggccctgggactctatcccctaaggccggttctctatggtcgacatcgcccctttgtcccgaatttcctccgggaggacgctctggtgggatccaagcacttcccccgctgcgtctgtggtcgcttttaggtgcaactggagaaggcactgaagccctacgagattcacaccgtcttcggtctcctggggtcggcgccgagtgggaggatggcggaactgctgccgcccacccctcgtcttctggctgcctccctctttgtgccccacaggctccccctctccacctcctggggcccatcatgaatggtgccccttccccagaggacggggcctccccctcgtctcccccgctgcccccacccccgccccctagttggcgggagttctgtgagtcccacgcccgggctgcggctctggactttgcccgccgttttcgcctctacctggcctcccacccccaatatgcggggcccggggccgaggctgccttctcccgccgttttgctgagctcttcctgcagcactttgaagccgaggtggcccgggcctctggctccctgtcgccacccatcctggctcccctgagccctggtgcggagatttcgccacatgacctgtcccttgagagctgcagggtgggtgggcccctggctgtgctgggcccttctcgatcatctgaggacctggccggccccctcccttcctcagtctcttcctcctctacaacctcctccaagccgaagctcaagaagcgcttttccctgcgttcagtgggtcgctctgtccgaggctcagtccgtggcatcctgcagtggcgggggaccgttgaccctccctcctccgctgggcccctggagacctcgtcaggccccccagtcttaggtggaaacagcaactccaactcctctggcggggctgggaccgttggtaggggactggtcagtgatggaacgtcccctggggaaagatggactcaccgttttgagaggctgagactcagtcggggagggggcgccttgaaggatggagcagggatggtgcagagggaagagctgctgagtttcatgggggctgaggaggcagcccctgacccagccggagtgggccggggaggaggggtggctgggcctccttcagggggaggagggcagcctcagtggcagaagtgtcgcctgctgcttcgaagtgaaggagaaggaggaggaggaagtcgcctggagttctttgtaccacccaaggcctctcggccccgactcagcatcccctgctcttctatcacagacgtccggacaaccacagccctggagatgcctgaccgggagaacacgtttgtggttaaggtggaaggtccatccgagtatatcatggagacagtggatgcccagcatgtgaaggcctgggtgtctgacatccaagaatgcctgagcccaggaccctgccctgctaccagtccccgccccatgaccctccctctggcccctgggacctcattccttacaagggagaacacagacagcctggagctgtcctgcctgaatcactcggagagtctacccagccaggacctgctgcttggacccagcgagagcaatgaccgcctgtcgcagggggcatatgggggcctctcagaccgcccctcggcatccatctcccccagctctgcctccattgccgcctcccattttgactcgatggaactgcttcccccagagttgcccccccgcatccccattgaagagggacccccagcagggacagttcatcccctctcagccccctaccctcccttggacactccggaaacagccacagggtccttcctgttccagggggagccagagggcggtgagggggaccagcccctctcagggtatccttggttccacgggatgctctctcggctcaaggctgcacagttggtgctgactggcggcactggctcccacggtgtcttcctggtgcgccagagtgagacaaggcggggtgaatacgtcctcaccttcaacttccagggcaaggccaagcacctgcgtttgtcgctgaacgaggagggtcagtgccgggtccagcacctgtggttccagtccattttcgatatgctcgagcacttccgggtgcaccccatccctttggagtcgggaggctccagtgatgttgtccttgtcagctatgtcccatcctcccagcgacagcagggtgagcagagcaggtctgcaggggaggaggtgcccgtgcacccaagaagtgaggtgtgtgtgccagaaagatngggcggggaggggggactatcaacaggagaagcttgcgtag

SEQ ID NO: 530477 - DNA, 882 bp, Homo sapiens
gaaggtaacggataagacagactataaagcattaaacaactaataatagaacctcaacaataaatagagagcaagagaatccgagaaacaacttgaaggtggataagatatatggctatagtaatagtcggagagttatggatcccagatccaataatggatagatcattcagacagaggatgagaaaatgagagaatttagaggatacatggaataatggcagaccgtcaagaaattaaggagataagatatacataaacacgtgcacatccgaaaaaaagctaagaatacatatggttctcaaatgtcttatggaagattgtttcagaaagatcaaatggttatggtcacgaaatataatgtctgtaaataagattccaatcaataggataggaatacttcataccaataattctctctctcattagcacgaatagcatggattaatagatacgaggctgcaactatgctaaagaacgatagagaataggaacaaacgtgtattccgagaatttctcgaatgggaaagaggggagacacaattataatctctctgtgcaggtattaagaaccaatcgaattcgcggtagctaaagtagcagggaaaatatctctagacgttcccataaaaagggaatacctatagatagaaaggggtaatctcaaaacctagactgtaatggagagaaggttgtgcgggacattaacttaggcaatgtcagagaccaggaaacattgtccggtgtagttgcttccatgactattaagccaagggtgattgaaatcaaagaccaaaaaagtgcaaaattctaaagcaaaaggacaagtatttggtttcccaaaataactcacgtgtgaacctgagacatttaaggttactg

SEQ ID NO: 530478 - DNA, 1425 bp, Homo sapiens
gacggggtttcaccatgttggtcaggctggtctcaaactcctgacctcaagccatccgcccgcctcggcctcccaaagggctgggattacaggcgtgagccagcgctcccggccctgacctcattttttttttttctatttttaaaatagggattctagttctgttgcctgggctggagtgccgtggcgccatctcggctcaccgcaatctctgccttccggattcaagctattctcttgcctctgcctccggagggactgggactacaggcgcgcgccaccatgcccggctaatttttgtatttttagtagagacggggtttcaccatgttggccaggctggtctcgaactcctgacctcaggtgatccacctgcctcggccttccgaagtgctgggattacaggcatgagccactgcgcccggccctgacctcattatttctacccaccccctcccccaccactaccaccatcttcatctccagcctcagagatgcaaactcctggaccgcctgcccctttcctcagataaaccaaggtcgtaagttcaggctccgcctccccgcagggcctccccaaggtcacccgcttctttcctcgctcagctccttggtggcgttgtccgcgtgcccctccacagcggggccggcgctctaggctgcagcgggccgttcacacagcctcatcatctcgctggtttccggtgctcggcggctactctagccctcagccgggccctgggactctatcccctaaggccggttctctatggtcgacatcgcccctttgtcccgaatttcctccgggaggacgctctggtgggatccaagcacttcccccgctgcgtctgtggtcgcttttaggtgcaactggagaaggcactgaagccctacgagattcacaccgtcttcggtctcctggggtcggcgccgagtgggaggatggcggaagtaagtatgaaggtgcccttccctcccgccgctgttctctatggtctcttccttcagcgacgggaaagggggtcctgacgcctgcgcggaaccgggctgggcgctcgtcgcgtagtgggtgggggcgcagggagcgggagccgccgccgccgccgccgccgccggagctaacctcggggaccgagatgcagctgctgccgcccacccctcgtcttctggctgcctccctctttgtgccccacaggctccccagggcaggggatttgggctccatgagctccttgaggggctcttctggtcagccccaccctgggggccatttccccattaactacccccagcccgaggcagggtgagggggaagggctgtcagttacattaaggtggttgttgttgttgttttaaacaaaatggagaagcataaataaataaaaaggtttatctcggttcaaaaaaaaaagtggaccaaaacag

SEQ ID NO: 530479 - DNA, 269 bp, Homo sapiens
tgaccctgagctttataccctcggaataagggccactgaaggttactgccatcttgaggtcacataggttgtgatgtcaacagacgggtgtcttgacattgttggggatccattccgacaatggtagctgttgctcttgtgctgcacgttaaggcatctgctcatcgacctccttcattgacatccgaccacggaagacagcagtcacggtgaggtatcggccgatggcggggtgtcacaggcaggcatcatgttcttggtttatcgag

SEQ ID NO: 530480 - DNA, 396 bp, Homo sapiens
  misc_feature (1)..(1): n is a, c, g, or t
  misc_feature (30)..(30): n is a, c, g, or t
  misc_feature (384)..(384): n is a, c, g, or t
nccatacttgtaatcctaacactttgggangctgaggcgggaggattgcttgagcccaggagtttgagaccagcctgggcaacatagcaagaccctgtttctgcaaatatttttcttttttaaaaaaaactagccaggcataggggcattttaaaaaaattagccaggaggtggagactggaggatcacttgagcccaggagttggaggctacagtgagctatgattgcaccactgtactccagcctgggtgacagagtgagaccctatatctaaataaataaataaataataaacataagtctttttgtaaagatgaacagacctcaagataatggttatctcctgacgggtgggggatttctgtcaggggagggggcaacancaggggcttctt

SEQ ID NO: 530481 - DNA, 715 bp, Homo sapiens
cagcagttggtggtcacagccaggggacgtctcgactgtcttgagttgtgtgtacattgatcagctaactccccgaagggaaccaactggatgtcacgttaggagtttctgttaaagtgtctccttgatggggactcagtactgtgtatagacgctgtgttctctcttctggcgggtgtgcgatcacgaaccactggggccttttaagaatctacagatgccgcgccgggcgccgtggctcacgcctggaatcccagcacttgttggagcgctgaggctgggctggatcacacacgcgcaggataacttgagaccatccttgccaatatggtgaacatcgcccatctctacaaatagagatacatagatacattaccggggtgtggtggcgtgtcagcagcctcccagctacttgggcgaggctgaggcaggacgcaatcgcttgaacccgggaggcagagattgctagtgagccgagatctacgccgacatgcacgtccagtcgctggccgacagagtgagtactctatctcagagaagcgaaagcaaatagaaacagatgcccggagcatttagactcagtaagttcggcatggggcctggcgatacaggtttaaaagttccataggctagttataacgtttacacctttgtttaagaaccactgcaacagagagattgcttcatggaagggctcctggcacgcatcttcata

SEQ ID NO: 530482 - DNA, 419 bp, Homo sapiens
catgatatcccagtgctttgagaggctgaggcaggaggattgtttgaggccaggagtttgaggacagcctggggaacatagcaagactccatctctacaaaaactgcagaaagttagctgagggtggtatgtgcctgtagtcccagctactcaggaggctgaggtgggaggatcacttaggccaggtgtattattagtttgttgtcatgctgcaatgaagagatacccaagactgggtaatttataaaggaaagaggattaattgactcacagttctgcagggctggggaggcctcaggaaatttacaatcatggcagaaggggaagcaaacatgtctttcctcacctggtggtagcagggaggaccattgcagtggggtaaaagccccctataaaatcatcaaatgttgtgagcagcg

SEQ ID NO: 530483 - DNA, 315 bp, Homo sapiens
gggagctgccctcgtagagcttaaggagcatgtctgtggaactgacaggccttagttgctcttcttcttgaaaatgatttatctttctttctggtgtcatctcagccagtttagaatatgctagaattttggtgagatttagcaaataggatgtcaatcaattagcagtcacctcaaaagaaattttattttcttcattttattgaattttgttatgcaaacaaagaagaaagacaacattagaagaatgcacttagaccttcttttctaccgatagaatgggggtggcaggacggcaagattcgtattttacca

SEQ ID NO: 530484 - DNA, 1203 bp, Homo sapiens
ctcagccacctgaagccaccctgagggcgggagaactcatccttttacaccagggaccggctggctagccctcaccctggcgctggactacctcctgctgatcagtcgactgtcagcaaacctgtccttgctcctgtccagagcagatgaggaaccggacgccagacatgggagactatgcatacctactcgcgcgtgcagagtagatgaatggggagcctcatggccctgctagtagaatgagcatgcctagtgtggcgcccataatcccttcaaggactgaagcctcgaagctgtccggggtggcacgtctgcgaaaagcttgtattccctcacgagatcgttggctatactagcagtggagaagatttcaaggggcacacatgtgcgtggaaccagtcttgagtgtgtcgcttcaaggcacacctgtagggggcagcactaatgttgcctgtatcagcacattggtgcgcttcgagaaccgcatcaaactcattgggaccaatccatagtccatgaggacacccttagcaagccccttagacaagtatccatagtgacatcgactgcgaagaaaggcgtcaagatgttagcctgactttcatacggccatgacccttagtgctcgtagcttgccaggacgcatagacccagggtgacacgcctcaggggaaagaggggccgtggaccaggcaaccttggtcatagatgaaagttcttccgcgcttcctcgtccctgtgagcggagcatacgtaggggggcgtgaccgaacatcgggatagagcctaagtaaccttcatgatgaatccgaactggttccggattagagccaggaaaccagggaccaattcacattgtgcccatgcaaacaccagtgggcatgaggaggtaggggtcgtaagagggagagcacgtgaaggtatcattggacgccctctcgcgttgggtcctttgtgcacagcaacgtgggggaatctgccccacgatgttgtcgctataacagggaagcccttccacattcacacattgcgataatttttgagctcgcaaagcgttatagcacacatcaacgaaagattatctccagtagtctaataacggcgacaaagggcattcctcttttggggacatcgaaacaggcggctgaattgatgcgaccggaattggacaaactacgacgggttacaacagaggaagccacg

SEQ ID NO: 530485 - DNA, 268 bp, Homo sapiens
gtaattcctacgacacggccgagagcggcagacactggttttattgtgtattaatatatctataattaataataataaggacagaacatagtatagaacacatctattgtagattaattcttaacaaacagagaggacaactagacaagatagcaaaagaagacaaatacaggagaaaacaaaagacaacaagagagagcagacacaaacaacgaaaaacatacacacgacaaagaaagacaaaaacagacgaacaagagagaacaaa

SEQ ID NO: 530486 - DNA, 800 bp, Homo sapiens
  misc_feature (205)..(205): n is a, c, g, or t
aggggctttcacctttccgcatgattttggaggcctttctccgccccgttggaccgtgtagtcctatgaaaccctgtgggtcaatttagcgtctaaatcacgtattgtaagaaaagctaggatgggattgtgagctcttgaggaagtgacttacatatcctacatgtgggactacagtatttccccaagcacagtattctcatcnccaagggtacatactgcttatcatagaggcccaggagggactgtttaaggttgccaaggtgaacgagctgagaggctttgtcctcgggcccagtaactctgaaatctctctttaaatcccccgctgtcccaggcagcagaattagcccatggtttcccccagtaggtagctgctttagcagtttaaggcccaaagtctgcttctgttgatcagaggtctctgaatttttgaagctggtgtttcgtttctggtgactgagcttaatcctttacaatccctccttgtaaatagtgtgctaatagcaaagagatctccccttttcaaagctgcaggacccgaccgtgccctaaattgacccacgtaactgatgtgcctcaggaagtcttttgccagctgtccctgtgaagaccccctcctcccccccagctgctgccttgcacactgaagcattctcaggctgtgccaagccgtgtagtcatcaagaccagttaatcccagggcttggttaagtgctgtgtgattacttgtttggatgagactcttacttttaaccacttacaatcaacttgggaaactaaattccgaaaggaaaaaa

SEQ ID NO: 530487 - DNA, 821 bp, Homo sapiens
  misc_feature (645)..(645): n is a, c, g, or t
gctgggaccctgtacacgtatcctgacaatgtggagggagttcaaggctctcatcgttgcctcagtacagcggggctcaggtccggtgctctccgcagcacccagttccatttggcaaagcaacggagccctgaattgctccgcgaatttcctgccggcaaggtcccagattgagggtgatgatggattcctgtgtgttggagagcaacgccattgcctactatgtgagcaatgaggagctgcggggaagtactccagaggcagcagcccaggtggtgcagtgggtgagctttgctgattccgatatagtgcccgccagacagtacctgggtgtaccccagcttgggcatcatgcacacaaaaacaggcactgagaatgcacatggaggaagtgaggcgaattctggggctgtctggatgcttacttgaagagcgaggacttattctggtgggcgaacgagtgacattggtgacatcacagtttgtcttgcaaccctgtatgtgggtctataaggcaggttctagagccttctttccgcaggcctttcgcaaataacaacggtggttcctcaggctgcattaaagcagggcccaaggtccgggcttgtcttgggcgaaagtgacacttgtggtgagaaagatggncccagatatgaatgctaacaaagtttggagagaccccaagcttaaaaaggacacacccacggaacgagcggggtccacgggaagaagaagcagaagcaccaggtgagggaaagagggagacaacaaggcggtgcctggtctgaggaggagcatggatgatgtgaacagaggcggtg

SEQ ID NO: 530488 - DNA, 766 bp, Homo sapiens
cagacgtctatagggcccctctctttggccactctgcctcgtaggatcccatccagggggcctgaagcgcatgtgtctctgcgcgggcgaaaaggggaacgactggagcgatccagcaccacaaacttaccctgtccaggtggaccacgaagctacccaagacatctctgcacagccctagcctttttggcttcacccactccgttcgggagcttggggacccggcactctacacttccttcaggggaactccagtctccaggctctgacgagctcacctggcagctaccagcacagcatcactggcggaccctgcgggcagcagcccagagcatcctggctgctggcgcccccgaaggcgcgatagccttcagagcctccagtgcctgctgcgggctggaggtgaagctagggggaccatggatgctgctgctggagctcaccctcctctgcagcctggtgcccatctgtgtgctgcgccggccacgcgagctaacccatgaaggctcagcgttcccgtcagaaagcacctgagcctagctcacctgccacgccgcggagcgccatcaccggccactagactcctggacctgctgcctgactacctgggcgacatacatgaacgcccggccagactggacgtgacgcctcccagataccactgcacgagatcataccggacatgcgcctacctacctggacccggtgactgacacagaatccacagcgcctaaaccgagcagacacgacggccacattgcacccc

SEQ ID NO: 530489 - DNA, 419 bp, Homo sapiens
aatgttgtggcgagcctgagactgcaactagttctttcagatacagtctgtgccccaaatcattaactgcgcaagttcttcgtgtacttggaatctccttggggttacttgataacttgtgccattaactcctcatcaagccaaatcccggttcccaactcgacctttccattgtttaggatatacttgtccatgacaggcgcaagagcgaggttaatagtgacaacgtatattgcttcctcactgaaagtgctccgtaactccggctcgggctcgagacattctgactttactttttccagatcaatggcgggaccgctgccaagcctcaggagcaggacgtcctggagcctccggttaaggtctcggagctccttcatttcagacacgagtgccccgtactccttgagcttcttggc

SEQ ID NO: 530490 - DNA, 421 bp, Homo sapiens
  misc_feature (360)..(360): n is a, c, g, or t
actactattactaatactcccccagagttagtattaatactatactattaataacagtgtactataatgcctaatattattactatactatgaacagataaatcagtggaggccttaaggacattaaaggaatggaccacattgcgcccaggtgtggtggctcatgcctgtaatcttagcactttgggaggccgaggcaggtggatcacctgaggataaaattattcttttattctactaaaaattaaaaaaaaatatagcccaggtgtggtggtgggctcttgtaattccagccacttgggaggctgaggcaggaggatcgcttgaacccaggaggtagaggttgcagtgagctgagantttgccactgcaccccagcccgggcaacagagtaagggtaagactgtctccaaaaaaaaaa

SEQ ID NO: 530491 - DNA, 144 bp, Homo sapiens
  misc_feature (128)..(128): n is a, c, g, or t
cccctcacaaatcaatttgcccaggcagcagccaaactcaagcacccccgcaaaccagcacgcagctcacctcaagcaaccagctcaaacagcagctccaccgcgtctcatgtcagcggcgacatcangtgggcaagcatttca

SEQ ID NO: 530492 - DNA, 178 bp, Homo sapiens
ctgggaggtgccagtgcacccataataaaagcatggcagaataatgcggaaagactacacagctttatcttctggcctacaacttctctcccatgactggatggttccttcccttaaacgttggactccaagtcctttacctttttgactctggacctttgaccacggactaaatggc

SEQ ID NO: 530493 - DNA, 782 bp, Homo sapiens
aaagcggtgtcgccggattacgggatgtgcacgcaccgcatgagcggcgtccggctgcgcgcctgctctcggcgccctgggctgtgtcctgctcctgcccctctcctcttcctcctcttcggacactgcggccctggagccggctcctggccgccctgccccgtgggtgctgctggggagaccggagcgtgggtgtgcctatgtggcccggggaggggagcgtggggggtgggggcggcgggggtctggctgcccgggcattgagtgctgtgaagagccgcaagaggctggcaggggtaaatgcctggggcagcagccggcggtccgggtgtacagcggccgttgtgctcgtgttgccaagagcccgctaccccggtgtgccgggcaagcgacgggcaccacactaaccccgagtcgggctggccccaaggctttgcgccgacccgccaagccccacgagggggctccggaaggatgcccccggcgcgtggcatggacatgtggcgcacattccaacccaccaatgagcgttacaacagcaaatcgagggggcagaccccttggccgggaatggcaagagtggggcttcccttttcacacaaagttaatggtttggaatctgacctacgcaccctacaagaggggggatagcaaattcccttggtcgacaacttcgggttccaaccttgggggcatggccccccacaacagtggttgcctcaccctatcagaaggaccttcggttggcaaacggatccaaccttccgcgcgcaaacatcccc

SEQ ID NO: 530494 - DNA, 868 bp, Homo sapiens
  misc_feature (23)..(23): n is a, c, g, or t
  misc_feature (76)..(82): n is a, c, g, or t
  misc_feature (84)..(84): n is a, c, g, or t
  misc_feature (170)..(170): n is a, c, g, or t
  misc_feature (190)..(190): n is a, c, g, or t
  misc_feature (286)..(286): n is a, c, g, or t
  misc_feature (299)..(299): n is a, c, g, or t
  misc_feature (304)..(304): n is a, c, g, or t
  misc_feature (324)..(324): n is a, c, g, or t
  misc_feature (340)..(340): n is a, c, g, or t
  misc_feature (398)..(398): n is a, c, g, or t
  misc_feature (481)..(481): n is a, c, g, or t
  misc_feature (493)..(493): n is a, c, g, or t
  misc_feature (507)..(507): n is a, c, g, or t
  misc_feature (514)..(514): n is a, c, g, or t
  misc_feature (520)..(520): n is a, c, g, or t
  misc_feature (552)..(552): n is a, c, g, or t
  misc_feature (577)..(584): n is a, c, g, or t
  misc_feature (589)..(589): n is a, c, g, or t
  misc_feature (596)..(596): n is a, c, g, or t
  misc_feature (598)..(604): n is a, c, g, or t
  misc_feature (631)..(631): n is a, c, g, or t
  misc_feature (641)..(641): n is a, c, g, or t
  misc_feature (644)..(644): n is a, c, g, or t
  misc_feature (648)..(648): n is a, c, g, or t
  misc_feature (653)..(653): n is a, c, g, or t
  misc_feature (679)..(679): n is a, c, g, or t
  misc_feature (696)..(696): n is a, c, g, or t
  misc_feature (707)..(707): n is a, c, g, or t
  misc_feature (716)..(717): n is a, c, g, or t
  misc_feature (720)..(720): n is a, c, g, or t
  misc_feature (724)..(724): n is a, c, g, or t
  misc_feature (730)..(730): n is a, c, g, or t
  misc_feature (736)..(736): n is a, c, g, or t
  misc_feature (738)..(738): n is a, c, g, or t
  misc_feature (743)..(743): n is a, c, g, or t
  misc_feature (747)..(747): n is a, c, g, or t
  misc_feature (749)..(749): n is a, c, g, or t
  misc_feature (755)..(757): n is a, c, g, or t
  misc_feature (775)..(775): n is a, c, g, or t
  misc_feature (792)..(792): n is a, c, g, or t
  misc_feature (849)..(849): n is a, c, g, or t
tttataataataattgttataanaatataatcaagagggaaaactgtttgtagtaaaggcaaaagcaaaaccagannnnnnnanatgattatattcttataacaattattattatgtactttatttttacttcaatggcaggaattcgaaatattggcatatggttcttntggattagattatataaaancagaagaggtagaaccaggccccaagcactcctttttctctgcatgatacttctgcttattgtccttcacactagctacatgatttatagtcttgntccccaatatgtnatgtntggaagccaaaattacttantagagactaatataanttctgataatcataaaggcaattcaaccctttctgtgccaaagagatgtgatgcagangctcctgaagatcagtgtactgttacccggacatactattccttcacaagttctggttcttcagtgcagcaaacaaaaaaagnaaccgggcctcncttggggtattttngaaaggncccccngcctcctgtcgtccagggaagaaatcggttanaaaaaaaaaaaaaaaaaaaaaaaannnnnnnnggggnggggggngnnnnnnnccccccccccccccccccccccccccngctttggggnggngggngggtntctgttatgcattttttaagtattancttacatttgggtttgntacttgctttnataaaaaannganaaanaaaaanaaaaananatttntttntntttttnnngtatattgtatatagatnacatttaattacatatnatgctatgtaatatagatactggcttgtgaggatgttgtgcaaatttttctctatgntatagtgttaatgattaaa

SEQ ID NO: 530495 - DNA, 862 bp, Homo sapiens
  misc_feature (238)..(238): n is a, c, g, or t
  misc_feature (258)..(258): n is a, c, g, or t
  misc_feature (354)..(354): n is a, c, g, or t
  misc_feature (367)..(367): n is a, c, g, or t
  misc_feature (372)..(372): n is a, c, g, or t
  misc_feature (392)..(392): n is a, c, g, or t
  misc_feature (408)..(408): n is a, c, g, or t
  misc_feature (466)..(466): n is a, c, g, or t
gttgcattgctgtttgtaatttctctcttcttgtccaaatttagataaagctcttcattcagctggaatagattctggtttcataatttctggagctaacctgagtaatccactgaatatgctttggcctttactacaaacagttttccctcttgattatattcttataacaattattattatgtactttatttttacttcaatggcaggaattcgaaatattggcatatggttcttntggattagattatataaaancagaagaggtagaaccaggccccaagcactcctttttctctgcatgatacttctgcttattgtccttcacactagctacatgatttatagtcttgntccccaatatgtnatgtntggaagccaaaattacttantagagactaatataanttctgataatcataaaggcaattcaaccctttctgtgccaaagagatgtgatgcagangctcctgaagatcagtgtactgttacccggacatactattccttcacaagttctggttcttcagtgctggttactattttggtactgggcctttcttggggtatatgatcggtcactttgtatcctgttgtaaagggaagaactcggtgatcgaaggagtcgatgaagattcagaccataagtgatgatgaggcctctggtctaattctggttgacaagccttctgtcttaaagggtttataatgcttactggaatatctggtaatgcatttttaaagtattaaactaacatttaggattggtaactaagttaccaaacatggggacatggtattagaacactatatttataaatgtttggaataacctgggtctaattacctttaatttcctaac

SEQ ID NO: 530496 - DNA, 901 bp, Homo sapiens
  misc_feature (901)..(901): n is a, c, g, or t
gttaatccaacacagtcatgcaagttttatttctgggatgcaaggttgattcaccatacagaaatcaataaatgtgattcaccaaataaacagaatcaaaagcaaaaactacatgatcatctcaatagatacacaaaaagcctataatataatccaacatcccttaatgacaaaagccctcaacagattaagcattaaagtagcatacctaaaaatagtaaaagccatctacgacaaacccacagccaacgtaatactgaatgagcaaaaactggaacggttcccctgtgggaaccggaacaagacaagtatgcccactttcaccactcctattcaatatagtactggatgtgctagccagcgcaatgaagaaagggaataaataaaaggcacccaaataaaaagagagaaaatcaaactctctctctttactgatatgattcaatacctagaaaaccctaaggactctgctaaggtctcctggaactgatacatgacttcactaaaattttaatatactaaaccaatgtacaaaaaatcctaacatttttatacaccaaatatgttctaggggagatccaactggagaacagaatcatttacatagccaaaaaagaaaaaaaaaaaaaaaacaaattgtggggccgtcggacccgcgaaaatttttgaaacctcgggtgggggcggcgccaagagtaagtaagggcatagagggtccagaaacgcgggagcaagggtgtggtttcccacaaaaaagccgggggagcgctggaaaccagagctgggtcagctcacaagaccggtagaccccggcgcagggacaaccgaacaccagaaccacggaccgacaagcgtcaacaacagacacagagcgaggaacaacacaagagacaacacacan

SEQ ID NO: 530497 - DNA, 3900 bp, Homo sapiens
  misc_feature (3374)..(3374): n is a, c, g, or t
  misc_feature (3646)..(3646): n is a, c, g, or t
  misc_feature (3900)..(3900): n is a, c, g, or t
ccgcctaccccaaaaccgagaacggaactgcccggtcccccgaaaaagaagggcggaacatttcggccaagtcctcagactaccgaaccggagagctccgaaaggggactacctgcgcctgcgcaccgccatcttgttaaaagagcccgcctctccctcggccggtcactctttcgccacgggcggggttgcaccatccggcagggcggggcccggccatggcgaccgcggagcccagcgggcgcgcgttgcggttgtctaccccgggaccccggcccagcggggctcgggaccgcgcgccgggagctgcggggccaccctccgggcagatcggtaatagagccctccgtctgggggagcgcacccccgcggccgtggaaaagcgggggccatacatggtgacgcgcgcaccctccattcaagccaagctgcggtcagtgaagtttaacaagggctatactgctcttagccagagtccagatgaaaacctggtgtccctcgactctgacagtgatggggagctgggatccagatactcctccgggtattcatctgcagagcaggtgaaccaggatgtgagccggcagctgcttcaggatgggtatcacctggatgagattccagatgacgaggacttggacctcatcccccctaagcccatggcctcttcaacatgctcctgctgctggtgctgtcttggggactcttcttcctgtaccctccagtagacattaccctccaaggtgggccctgctcaccatgaggcctacagagccctgttggccactcatagctcacacagtgcagtgagcactgaagtcactgacccctagaaagtgacctgcaggtagcccttacctgttgcttctcaggccagaggcccccatctgggctgtgggctgataggtagaattctgtagttttcctctgctgttggagcagagtttggagaagtcactttaataagggcaagacagaaaattctggttcttatggtgggtgacaaaggtggctaaggaaaacacttgcagacagcttgattggtatttgtcatagtgcttcagggaggcaaaaagggagctcttgtgcccaggctgtgctagatagtgttgaatggaggcagaaaatagcactttatggtttattatagctggcaatccaaaaaagaaactgtttgagaccagttcgagaaattccatttgctctattcttcctagctctaagatggtttgcaggcttgaccttcaagacagcataaagtgagtccttttgtccctcttcaggttgcacctgtctaactatgacagggatcatagcaggttgcttaatgatacagcaggatcctggcttccagaatccctggacctggggcatccccaactggtccaaccgtccgggtgagtttagtgattctggtttgcccttccctagttagagaaaaactgctctgacatgttcatatttatttatttgtatttccttggtctgggtgagtttcttcacccagtctttgagctaaagattaggtcgaaggtactggggctggccccagaagcctgcagtttttattattaccagcagagggagctacagggagcagtccggtgccttcctattgtttactttttaaacttttgagaagtagcaatggactcgtgagagtgggtatacagctgtgtgggctttgtcctagactgaggcttacagacaggaagggtaagagagacctaagccagctcctagacccttgcctgaggaaatcagtccaccagtgtagagggcctcccttcactccagcatggaccattctattgccagattcttctggtcacagcatgggccttactggatactcaggattgggctttaagcagacctctgggtgtgacacagcctctttcagcccccagcccaaacagcagaaataggcataatttctgctgtgacaccccctacccacaaattggagagtatatcttgctatactctataccaagcctctttctagaatttttccaacaggttttgttttgttttttggcttaactcagaaccatggtgagcgttctgctttgttttgttggagacagggtctctgtcacccaggctggagtgcagtggtgtaatcacagctcactgcagcctcaacctcccaggcccaagcagtcctcccacatggtgagctttgaatgggcatagacagggttcccagcccaatagtcgggattggggtataggttctacatgggaaagtatccagtctcttgctttactcagtgtcctgtgaccaccagaggcatgagagggacaacacactcttttcgctctaccacaaggggtgactagaagatgagcaagtctaataaaaagatacggccttatttgttatttgtctgacaaccatccttacgatggtaatcctgtgagtgcctgatggacatctatctttgtgtttttctcaaaccatggaaggttgagaggaatatacagtatctgggggctgacttactctactagctaggagcatcacagcagagagataggacagagaccagagtcatgccagcttggggtcttgggaagagaggcagatggttactctgttctggaatgggactctgcagctctatgcagtggccaacattctgagcactttgtgcaaatgcttgtagagctcaagaacatctccatccagaaccccttccccatctgcagagaccatgtccaggcctttcttgtgtctgcagaggtgaagtgcacatgtggaaagggatcaaatgtagcacagtgtaaagaaagacagcaacacaggtagagggacccagtgtgtgctgggaggtggctgtggaaggtaagtatagacctacatctctgttggggaggtggtcagggcagaatggcctgggtgtttagcagcttctaggggtgagggtggcaggaccccaaaaccaaggccctctgcatcgttgttgtaataatcagctctggcatattcagctgcaactgtccctgaagaagaggtttctgagctggctgaccccatgtaggagggtgttaccttgtagaaaaagctggagggacctggtgggacagtgcagtgaggcagggtagaaatggtcagttgtttagggccagtggccacataccaaaataccaccaatgtgcccagggccaaactgccttaattctgagtgctgtgtgttctgcaggtgacagtttcctgaggagaggggtgtatccaggcttacctcccagcaggagtggtaccatatggtgtttatgtactactctatagaactcttggcttgcacttctacagctctgtacatttataagaataaatgcaatcacactagttaaaaaaaaaaaaaaanaaaaaaaaaaaaaaaaaaaaaaaaaacaaaggaggggggcgggggcgcctcccaaagaatctacccccggggggggccccacagttttagcgcgcgcgcccccgattttttggtcaaagggggggccccctaaagggggagagcgcgcgttatataaaagacggcagaggcccggaggcgcgcggcgttttaacaacaaccgggcgggcagaggggaaaaacacagctgtggatgagggtggggaatctcttggggaggaggagaacccccntctactgctagcgggagggggcgacaaattagtgtggggaacaacacatatcctagaggggagtttatataaggcgtactagaagggaatatattacagaaattggaggtggtataatgagggggtgtaaacacgaagggagaattttggatgcgcagtgggttagtagaagttgttggagctagagcgggggatgtttgatctgttaggaaaagtattattatacgaggggcttgtgctagtatataagatgn

SEQ ID NO: 530498 - DNA, 2467 bp, Homo sapiens
ccgcctaccccaaaaccgagaacggaactgcccggtcccccgaaaaagaagggcggaacatttcggccaagtcctcagactaccgaaccggagagctccgaaaggggactacctgcgcctgcgcaccgccatcttgttaaaagagcccgcctctccctcggccggtcactctttcgccacgggcggggttgcaccatccggcagggcggggcccggccatggcgaccgcggagcccagcgggcgcgcgttgcggttgtctaccccgggaccccggcccagcggggctcgggaccgcgcgccgggagctgcggggccaccctccgggcagatcggtaatagagccctccgtctgggggagcgcacccccgcggccgtggaaaagcgggggccatacatggtgacgcgcgcaccctccattcaagccaagctgcagaagcaccgggacctggccaaggccgttctgcggagaaaaggcatgctgggggcctcgccgaaccgcccagactcttcagggaaaaggtcagtgaagtttaacaagggctatactgctcttagccagagtccagatgaaaacctggtgtccctcgactctgacagtgatggggagctgggatccagatactcctccgggtattcatctgcagagcaggtgaaccaggatgtgagccggcagctgcttcaggatgggtatcacctggatgagattccagatgacgaggacttggacctcatcccccctaagcccatggcctcttcaacatgctcctgctgctggtgctgtcttggggactcttcttcctgtaccctccagtagacattaccctccaaggtgggccctgctcaccatgaggcctacagagccctgttggccactcatagctcacacagtgcagtgagcactgaagtcactgacccctagaaagtgacctgcaggtagcccttacctgttgcttctcaggccagaggcccccatctgggctgtgggctgataggtagaattctgtagttttcctctgctgttggagcagagtttggagaagtcactttaataagggcaagacagaaaattctggttcttatggtgggtgacaaaggtggctaaggaaaacacttgcagacagcttgattggtatttgtcatagtgcttcagggaggcaaaaagggagctcttgtgcccaggctgtgctagatagtgttgaatggaggcagaaaatagcactttatggtttattatagctggcaatccaaaaaagaaactgtttgagaccagttcgagaaattccatttgctctattcttcctagctctaagatggtttgcaggcttgaccttcaagacagcataaagtgagtccttttgtccctcttcaggttgcacctgtctaactatgacagggatcatagcaggttgcttaatgatacagcaggatcctggcttccagaatccctggacctggggcatccccaactggtccaaccgtccgggtgagtttagtgattctggtttgcccttccctagttagagaaaaactgctctgacatgttcatatttatttatttgtatttccttggtctgggtgagtttcttcacccagtctttgagctaaagattaggtcgaaggtactggggctggccccagaagcctgcagtttttattattaccagcagagggagctacagggagcagtccggtgccttcctattgtttactttttaaacttttgagaagtagcaatggactcgtgagagtgggtatacagctgtgtgggctttgtcctagactgaggcttacagacaggaagggtaagagagacctaagccagctcctagacccttgcctgaggaaatcagtccaccagtgtagagggcctcccttcactccagcatggaccattctattgccagattcttctggtcacagcatgggccttactggatactcaggattgggctttaagcagacctctgggtgtgacacagcctctttcagcccccagcccaaacagcagaaataggcataatttctgctgtgacaccccctacccacaaattggagagtatatcttgctatactctataccaagcctctttctagaatttttccaacaggttttgttttgttttttggcttaactcagaaccatggtgagcgttctgctttgttttgttggagacagggtctctgtcacccaggctggagtgcagtggtgtaatcacagctcactgcagcctcaacctcccaggcccaagcagtcctcccacatggtgagctttgaatgggcatagacagggttcccagcccaatagtcgggattggggtataggttctacatgggaaagtatccagtctcttgctttactcagtgtcctgtgaccaccagaggcatgagagggacaacacactcttttcgctctaccacaaggggtgactagaagatgagcaagtctaataaaaagatacggcctt

SEQ ID NO: 530499 - DNA, 322 bp, Homo sapiens
gtgtgtgtgctgctgtgtgtgtgtgtgtgtggctgtgtgtgtgtgctgctgtgtgtgtgtgtgtgtggctgtgtgtgtgtgtgtgttttagctcccttggtcttgtaatgcagttaactgtgtgtgtgtgcgtgtgaacactctctgaggtctctggctgtgtataaaagtaaaggctttgtttcaccgtggctattttgtggttaccatggtaatcatagatttgttgagagcaacagggttaattctattcagatctaaatgaattcaagttaccgtaaacagaagtcagaatagatcgagtagcagagtgatggtcgac

SEQ ID NO: 530500 - DNA, 332 bp, Homo sapiens
  misc_feature (45)..(45): n is a, c, g, or t
  misc_feature (156)..(157): n is a, c, g, or t
tctctcggaggccccctaataccgagtggagtgtgggttcacccntggggggtgtgtcgctgtgatgggacacgtaggagtccgcgcttgaaaccagggccctgtgccgcggggctgccgagtgggtgtgtggactcggggccttcccagcaaaanncctctccggctctgggcccgagacaaccgcgagccccagccggtgaagggtactgggagcggctgggggttggtgaagtcgtgtctggtattgtgtcccctctatggacaaatgtatatgttaggtctcaatttgtgtggttaagtaaaaataaaaacattttcagacgaaaaaa

SEQ ID NO: 530501 - DNA, 519 bp, Homo sapiens
  misc_feature (402)..(402): n is a, c, g, or t
gctcgacctctgttgcctgagttaggaagatctgcctagctaaggctgagttacacatacaaaggaaagcagaccagcatgggcaccatagtgagaccccgtctacaaacaataacaaaaatttggccaggtacagtggccaaattacacctgtaatcccagcactttgggaggccgaggctggcggaccgcttagggccaggagttcaggaccagcctggccaacattgtgaaaccccatctctactaaaaacacaaaaatgagctgggcatggtggtgcacacctataatcccagctacccgggaggcggaggttgcagtgagccgagatcacgccactgcactccagccccggtgacagagcgggactctgtctgcaacacacacacacaaactagtgnggtgtggtggcacatgctcataagttccagctactcgagaggcttagggaagaagatcgcttgagccaagaagcccaagatgccgtgagctatgattgcctgtgcatccagccgggg

SEQ ID NO: 530502 - DNA, 4929 bp, Homo sapiens
ccgcctaccccaaaaccgagaacggaactgcccggtcccccgaaaaagaagggcggaacatttcggccaagtcctcagactaccgaaccggagagctccgaaaggggactacctgcgcctgcgcaccgccatcttgttaaaagagcccgcctctccctcggccggtcactctttcgccacgggcggggttgcaccatccggcagggcggggcccggccatggcgaccgcggagcccagcgggcgcgcgttgcggttgtctaccccgggaccccggcccagcggggctcgggaccgcgcgccgggagctgcggggccaccctccgggcagatcggtaatagagccctccgtctgggggagcgcacccccgcggccgtggaaaagcgggggccatacatggtgacgcgcgcaccctccattcaagccaagctgcagaagcaccgggacctggccaaggccgttctgcggagaaaaggcatgctgggggcctcgccgaaccgcccagactcttcagggaaaaggtctcagcaggcgccacctcctctgtgccagcagctttagagaaggctttaatccccaggacggaggcagggtgctctggtttaaggccgagctagcgattcccctgatgcaacctgtcaggttcactatctttaaaatgggaagaggaacaatctctcttttcctttaaggatgtgataggatcagataaagggcttcggaataagggagttctgtgagtgcacaggctcattcactatcattctcctcctctgttagggaggagaatggtggctggagtccccagcaatgaggacgaagagcagtgtgggaatggctagacctgtttttgtttgtttgtttttaacagaatagtaaactcggagctgcatagaaccttattcagtgcctccttttacagatgagggttgaaactcggagaagtgaaggttaaccctaaccttttacccaaagacttgcagtttttgtgtcctctgattaaataagtggggagagggtgcttttcctagatcaggcaaggggaggtgtgcttttttccaagacctatgggaggagtagaatacaggccgggcgtggtggctcacgactgtaattccagcactttgggaagccgaggcgggtggatcacttgaagtcaggagttcgagaccagcctggccaacatggtgaaagcccgtctctattaaaaatacaaaattagctgggcacgcctgtagtcccagctactcaagaggctgaggcaggaaaatcacttgagcatggtaggcggagattgcagtgagccgagatcgcgccactgcactgcagcctgggtgacagggccagactctgtctccaaaaaaagaaaaaaagaatgagaacatacacattctgaggcactgtagccaggtacatggagctgcaggcagtggtggctgtgaccagggagaaggcaagtcagtagtgcagtcaattctttctccttcagggcgaggactctgcctatccctgtgaaatgcctatgctttcatctatgtttggtctcttctcccccgtctcccctcagggtcagtgaagtttaacaagggctatactgctcttagccagagtccagatgaaaacctggtgtccctcgactctgacaggtgagtgctccccttggaaatacccccttgggaagcaacttggctgggactgaagatcgcctgatgcctttgcttgttccctgtctcctccaaggcccttcatgtacattccagggccgttctcttctgaacaatatcccttcccaggatggcttggttagaagactcataggtaatcgtgctgctctagaattcggagcaccaatgtccgggggatcatcctgccctgttatgtttgcattgttagtgagagtgaccctgtccctgccagaaccaattgagggaaccagtattattcaaggcctgttcggacttgagttctgttgtgtgtggcctttgcttcaaaagtcttccagatgcccttgcatgctctccgcctgatgatttacagctgtgcaccacaggtacctcccggaactgactgttttcctcttctcctagtgatggggagctgggatccagatactcctccgggtattcatctgcagagcaggtgaaccaggatgtgagccggcagctgcttcaggatgggtatcacctggatgagattccagatgacgaggacttggacctcatcccccctaagcccatggcctcttcaacatgctcctgctgctggtgctgtcttggggactcttcttcctgtaccctccagtagacattaccctccaaggtgggccctgctcaccatgaggcctacagagccctgttggccactcatagctcacacagtgcagtgagcactgaagtcactgacccctagaaagtgacctgcaggtagcccttacctgttgcttctcaggccagaggcccccatctgggctgtgggctgataggtagaattctgtagttttcctctgctgttggagcagagtttggagaagtcactttaataagggcaagacagaaaattctggttcttatggtgggtgacaaaggtggctaaggaaaacacttgcagacagcttgattggtatttgtcatagtgcttcagggaggcaaaaagggagctcttgtgcccaggctgtgctagatagtgttgaatggaggcagaaaatagcactttatggtttattatagctggcaatccaaaaaagaaactgtttgagaccagttcgagaaattccatttgctctattcttcctagctctaagatggtttgcaggcttgaccttcaagacagcataaagtgagtccttttgtccctcttcaggttgcacctgtctaactatgacagggatcatagcaggttgcttaatgatacagcaggatcctggcttccagaatccctggacctggggcatccccaactggtccaaccgtccgggtgagtttagtgattctggtttgcccttccctagttagagaaaaactgctctgacatgttcatatttatttatttgtatttccttggtctgggtgagtttcttcacccagtctttgagctaaagattaggtcgaaggtactggggctggccccagaagcctgcagtttttattattaccagcagagggagctacagggagcagtccggtgccttcctattgtttactttttaaacttttgagaagtagcaatggactcgtgagagtgggtatacagctgtgtgggctttgtcctagactgaggcttacagacaggaagggtaagagagacctaagccagctcctagacccttgcctgaggaaatcagtccaccagtgtagagggcctcccttcactccagcatggaccattctattgccagattcttctggtcacagcatgggccttactggatactcaggattgggctttaagcagacctctgggtgtgacacagcctctttcagcccccagcccaaacagcagaaataggcataatttctgctgtgacaccccctacccacaaattggagagtatatcttgctatactctataccaagcctctttctagaatttttccaacaggttttgttttgttttttggcttaactcagaaccatggtgagcgttctgctttgttttgttggagacagggtctctgtcacccaggctggagtgcagtggtgtaatcacagctcactgcagcctcaacctcccaggcccaagcagtcctcccacatggtgagctttgaatgggcatagacagggttcccagcccaatagtcgggattggggtataggttctacatgggaaagtatccagtctcttgctttactcagtgtcctgtgaccaccagaggcatgagagggacaacacactcttttcgctctaccacaaggggtgactagaagatgagcaagtctaataaaaagatacggccttatttgttatttgtctgacaaccatccttacgatggtaatcctgtgagtgcctgatggacatctatctttgtgtttttctcaaaccatggaaggttgagaggaatatacagtatctgggggctgacttactctactagctaggagcatcacagcagagagataggacagagaccagagtcatgccagcttggggtcttgggaagagaggcagatggttactctgttctggaatgggactctgcagctctatgcagtggccaacattctgagcactttgtgcaaatgcttgtagagctcaagaacatctccatccagaaccccttccccatctgcagagaccatgtccaggcctttcttgtgtctgcagaggtgaagtgcacatgtggaaagggatcaaatgtagcacagtgtaaagaaagacagcaacacaggtagagggacccagtgtgtgctgggaggtggctgtggaaggtaagtatagacctacatctctgttggggaggtggtcagggcagaatggcctgggtgtttagcagcttctaggggtgagggtggcaggaccccaaaaccaaggccctctgcatcgttgttgtaataatcagctctggcatattcagctgcaactgtccctgaagaagaggtttctgagctggctgaccccatgtaggagggtgttaccttgtagaaaaagctggagggacctggtgggacagtgcagtgaggcagggtagaaatggtcagttgtttagggccagtggccacataccaaaataccaccaatgtgcccagggccaaactgccttaattctgagtgctgtgtgttctgcaggtgacagtttcctgaggagaggggtgtatccaggcttacctcccagcaggagtggtaccatatggtgtttatgtactactctatagaactcttggcttgcacttctacagctctgtacatttataagaataaatgcaatcacact

SEQ ID NO: 530503 - DNA, 3441 bp, Homo sapiens
ccgcctaccccaaaaccgagaacggaactgcccggtcccccgaaaaagaagggcggaacatttcggccaagtcctcagactaccgaaccggagagctccgaaaggggactacctgcgcctgcgcaccgccatcttgttaaaagagcccgcctctccctcggccggtcactctttcgccacgggcggggttgcaccatccggcagggcggggcccggccatggcgaccgcggagcccagcgggcgcgcgttgcggttgtctaccccgggaccccggcccagcggggctcgggaccgcgcgccgggagctgcggggccaccctccgggcagatcggtaatagagccctccgtctgggggagcgcacccccgcggccgtggaaaagcgggggccatacatggtgacgcgcgcaccctccattcaagccaagctgcagaagcaccgggacctggccaaggccgttctgcggagaaaaggcatgctgggggcctcgccgaaccgcccagactcttcagggaaaaggtcagtgaagtttaacaagggctatactgctcttagccagagtccagatgaaaacctggtgtccctcgactctgacagtgatggggagctgggatccagatactcctccgggtattcatctgcagagcaggtgaaccaggatgtgagccggcagctgcttcaggatgggtatcacctggatgagattccagatgacgaggacttggacctcatcccccctaagcccatggcctcttcaacatgctcctgctgctggtgctgtcttggggactcttcttcctgtaccctccagtagacattaccctccaaggtgggccctgctcaccatgaggcctacagagccctgttggccactcatagctcacacagtgcagtgagcactgaagtcactgacccctagaaagtgacctgcaggtagcccttacctgttgcttctcaggccagaggcccccatctgggctgtgggctgataggtagaattctgtagttttcctctgctgttggagcagagtttggagaagtcactttaataagggcaagacagaaaattctggttcttatggtgggtgacaaaggtggctaaggaaaacacttgcagacagcttgattggtatttgtcatagtgcttcagggaggcaaaaagggagctcttgtgcccaggctgtgctagatagtgttgaatggaggcagaaaatagcactttatggtttattatagctggcaatccaaaaaagaaactgtttgagaccagttcgagaaattccatttgctctattcttcctagctctaagatggtttgcaggcttgaccttcaagacagcataaagtgagtccttttgtccctcttcaggttgcacctgtctaactatgacagggatcatagcaggttgcttaatgatacagcaggatcctggcttccagaatccctggacctggggcatccccaactggtccaaccgtccgggtgagtttagtgattctggtttgcccttccctagttagagaaaaactgctctgacatgttcatatttatttatttgtatttccttggtctgggtgagtttcttcacccagtctttgagctaaagattaggtcgaaggtactggggctggccccagaagcctgcagtttttattattaccagcagagggagctacagggagcagtccggtgccttcctattgtttactttttaaacttttgagaagtagcaatggactcgtgagagtgggtatacagctgtgtgggctttgtcctagactgaggcttacagacaggaagggtaagagagacctaagccagctcctagacccttgcctgaggaaatcagtccaccagtgtagagggcctcccttcactccagcatggaccattctattgccagattcttctggtcacagcatgggccttactggatactcaggattgggctttaagcagacctctgggtgtgacacagcctctttcagcccccagcccaaacagcagaaataggcataatttctgctgtgacaccccctacccacaaattggagagtatatcttgctatactctataccaagcctctttctagaatttttccaacaggttttgttttgttttttggcttaactcagaaccatggtgagcgttctgctttgttttgttggagacagggtctctgtcacccaggctggagtgcagtggtgtaatcacagctcactgcagcctcaacctcccaggcccaagcagtcctcccacatggtgagctttgaatgggcatagacagggttcccagcccaatagtcgggattggggtataggttctacatgggaaagtatccagtctcttgctttactcagtgtcctgtgaccaccagaggcatgagagggacaacacactcttttcgctctaccacaaggggtgactagaagatgagcaagtctaataaaaagatacggccttatttgttatttgtctgacaaccatccttacgatggtaatcctgtgagtgcctgatggacatctatctttgtgtttttctcaaaccatggaaggttgagaggaatatacagtatctgggggctgacttactctactagctaggagcatcacagcagagagataggacagagaccagagtcatgccagcttggggtcttgggaagagaggcagatggttactctgttctggaatgggactctgcagctctatgcagtggccaacattctgagcactttgtgcaaatgcttgtagagctcaagaacatctccatccagaaccccttccccatctgcagagaccatgtccaggcctttcttgtgtctgcagaggtgaagtgcacatgtggaaagggatcaaatgtagcacagtgtaaagaaagacagcaacacaggtagagggacccagtgtgtgctgggaggtggctgtggaaggtaagtatagacctacatctctgttggggaggtggtcagggcagaatggcctgggtgtttagcagcttctaggggtgagggtggcaggaccccaaaaccaaggccctctgcatcgttgttgtaataatcagctctggcatattcagctgcaactgtccctgaagaagaggtttctgagctggctgaccccatgtaggagggtgttaccttgtagaaaaagctggagggacctggtgggacagtgcagtgaggcagggtagaaatggtcagttgtttagggccagtggccacataccaaaataccaccaatgtgcccagggccaaactgccttaattctgagtgctgtgtgttctgcaggtgacagtttcctgaggagaggggtgtatccaggcttacctcccagcaggagtggtaccatatggtgtttatgtactactctatagaactcttggcttgcacttctacagctctgtacatttataagaataaatgcaatcacact

SEQ ID NO: 530504 - DNA, 752 bp, Homo sapiens
  misc_feature (304)..(304): n is a, c, g, or t
agcggctctgttctcgattaccttgggcaacggctgaggcgcggcagaccggtggctctgcaccgtccatggtagggagatatgagtggctggactctcagccagccactgggatgtgttcgcggctttggagcttgatggccggagagagctcccgagaggaggcggctgccagcgttacgtgtcttctgacggtggacggtacgactttggggtgtttgcgctctaggattctccgctgcccgtttcctctgaacacatggaccaggagagggaagtgtgactctgaaaggtcacacgtaantacatttttctaaggagctgaacaacgaatccaagtcgctgtcaagctgtcgagagtactgagtagatcttgctgctgtctatactcttggaaagcacatcctaggatctttgctagattatcctgtggaaggaaatatgcctaatagtcaatgagaacgccggacagcacccccagatggctgggagttggatcgagccaacagtggatgaattagatcagatgatgagagaagctgaaacagaagcgcctgagggaacagaggaacgtggaatctctgtggcccatcttcagagatccgaccaccagaataagcccgcgtaccatcttcgagctcttttacaagcggacgactgccgatcgatgagagaactctatgaagtatgtatgaaagaaggctatgcagacaaaagacctggttgcgaattgggaaaaagcaggatatgag

SEQ ID NO: 530505 - DNA, 335 bp, Homo sapiens
ggaaatgttagagatgtcggctgtgcccagtgggcgtctagggccggcgtgtgggctaccggtgttgtttgccactgtgctctaagcgcggtctgatcttgtggcacagatttcataggaggcatgccgagaggtcaggtcttctatagaacactggtttgcaatattgcgatcttatccgacagtgtaacccgtgttagatggatcctgattgcaaaggatgcctttaggaagaagcacaatttggaaccagctgtgttcaagagatattcttgtagttcgcggatgtaaaggttttggacgacaatgggaacaatggtgtagctgagcttctc

SEQ ID NO: 530506 - DNA, 4234 bp, Homo sapiens
gcggccgcgtccccagggcgggttccggagctccgctgggcctcggccccggagggaaggggttagctgcagcctgctctcgcccctcaaaatccgttcggaaagagcggcctcccagccttcgggagacgcggcggagtggggaagacccggctgacccgggtcctttaacttccagagaagcaccgggacctggccaaggccgttctgcggagaaaaggcatgctgggggcctcgccgaaccgcccagactcttcagggaaaaggtctcagcaggcgccacctcctctgtgccagcagctttagagaaggctttaatccccaggacggaggcagggtgctctggtttaaggccgagctagcgattcccctgatgcaacctgtcaggttcactatctttaaaatgggaagaggaacaatctctcttttcctttaaggatgtgataggatcagataaagggcttcggaataagggagttctgtgagtgcacaggctcattcactatcattctcctcctctgttagggaggagaatggtggctggagtccccagcaatgaggacgaagagcagtgtgggaatggctagacctgtttttgtttgtttgtttttaacagaatagtaaactcggagctgcatagaaccttattcagtgcctccttttacagatgagggttgaaactcggagaagtgaaggttaaccctaaccttttacccaaagacttgcagtttttgtgtcctctgattaaataagtggggagagggtgcttttcctagatcaggcaaggggaggtgtgcttttttccaagacctatgggaggagtagaatacaggccgggcgtggtggctcacgactgtaattccagcactttgggaagccgaggcgggtggatcacttgaagtcaggagttcgagaccagcctggccaacatggtgaaagcccgtctctattaaaaatacaaaattagctgggcacgcctgtagtcccagctactcaagaggctgaggcaggaaaatcacttgagcatggtaggcggagattgcagtgagccgagatcgcgccactgcactgcagcctgggtgacagggccagactctgtctccaaaaaaagaaaaaaagaatgagaacatacacattctgaggcactgtagccaggtacatggagctgcaggcagtggtggctgtgaccagggagaaggcaagtcagtagtgcagtcaattctttctccttcagggcgaggactctgcctatccctgtgaaatgcctatgctttcatctatgtttggtctcttctcccccgtctcccctcagggtcagtgaagtttaacaagggctatactgctcttagccagagtccagatgaaaacctggtgtccctcgactctgacagtgatggggagctgggatccagatactcctccgggtattcatctgcagagcaggtgaaccaggatgtgagccggcagctgcttcaggatgggtatcacctggatgagattccagatgacgaggacttggacctcatcccccctaagcccatggcctcttcaacatgctcctgctgctggtgctgtcttggggactcttcttcctgtaccctccagtagacattaccctccaaggtgggccctgctcaccatgaggcctacagagccctgttggccactcatagctcacacagtgcagtgagcactgaagtcactgacccctagaaagtgacctgcaggtagcccttacctgttgcttctcaggccagaggcccccatctgggctgtgggctgataggtagaattctgtagttttcctctgctgttggagcagagtttggagaagtcactttaataagggcaagacagaaaattctggttcttatggtgggtgacaaaggtggctaaggaaaacacttgcagacagcttgattggtatttgtcatagtgcttcagggaggcaaaaagggagctcttgtgcccaggctgtgctagatagtgttgaatggaggcagaaaatagcactttatggtttattatagctggcaatccaaaaaagaaactgtttgagaccagttcgagaaattccatttgctctattcttcctagctctaagatggtttgcaggcttgaccttcaagacagcataaagtgagtccttttgtccctcttcaggttgcacctgtctaactatgacagggatcatagcaggttgcttaatgatacagcaggatcctggcttccagaatccctggacctggggcatccccaactggtccaaccgtccgggtgagtttagtgattctggtttgcccttccctagttagagaaaaactgctctgacatgttcatatttatttatttgtatttccttggtctgggtgagtttcttcacccagtctttgagctaaagattaggtcgaaggtactggggctggccccagaagcctgcagtttttattattaccagcagagggagctacagggagcagtccggtgccttcctattgtttactttttaaacttttgagaagtagcaatggactcgtgagagtgggtatacagctgtgtgggctttgtcctagactgaggcttacagacaggaagggtaagagagacctaagccagctcctagacccttgcctgaggaaatcagtccaccagtgtagagggcctcccttcactccagcatggaccattctattgccagattcttctggtcacagcatgggccttactggatactcaggattgggctttaagcagacctctgggtgtgacacagcctctttcagcccccagcccaaacagcagaaataggcataatttctgctgtgacaccccctacccacaaattggagagtatatcttgctatactctataccaagcctctttctagaatttttccaacaggttttgttttgttttttggcttaactcagaaccatggtgagcgttctgctttgttttgttggagacagggtctctgtcacccaggctggagtgcagtggtgtaatcacagctcactgcagcctcaacctcccaggcccaagcagtcctcccacatggtgagctttgaatgggcatagacagggttcccagcccaatagtcgggattggggtataggttctacatgggaaagtatccagtctcttgctttactcagtgtcctgtgaccaccagaggcatgagagggacaacacactcttttcgctctaccacaaggggtgactagaagatgagcaagtctaataaaaagatacggccttatttgttatttgtctgacaaccatccttacgatggtaatcctgtgagtgcctgatggacatctatctttgtgtttttctcaaaccatggaaggttgagaggaatatacagtatctgggggctgacttactctactagctaggagcatcacagcagagagataggacagagaccagagtcatgccagcttggggtcttgggaagagaggcagatggttactctgttctggaatgggactctgcagctctatgcagtggccaacattctgagcactttgtgcaaatgcttgtagagctcaagaacatctccatccagaaccccttccccatctgcagagaccatgtccaggcctttcttgtgtctgcagaggtgaagtgcacatgtggaaagggatcaaatgtagcacagtgtaaagaaagacagcaacacaggtagagggacccagtgtgtgctgggaggtggctgtggaaggtaagtatagacctacatctctgttggggaggtggtcagggcagaatggcctgggtgtttagcagcttctaggggtgagggtggcaggaccccaaaaccaaggccctctgcatcgttgttgtaataatcagctctggcatattcagctgcaactgtccctgaagaagaggtttctgagctggctgaccccatgtaggagggtgttaccttgtagaaaaagctggagggacctggtgggacagtgcagtgaggcagggtagaaatggtcagttgtttagggccagtggccacataccaaaataccaccaatgtgcccagggccaaactgccttaattctgagtgctgtgtgttctgcaggtgacagtttcctgaggagaggggtgtatccaggcttacctcccagcaggagtggtaccatatggtgtttatgtactactctatagaactcttggcttgcacttctacagctctgtacatttataagaataaatgcaatcacact

SEQ ID NO: 530507 - DNA, 3882 bp, Homo sapiens
ccgcctaccccaaaaccgagaacggaactgcccggtcccccgaaaaagaagggcggaacatttcggccaagtcctcagactaccgaaccggagagctccgaaaggggactacctgcgcctgcgcaccgccatcttgttaaaagagcccgcctctccctcggccggtcactctttcgccacgggcggggttgcaccatccggcagggcggggcccggccatggcgaccgcggagcccagcgggcgcgcgttgcggttgtctaccccgggaccccggcccagcggggctcgggaccgcgcgccgggagctgcggggccaccctccgggcagatcggtaatagagccctccgtctgggggagcgcacccccgcggccgtggaaaagcgggggccatacatggtgacgcgcgcaccctccattcaagccaagctgcagaagcaccgggacctggccaaggccgttctgcggagaaaaggcatgctgggggcctcgccgaaccgcccagactcttcagggaaaaggtcagtgaagtttaacaagggctatactgctcttagccagagtccagatgaaaacctggtgtccctcgactctgacaggtgagtgctccccttggaaatacccccttgggaagcaacttggctgggactgaagatcgcctgatgcctttgcttgttccctgtctcctccaaggcccttcatgtacattccagggccgttctcttctgaacaatatcccttcccaggatggcttggttagaagactcataggtaatcgtgctgctctagaattcggagcaccaatgtccgggggatcatcctgccctgttatgtttgcattgttagtgagagtgaccctgtccctgccagaaccaattgagggaaccagtattattcaaggcctgttcggacttgagttctgttgtgtgtggcctttgcttcaaaagtcttccagatgcccttgcatgctctccgcctgatgatttacagctgtgcaccacaggtacctcccggaactgactgttttcctcttctcctagtgatggggagctgggatccagatactcctccgggtattcatctgcagagcaggtgaaccaggatgtgagccggcagctgcttcaggatgggtatcacctggatgagattccagatgacgaggacttggacctcatcccccctaagcccatggcctcttcaacatgctcctgctgctggtgctgtcttggggactcttcttcctgtaccctccagtagacattaccctccaaggtgggccctgctcaccatgaggcctacagagccctgttggccactcatagctcacacagtgcagtgagcactgaagtcactgacccctagaaagtgacctgcaggtagcccttacctgttgcttctcaggccagaggcccccatctgggctgtgggctgataggtagaattctgtagttttcctctgctgttggagcagagtttggagaagtcactttaataagggcaagacagaaaattctggttcttatggtgggtgacaaaggtggctaaggaaaacacttgcagacagcttgattggtatttgtcatagtgcttcagggaggcaaaaagggagctcttgtgcccaggctgtgctagatagtgttgaatggaggcagaaaatagcactttatggtttattatagctggcaatccaaaaaagaaactgtttgagaccagttcgagaaattccatttgctctattcttcctagctctaagatggtttgcaggcttgaccttcaagacagcataaagtgagtccttttgtccctcttcaggttgcacctgtctaactatgacagggatcatagcaggttgcttaatgatacagcaggatcctggcttccagaatccctggacctggggcatccccaactggtccaaccgtccgggtgagtttagtgattctggtttgcccttccctagttagagaaaaactgctctgacatgttcatatttatttatttgtatttccttggtctgggtgagtttcttcacccagtctttgagctaaagattaggtcgaaggtactggggctggccccagaagcctgcagtttttattattaccagcagagggagctacagggagcagtccggtgccttcctattgtttactttttaaacttttgagaagtagcaatggactcgtgagagtgggtatacagctgtgtgggctttgtcctagactgaggcttacagacaggaagggtaagagagacctaagccagctcctagacccttgcctgaggaaatcagtccaccagtgtagagggcctcccttcactccagcatggaccattctattgccagattcttctggtcacagcatgggccttactggatactcaggattgggctttaagcagacctctgggtgtgacacagcctctttcagcccccagcccaaacagcagaaataggcataatttctgctgtgacaccccctacccacaaattggagagtatatcttgctatactctataccaagcctctttctagaatttttccaacaggttttgttttgttttttggcttaactcagaaccatggtgagcgttctgctttgttttgttggagacagggtctctgtcacccaggctggagtgcagtggtgtaatcacagctcactgcagcctcaacctcccaggcccaagcagtcctcccacatggtgagctttgaatgggcatagacagggttcccagcccaatagtcgggattggggtataggttctacatgggaaagtatccagtctcttgctttactcagtgtcctgtgaccaccagaggcatgagagggacaacacactcttttcgctctaccacaaggggtgactagaagatgagcaagtctaataaaaagatacggccttatttgttatttgtctgacaaccatccttacgatggtaatcctgtgagtgcctgatggacatctatctttgtgtttttctcaaaccatggaaggttgagaggaatatacagtatctgggggctgacttactctactagctaggagcatcacagcagagagataggacagagaccagagtcatgccagcttggggtcttgggaagagaggcagatggttactctgttctggaatgggactctgcagctctatgcagtggccaacattctgagcactttgtgcaaatgcttgtagagctcaagaacatctccatccagaaccccttccccatctgcagagaccatgtccaggcctttcttgtgtctgcagaggtgaagtgcacatgtggaaagggatcaaatgtagcacagtgtaaagaaagacagcaacacaggtagagggacccagtgtgtgctgggaggtggctgtggaaggtaagtatagacctacatctctgttggggaggtggtcagggcagaatggcctgggtgtttagcagcttctaggggtgagggtggcaggaccccaaaaccaaggccctctgcatcgttgttgtaataatcagctctggcatattcagctgcaactgtccctgaagaagaggtttctgagctggctgaccccatgtaggagggtgttaccttgtagaaaaagctggagggacctggtgggacagtgcagtgaggcagggtagaaatggtcagttgtttagggccagtggccacataccaaaataccaccaatgtgcccagggccaaactgccttaattctgagtgctgtgtgttctgcaggtgacagtttcctgaggagaggggtgtatccaggcttacctcccagcaggagtggtaccatatggtgtttatgtactactctatagaactcttggcttgcacttctacagctctgtacatttataagaataaatgcaatcacact

SEQ ID NO: 530508 - DNA, 451 bp, Homo sapiens
  misc_feature (147)..(147): n is a, c, g, or t
ccccatcaacccaacgagtggataaagaaaatgtgttttatatacaccgtagaatactactccagcccataaaaaaggaatgaaataatgtcttttgcagcaacttggatggagctagtggcccattattctaagtgaagcaactcnaggaatgaaaaaccaaatatatgttctcaccttataagtggcagctaatctatgaggatgcaaaggcataagaatgatgtaatggactttggggacttatcagggaagttcaggaggaaaattaggtataaaagactgtatattgggtacactgtacactgcttgggtgatgggtgcgttaaagtttcagaaatcaccactaaagaatgtatccatgtaaccagaaaccacctggaccctaaaaactattgaaataaaaaatttttaatgtggctgtttcttataaagtgaacaatacatttac

SEQ ID NO: 530509 - DNA, 3431 bp, Homo sapiens
ccgcctaccccaaaaccgagaacggaactgcccggtcccccgaaaaagaagggcggaacatttcggccaagtcctcagactaccgaaccggagagctccgaaaggggactacctgcgcctgcgcaccgccatcttgttaaaagagcccgcctctccctcggccggtcactctttcgccacgggcggggttgcaccatccggcagggcggggcccggccatggcgaccgcggagcccagcgggcgcgcgttgcggttgtctaccccgggaccccggcccagcggggctcgggaccgcgcgccgggagctgcggggccaccctccgggcagatcggtaatagagccctccgtctgggggagcgcacccccgcggccgtggaaaagcgggggccatacatggtgacgcgcgcaccctccattcaagccaagctgcggtcagtgaagtttaacaagggctatactgctcttagccagagtccagatgaaaacctggtgtccctcgactctgacaggcccttcatgtacattccagggccgttctcttctgaacaatatcccttcccaggatggcttggttagaagactcaagtgatggggagctgggatccagatactcctccgggtattcatctgcagagcaggtgaaccaggatgtgagccggcagctgcttcaggatgggtatcacctggatgagattccagatgacgaggacttggacctcatcccccctaagcccatggcctcttcaacatgctcctgctgctggtgctgtcttggggactcttcttcctgtaccctccagtagacattaccctccaaggtgggccctgctcaccatgaggcctacagagccctgttggccactcatagctcacacagtgcagtgagcactgaagtcactgacccctagaaagtgacctgcaggtagcccttacctgttgcttctcaggccagaggcccccatctgggctgtgggctgataggtagaattctgtagttttcctctgctgttggagcagagtttggagaagtcactttaataagggcaagacagaaaattctggttcttatggtgggtgacaaaggtggctaaggaaaacacttgcagacagcttgattggtatttgtcatagtgcttcagggaggcaaaaagggagctcttgtgcccaggctgtgctagatagtgttgaatggaggcagaaaatagcactttatggtttattatagctggcaatccaaaaaagaaactgtttgagaccagttcgagaaattccatttgctctattcttcctagctctaagatggtttgcaggcttgaccttcaagacagcataaagtgagtccttttgtccctcttcaggttgcacctgtctaactatgacagggatcatagcaggttgcttaatgatacagcaggatcctggcttccagaatccctggacctggggcatccccaactggtccaaccgtccgggtgagtttagtgattctggtttgcccttccctagttagagaaaaactgctctgacatgttcatatttatttatttgtatttccttggtctgggtgagtttcttcacccagtctttgagctaaagattaggtcgaaggtactggggctggccccagaagcctgcagtttttattattaccagcagagggagctacagggagcagtccggtgccttcctattgtttactttttaaacttttgagaagtagcaatggactcgtgagagtgggtatacagctgtgtgggctttgtcctagactgaggcttacagacaggaagggtaagagagacctaagccagctcctagacccttgcctgaggaaatcagtccaccagtgtagagggcctcccttcactccagcatggaccattctattgccagattcttctggtcacagcatgggccttactggatactcaggattgggctttaagcagacctctgggtgtgacacagcctctttcagcccccagcccaaacagcagaaataggcataatttctgctgtgacaccccctacccacaaattggagagtatatcttgctatactctataccaagcctctttctagaatttttccaacaggttttgttttgttttttggcttaactcagaaccatggtgagcgttctgctttgttttgttggagacagggtctctgtcacccaggctggagtgcagtggtgtaatcacagctcactgcagcctcaacctcccaggcccaagcagtcctcccacatggtgagctttgaatgggcatagacagggttcccagcccaatagtcgggattggggtataggttctacatgggaaagtatccagtctcttgctttactcagtgtcctgtgaccaccagaggcatgagagggacaacacactcttttcgctctaccacaaggggtgactagaagatgagcaagtctaataaaaagatacggccttatttgttatttgtctgacaaccatccttacgatggtaatcctgtgagtgcctgatggacatctatctttgtgtttttctcaaaccatggaaggttgagaggaatatacagtatctgggggctgacttactctactagctaggagcatcacagcagagagataggacagagaccagagtcatgccagcttggggtcttgggaagagaggcagatggttactctgttctggaatgggactctgcagctctatgcagtggccaacattctgagcactttgtgcaaatgcttgtagagctcaagaacatctccatccagaaccccttccccatctgcagagaccatgtccaggcctttcttgtgtctgcagaggtgaagtgcacatgtggaaagggatcaaatgtagcacagtgtaaagaaagacagcaacacaggtagagggacccagtgtgtgctgggaggtggctgtggaaggtaagtatagacctacatctctgttggggaggtggtcagggcagaatggcctgggtgtttagcagcttctaggggtgagggtggcaggaccccaaaaccaaggccctctgcatcgttgttgtaataatcagctctggcatattcagctgcaactgtccctgaagaagaggtttctgagctggctgaccccatgtaggagggtgttaccttgtagaaaaagctggagggacctggtgggacagtgcagtgaggcagggtagaaatggtcagttgtttagggccagtggccacataccaaaataccaccaatgtgcccagggccaaactgccttaattctgagtgctgtgtgttctgcaggtgacagtttcctgaggagaggggtgtatccaggcttacctcccagcaggagtggtaccatatggtgtttatgtactactctatagaactcttggcttgcacttctacagctctgtacatttataagaataaatgcaatcacact

SEQ ID NO: 530510 - DNA, 3067 bp, Homo sapiens
  misc_feature (175)..(175): n is a, c, g, or t
aagctgctcaccatgaggcctacagagccctgttggccactcatagctcacacagtgcagtgacagtgaagtctggacagtactaaggcttactgctggctgaggcacaagtaggagaaggtggtactcctcctgtagtccagggatgtgtggggttggcctggggtggacatgnacaggaagccctggtaacggaatgtggttctgtcttttgggtagcagttacttctgctttgcatcttggcctatagttccctcctctccttctcttagcaggtgaaccaggatgtgagccggcagctgcttcaggatgggtatcacctggatgagattccagatgacgaggacttggacctcatcccccctaagcccatggcctcttcaacatgctcctgctgctggtgctgtcttggggactcttcttcctgtaccctccagtagacattaccctccaaggtgggccctgctcaccatgaggcctacagagccctgttggccactcatagctcacacagtgcagtgagcactgaagtcactgacccctagaaagtgacctgcaggtagcccttacctgttgcttctcaggccagaggcccccatctgggctgtgggctgataggtagaattctgtagttttcctctgctgttggagcagagtttggagaagtcactttaataagggcaagacagaaaattctggttcttatggtgggtgacaaaggtggctaaggaaaacacttgcagacagcttgattggtatttgtcatagtgcttcagggaggcaaaaagggagctcttgtgcccaggctgtgctagatagtgttgaatggaggcagaaaatagcactttatggtttattatagctggcaatccaaaaaagaaactgtttgagaccagttcgagaaattccatttgctctattcttcctagctctaagatggtttgcaggcttgaccttcaagacagcataaagtgagtccttttgtccctcttcaggttgcacctgtctaactatgacagggatcatagcaggttgcttaatgatacagcaggatcctggcttccagaatccctggacctggggcatccccaactggtccaaccgtccgggtgagtttagtgattctggtttgcccttccctagttagagaaaaactgctctgacatgttcatatttatttatttgtatttccttggtctgggtgagtttcttcacccagtctttgagctaaagattaggtcgaaggtactggggctggccccagaagcctgcagtttttattattaccagcagagggagctacagggagcagtccggtgccttcctattgtttactttttaaacttttgagaagtagcaatggactcgtgagagtgggtatacagctgtgtgggctttgtcctagactgaggcttacagacaggaagggtaagagagacctaagccagctcctagacccttgcctgaggaaatcagtccaccagtgtagagggcctcccttcactccagcatggaccattctattgccagattcttctggtcacagcatgggccttactggatactcaggattgggctttaagcagacctctgggtgtgacacagcctctttcagcccccagcccaaacagcagaaataggcataatttctgctgtgacaccccctacccacaaattggagagtatatcttgctatactctataccaagcctctttctagaatttttccaacaggttttgttttgttttttggcttaactcagaaccatggtgagcgttctgctttgttttgttggagacagggtctctgtcacccaggctggagtgcagtggtgtaatcacagctcactgcagcctcaacctcccaggcccaagcagtcctcccacatggtgagctttgaatgggcatagacagggttcccagcccaatagtcgggattggggtataggttctacatgggaaagtatccagtctcttgctttactcagtgtcctgtgaccaccagaggcatgagagggacaacacactcttttcgctctaccacaaggggtgactagaagatgagcaagtctaataaaaagatacggccttatttgttatttgtctgacaaccatccttacgatggtaatcctgtgagtgcctgatggacatctatctttgtgtttttctcaaaccatggaaggttgagaggaatatacagtatctgggggctgacttactctactagctaggagcatcacagcagagagataggacagagaccagagtcatgccagcttggggtcttgggaagagaggcagatggttactctgttctggaatgggactctgcagctctatgcagtggccaacattctgagcactttgtgcaaatgcttgtagagctcaagaacatctccatccagaaccccttccccatctgcagagaccatgtccaggcctttcttgtgtctgcagaggtgaagtgcacatgtggaaagggatcaaatgtagcacagtgtaaagaaagacagcaacacaggtagagggacccagtgtgtgctgggaggtggctgtggaaggtaagtatagacctacatctctgttggggaggtggtcagggcagaatggcctgggtgtttagcagcttctaggggtgagggtggcaggaccccaaaaccaaggccctctgcatcgttgttgtaataatcagctctggcatattcagctgcaactgtccctgaagaagaggtttctgagctggctgaccccatgtaggagggtgttaccttgtagaaaaagctggagggacctggtgggacagtgcagtgaggcagggtagaaatggtcagttgtttagggccagtggccacataccaaaataccaccaatgtgcccagggccaaactgccttaattctgagtgctgtgtgttctgcaggtgacagtttcctgaggagaggggtgtatccaggcttacctcccagcaggagtggtaccatatggtgtttatgtactactctatagaactcttggcttgcacttctacagctctgtacatttataagaataaatgcaatcacact

SEQ ID NO: 530511 - DNA, 356 bp, Homo sapiens
tcgaatcgagctcggtaccagtaaacgagtaataagagaagagaagaatctgtagaagccagaggggaaaaacactttgtttatatgtggcgcaggaatagtggattacaggtgagacttctcagtcagaaaccatgcaagtgagtaaagagtaggataaaatatttcaagctcccaatggccaaagctagaactgttaaagcaacagaataagatagtactggattaatatgcaaagtagtaaaatcaacagtctcggagtccatttgatataagtaaatagttgaacagtacagaataataaataagaggtgaagagacaatggaaatctttatgcagaattccaagtaactta

SEQ ID NO: 530512 - DNA, 3269 bp, Homo sapiens
  misc_feature (377)..(377): n is a, c, g, or t
cgtggagtctcagagctccttaagaggtgaaggcagccgggcgcggtgtgtagacaaagctgctcaccacccccttccactgtaacccatgctctactacgctagcccattgttctgttattatcccatattcttcagctttgatagggactagtctgggctcccagtgggaactgtcagagcactgattttcaaacatattgggaactcgatatttacctgaatgcctcaggatttagtgagaacagatcctgggggtcagtgacagtgaagtctggacagtactaaggcttactgctggctgaggcacaagtaggagaaggtggtactcctcctgtagtccagggatgtgtggggttggcctggggtggacatgnacaggaagccctggtaacggaatgtggttctgtcttttgggtagcagttacttctgctttgcatcttggcctatagttccctcctctccttctcttagcaggtgaaccaggatgtgagccggcagctgcttcaggatgggtatcacctggatgagattccagatgacgaggacttggacctcatcccccctaagcccatggcctcttcaacatgctcctgctgctggtgctgtcttggggactcttcttcctgtaccctccagtagacattaccctccaaggtgggccctgctcaccatgaggcctacagagccctgttggccactcatagctcacacagtgcagtgagcactgaagtcactgacccctagaaagtgacctgcaggtagcccttacctgttgcttctcaggccagaggcccccatctgggctgtgggctgataggtagaattctgtagttttcctctgctgttggagcagagtttggagaagtcactttaataagggcaagacagaaaattctggttcttatggtgggtgacaaaggtggctaaggaaaacacttgcagacagcttgattggtatttgtcatagtgcttcagggaggcaaaaagggagctcttgtgcccaggctgtgctagatagtgttgaatggaggcagaaaatagcactttatggtttattatagctggcaatccaaaaaagaaactgtttgagaccagttcgagaaattccatttgctctattcttcctagctctaagatggtttgcaggcttgaccttcaagacagcataaagtgagtccttttgtccctcttcaggttgcacctgtctaactatgacagggatcatagcaggttgcttaatgatacagcaggatcctggcttccagaatccctggacctggggcatccccaactggtccaaccgtccgggtgagtttagtgattctggtttgcccttccctagttagagaaaaactgctctgacatgttcatatttatttatttgtatttccttggtctgggtgagtttcttcacccagtctttgagctaaagattaggtcgaaggtactggggctggccccagaagcctgcagtttttattattaccagcagagggagctacagggagcagtccggtgccttcctattgtttactttttaaacttttgagaagtagcaatggactcgtgagagtgggtatacagctgtgtgggctttgtcctagactgaggcttacagacaggaagggtaagagagacctaagccagctcctagacccttgcctgaggaaatcagtccaccagtgtagagggcctcccttcactccagcatggaccattctattgccagattcttctggtcacagcatgggccttactggatactcaggattgggctttaagcagacctctgggtgtgacacagcctctttcagcccccagcccaaacagcagaaataggcataatttctgctgtgacaccccctacccacaaattggagagtatatcttgctatactctataccaagcctctttctagaatttttccaacaggttttgttttgttttttggcttaactcagaaccatggtgagcgttctgctttgttttgttggagacagggtctctgtcacccaggctggagtgcagtggtgtaatcacagctcactgcagcctcaacctcccaggcccaagcagtcctcccacatggtgagctttgaatgggcatagacagggttcccagcccaatagtcgggattggggtataggttctacatgggaaagtatccagtctcttgctttactcagtgtcctgtgaccaccagaggcatgagagggacaacacactcttttcgctctaccacaaggggtgactagaagatgagcaagtctaataaaaagatacggccttatttgttatttgtctgacaaccatccttacgatggtaatcctgtgagtgcctgatggacatctatctttgtgtttttctcaaaccatggaaggttgagaggaatatacagtatctgggggctgacttactctactagctaggagcatcacagcagagagataggacagagaccagagtcatgccagcttggggtcttgggaagagaggcagatggttactctgttctggaatgggactctgcagctctatgcagtggccaacattctgagcactttgtgcaaatgcttgtagagctcaagaacatctccatccagaaccccttccccatctgcagagaccatgtccaggcctttcttgtgtctgcagaggtgaagtgcacatgtggaaagggatcaaatgtagcacagtgtaaagaaagacagcaacacaggtagagggacccagtgtgtgctgggaggtggctgtggaaggtaagtatagacctacatctctgttggggaggtggtcagggcagaatggcctgggtgtttagcagcttctaggggtgagggtggcaggaccccaaaaccaaggccctctgcatcgttgttgtaataatcagctctggcatattcagctgcaactgtccctgaagaagaggtttctgagctggctgaccccatgtaggagggtgttaccttgtagaaaaagctggagggacctggtgggacagtgcagtgaggcagggtagaaatggtcagttgtttagggccagtggccacataccaaaataccaccaatgtgcccagggccaaactgccttaattctgagtgctgtgtgttctgcaggtgacagtttcctgaggagaggggtgtatccaggcttacctcccagcaggagtggtaccatatggtgtttatgtactactctatagaactcttggcttgcacttctacagctctgtacatttataagaataaatgcaatcacact

SEQ ID NO: 530513 - DNA, 198 bp, Homo sapiens
cccccccaaaggccccccggggggggacccccccccctttgggggggggggggggggccccccccggggggggggttgggggggaattttttccccttttttttttgccccccaaggggttccccctttttggggggggggggtttttccccggggtttttggggggggtttttttccctttttttttcccccccgga

SEQ ID NO: 530514 - DNA, 3933 bp, Homo sapiens
  misc_feature (3407)..(3407): n is a, c, g, or t
  misc_feature (3679)..(3679): n is a, c, g, or t
  misc_feature (3933)..(3933): n is a, c, g, or t
ccgcctaccccaaaaccgagaacggaactgcccggtcccccgaaaaagaagggcggaacatttcggccaagtcctcagactaccgaaccggagagctccgaaaggggactacctgcgcctgcgcaccgccatcttgttaaaagagcccgcctctccctcggccggtcactctttcgccacgggcggggttgcaccatccggcagggcggggcccggccatggcgaccgcggagcccagcgggcgcgcgttgcggttgtctaccccgggaccccggcccagcggggctcgggaccgcgcgccgggagctgcggggccaccctccgggcagatcggtaatagagccctccgtctgggggagcgcacccccgcggccgtggaaaagcgggggccatacatggtgacgcgcgcaccctccattcaagccaagctgcagaagcaccgggacctggccaaggccgttctgcggagaaaaggcatgctgggggcctcgccgaaccgcccagactcttcagggaaaaggtcagtgaagtttaacaagggctatactgctcttagccagagtccagatgaaaacctggtgtccctcgactctgacagtgatggggagctgggatccagatactcctccgggtattcatctgcagagcaggtgaaccaggatgtgagccggcagctgcttcaggatgggtatcacctggatgagattccagatgacgaggacttggacctcatcccccctaagcccatggcctcttcaacatgctcctgctgctggtgctgtcttggggactcttcttcctgtaccctccagtagacattaccctccaaggtgggccctgctcaccatgaggcctacagagccctgttggccactcatagctcacacagtgcagtgagcactgaagtcactgacccctagaaagtgacctgcaggtagcccttacctgttgcttctcaggccagaggcccccatctgggctgtgggctgataggtagaattctgtagttttcctctgctgttggagcagagtttggagaagtcactttaataagggcaagacagaaaattctggttcttatggtgggtgacaaaggtggctaaggaaaacacttgcagacagcttgattggtatttgtcatagtgcttcagggaggcaaaaagggagctcttgtgcccaggctgtgctagatagtgttgaatggaggcagaaaatagcactttatggtttattatagctggcaatccaaaaaagaaactgtttgagaccagttcgagaaattccatttgctctattcttcctagctctaagatggtttgcaggcttgaccttcaagacagcataaagtgagtccttttgtccctcttcaggttgcacctgtctaactatgacagggatcatagcaggttgcttaatgatacagcaggatcctggcttccagaatccctggacctggggcatccccaactggtccaaccgtccgggtgagtttagtgattctggtttgcccttccctagttagagaagtttcttcacccagtctttgagctaaagattaggtcgaaggtactggggctggccccagaagcctgcagtttttattattaccagcagagggagctacagggagcagtccggtgccttcctattgtttactttttaaacttttgagaagtagcaatggactcgtgagagtgggtatacagctgtgtgggctttgtcctagactgaggcttacagacaggaagggtaagagagacctaagccagctcctagacccttgcctgaggaaatcagtccaccagtgtagagggcctcccttcactccagcatggaccattctattgccagattcttctggtcacagcatgggccttactggatactcaggattgggctttaagcagacctctgggtgtgacacagcctctttcagcccccagcccaaacagcagaaataggcataatttctgctgtgacaccccctacccacaaattggagagtatatcttgctatactctataccaagcctctttctagaatttttccaacaggttttgttttgttttttggcttaactcagaaccatggtgagcgttctgctttgttttgttggagacagggtctctgtcacccaggctggagtgcagtggtgtaatcacagctcactgcagcctcaacctcccaggcccaagcagtcctcccacatggtgagctttgaatgggcatagacagggttcccagcccaatagtcgggattggggtataggttctacatgggaaagtatccagtctcttgctttactcagtgtcctgtgaccaccagaggcatgagagggacaacacactcttttcgctctaccacaaggggtgactagaagatgagcaagtctaataaaaagatacggccttatttgttatttgtctgacaaccatccttacgatggtaatcctgtgagtgcctgatggacatctatctttgtgtttttctcaaaccatggaaggttgagaggaatatacagtatctgggggctgacttactctactagctaggagcatcacagcagagagataggacagagaccagagtcatgccagcttggggtcttgggaagagaggcagatggttactctgttctggaatgggactctgcagctctatgcagtggccaacattctgagcactttgtgcaaatgcttgtagagctcaagaacatctccatccagaaccccttccccatctgcagagaccatgtccaggcctttcttgtgtctgcagaggtgaagtgcacatgtggaaagggatcaaatgtagcacagtgtaaagaaagacagcaacacaggtagagggacccagtgtgtgctgggaggtggctgtggaaggtaagtatagacctacatctctgttggggaggtggtcagggcagaatggcctgggtgtttagcagcttctaggggtgagggtggcaggaccccaaaaccaaggccctctgcatcgttgttgtaataatcagctctggcatattcagctgcaactgtccctgaagaagaggtttctgagctggctgaccccatgtaggagggtgttaccttgtagaaaaagctggagggacctggtgggacagtgcagtgaggcagggtagaaatggtcagttgtttagggccagtggccacataccaaaataccaccaatgtgcccagggccaaactgccttaattctgagtgctgtgtgttctgcaggtgacagtttcctgaggagaggggtgtatccaggcttacctcccagcaggagtggtaccatatggtgtttatgtactactctatagaactcttggcttgcacttctacagctctgtacatttataagaataaatgcaatcacactagttaaaaaaaaaaaaaaanaaaaaaaaaaaaaaaaaaaaaaaaaacaaaggaggggggcgggggcgcctcccaaagaatctacccccggggggggccccacagttttagcgcgcgcgcccccgattttttggtcaaagggggggccccctaaagggggagagcgcgcgttatataaaagacggcagaggcccggaggcgcgcggcgttttaacaacaaccgggcgggcagaggggaaaaacacagctgtggatgagggtggggaatctcttggggaggaggagaacccccntctactgctagcgggagggggcgacaaattagtgtggggaacaacacatatcctagaggggagtttatataaggcgtactagaagggaatatattacagaaattggaggtggtataatgagggggtgtaaacacgaagggagaattttggatgcgcagtgggttagtagaagttgttggagctagagcgggggatgtttgatctgttaggaaaagtattattatacgaggggcttgtgctagtatataagatgn

SEQ ID NO: 530515 - DNA, 982 bp, Homo sapiens
agcgggttctcctgcgtcgctccgggagctgcagacggacggagcgccccggcgaagcgggcgacgaactgcgagcgcggtggacttggccagaatgcgataacgcagtagtaaggtgctgctactacggaccgaggtagcgagttgcccgagcggagcagcccacaacaagcacatgggcgaggtgctgacccccgagctgtacgcggagctgcgcgccaagagcacgccgagcggcttcacgcatggacagacgtcatccacgacaggcgtggacaagcccgaggccacacacgtacaatcatgaccagaagggctgcagtaggccgggcgaccgacggagtaccatacagaagctgtagcaaaggactcatctatcagaaacaccagtcctcagacggacacggacacggacagggctaacaaagcccagccgatgagcacagagagcgaaacgtcaaccaccgacagaccgtgcagggccgagccgacagaccatggaacccaaactacagatgctgacgctcgcagggtgcgcacgaggacacagcagcaatccgaggcttaacatgccttccccacacgacaaatgcaagccagcggggaagcgcacgagccgatcgagaacgcatacgacggagggaaagcaccatgtaacaagcctgggacgggagacccaggacacggagccgaatacctaaaggcagacacaaaggagcagtgcagcggaagagcagagagacacagcacagacaagagtccaatgacgaacagaaacgcaactgcagctacatagcgaagcaaagaccaccgggagtcagaccacactgggctagccatggagaccatccgagggaacaaagaggacccggacgaagcagggccccggaacgccaaggaaggagacttcttggcgccaccaggcggaacccagtaaaacgaaaccgtagcactggaggcagtagggcccaaacgcacgaga

SEQ ID NO: 530516 - DNA, 522 bp, Homo sapiens
  misc_feature (254)..(254): n is a, c, g, or t
  misc_feature (368)..(368): n is a, c, g, or t
  misc_feature (409)..(409): n is a, c, g, or t
  misc_feature (423)..(423): n is a, c, g, or t
  misc_feature (481)..(481): n is a, c, g, or t
  misc_feature (521)..(521): n is a, c, g, or t
aattcgcggccgcgtcgacacggctgcagaagacgacagagcgagattccatcccaaaaaaaaaaaaaaaaaaagaatgtaatactttaaaggttaccaaatcttaacaaattcttatagcctgggtccttggtctgtgatatattacacaaaaatgtgatgatataatggctttggaatcaggtagacctggattcgaatcctgcctctgccttcattaactgtgtgaccttaaattaagcaagttatttctntaagtcccgtttttccatctaatccttcctcccttttttttaaaggagggatagaaaagttaggcgaaattagggagcatatgagagcgggtagaatgctgccattcataaacntgtatcaattttgaacattgagagaagagagtagcaggagngagtggtgatagcngaaaccatgaggccactgggtcctaaggccagggccagacctaaccaattagtcaggngagagtaagacggtagacccattgtaatttggatggttcnc

SEQ ID NO: 530517 - DNA, 1242 bp, Homo sapiens
tgtgctgcagtgagcctgcagggccgtaggcagccatggcgcccagccggaatggcatggtcttgaatgccccacttccacaatggacttggcagctggctgctgtggcacactgtggttcaaccatgcctggccctgtaaggatcctgcatgactgtaatgtgccctgtgcaatgccaatggctgctgcctgcaatctgcccctgtgcccctgctgatctggagtcccagtcctgtgcccagtctgttgctgcattgcccacactggattctgagtacgcacactgacagtgtgctgctgcctgtgcctgcggtgttatcaggccttgggatgggaagctcatgtggattgagcctgggcgattacacaatgaacgtgttggccccgtgacccattccggcagtttcttgttggatccctggacggagggctgtgaaaccaacgttccaactggatgatccacttgacatgtgcccatacggttgcaagagcgagcctgacacttgagtaaccggctaccaggacctcaatccatcattacgccccagtgaactgcccatcgtggacaccccaaggaaggtggcagaccagtttcttggcttgacagacacttgacaacttgggcccaaccccatggctgaccctggaccctgtggtcaattgccctgtcacgggaacgcgtctcactaaagcaccgcgagacacagctcgacgttcatcacttgaaggaacggacgaacgaatttcaaaaatggcctatcgactatgtcctcgcgtattgggccctgttgccaaacgccccggacttctctcgggccataacggtgccaaaagaaatgcatgccaatggcaaggcccgtcaggaacccagggattgttttgaaaactacgcccacacacattaaatgccccctcacattgggggaactttggcacatccaaaacgcaaaatgggatcattatgaaacacatccaggcgggagacatacaaaaggaacaggcaggccgcgcgcgagacaagcacgagcggacaactagacaatcgtgagccaatttggggtgagcaaacagttggagaacccttcagacccacagcagttacttatgtggtcacacacacatgtgtgaacaacaatctgcagcggcgcccaccaaaaaaagctgctgcactgaatatataatatacagaaaacagccacgtgtgaaccctcgaagaagacaatacagtgacagacgaatgg

SEQ ID NO: 530518 - DNA, 633 bp, Homo sapiens
  misc_feature (77)..(77): n is a, c, g, or t
  misc_feature (89)..(89): n is a, c, g, or t
  misc_feature (134)..(134): n is a, c, g, or t
  misc_feature (139)..(139): n is a, c, g, or t
  misc_feature (183)..(183): n is a, c, g, or t
  misc_feature (185)..(186): n is a, c, g, or t
  misc_feature (207)..(207): n is a, c, g, or t
  misc_feature (217)..(217): n is a, c, g, or t
  misc_feature (226)..(226): n is a, c, g, or t
  misc_feature (244)..(244): n is a, c, g, or t
  misc_feature (247)..(247): n is a, c, g, or t
  misc_feature (454)..(454): n is a, c, g, or t
  misc_feature (496)..(496): n is a, c, g, or t
  misc_feature (524)..(524): n is a, c, g, or t
  misc_feature (578)..(578): n is a, c, g, or t
  misc_feature (581)..(581): n is a, c, g, or t
  misc_feature (603)..(603): n is a, c, g, or t
  misc_feature (622)..(622): n is a, c, g, or t
gcttccaagcaggcggatgtgaacttggtgaacgtaagactgctggtgaaaaaggctggcctcaatgtcacccctcnccaaagccttgntcaccaggggagcaaggttcggggaatgctctggccgtggcctgncaggngccccttccaggctgtgggcttggtccaaggcactacacctgtncnncaggggctcaatggagctgtnttcaggccanaagtgcctntccgcagggacctgcccntgntcctattccggactcagacctctgaccctgcaatgctgcctaccatgattggcctcctggcagaggcaggggtgcggctgctgtcctaccagacttcactggtgtcagatggggagacctggcacgtcatgggcatctcctcctttctgcccagcctggaaggcgtggaaccagcttgtgactgaagccttccagttccacttttanccttggagctcactggtccctgcctttggggcttttttgaanaaaccccccccctgtgatcaataggganagaaaatccccatttttgggctgaacgcgggcctttgacactgcttacactgcnctntgaccctgtagtacagcaatanccgtttaataaagagcctncccccaactca

SEQ ID NO: 530519 - DNA, 597 bp, Homo sapiens
  misc_feature (273)..(273): n is a, c, g, or t
gggagagttcttcaagcaactcactatgtcaacagacacaggtgtttcccttccttcatatgaggaagatcagggatcaaaactcagttcgaaaagctaaagaggcatccagttacgtgacccagttggtaatagcggggttctgttgcacgcaactctgtgtgctatagtggatttatcatacatatctgtaagagatagggcgatacattactacagagatggtctcatgtgcatacttggatccaagcttgccgctgatgtgcatgcccnaagaggcctctgtgttatgtgacggtaagccaactcggactatgtatagcgtcaattgtggcgtcatttcccgatatgtcattccgcgcgtacatcttccttgcgtgccataaaatcccttagacgtccgcttaatgccaaagcaaaagtaagcattgcgtatgtgccttgtgggatctgggttagggagtgagcattgcgtttaagtctacgatgtcattattgattcataagttaccatattgatagtctgcgagatataaactaattatgtatcgggtttacgatgtgtaacgagtggtcattttcgaatcattggggttc

SEQ ID NO: 530520 - DNA, 120 bp, Homo sapiens
gatccttaccgtacgccaactcttagacacaacttcctagagaaatcttccaggcataaattactatgtaaacagtagctgtgtctggaaaagtgggtacataatttactattccaatac

SEQ ID NO: 530521 - DNA, 474 bp, Homo sapiens
  misc_feature (77)..(77): n is a, c, g, or t
  misc_feature (89)..(89): n is a, c, g, or t
  misc_feature (134)..(134): n is a, c, g, or t
  misc_feature (139)..(139): n is a, c, g, or t
  misc_feature (183)..(183): n is a, c, g, or t
  misc_feature (185)..(186): n is a, c, g, or t
  misc_feature (207)..(207): n is a, c, g, or t
  misc_feature (217)..(217): n is a, c, g, or t
  misc_feature (226)..(226): n is a, c, g, or t
  misc_feature (244)..(244): n is a, c, g, or t
  misc_feature (247)..(247): n is a, c, g, or t
  misc_feature (295)..(295): n is a, c, g, or t
  misc_feature (337)..(337): n is a, c, g, or t
  misc_feature (365)..(365): n is a, c, g, or t
  misc_feature (419)..(419): n is a, c, g, or t
  misc_feature (422)..(422): n is a, c, g, or t
  misc_feature (444)..(444): n is a, c, g, or t
  misc_feature (463)..(463): n is a, c, g, or t
gcttccaagcaggcggatgtgaacttggtgaacgtaagactgctggtgaaaaaggctggcctcaatgtcacccctcnccaaagccttgntcaccaggggagcaaggttcggggaatgctctggccgtggcctgncaggngccccttccaggctgtgggcttggtccaaggcactacacctgtncnncaggggctcaatggagctgtnttcaggccanaagtgcctntccgcagggacctgcccntgntcctattccggactcagtgtgactgaagccttccagttccacttttanccttggagctcactggtccctgcctttggggcttttttgaanaaaccccccccctgtgatcaataggganagaaaatccccatttttgggctgaacgcgggcctttgacactgcttacactgcnctntgaccctgtagtacagcaatanccgtttaataaagagcctncccccaactca

SEQ ID NO: 530522 - DNA, 699 bp, Homo sapiens
ggagagagagaggacgtggtgggtcctctggtgcgaagtccggattccttgggtcttccggtaggagactgtaatcaagtgtagctgacaacacaggagtccaaaaagctgtatatcatcctccgtgaatggggatcattgggacggctgaatcagcattcgcggctgcttggtagtggtgtgacatgggtgactggcgccaggccaaagagagtgccgggaaccagatgctcgagtagatacaagaggtaccatcccagcaagggtccattccggacgaacggaaagtctgttcgcggacaaaagatggcgtgtttgcttgattgcggaaggatagtgcaggagtcatagttgaacaataacaggcgagatgacaggttcctgggcatgagaggaccagtgagcaaaggaagtgtcgcgggacgttgtggccgccgcgaagttggcattgcataagggctaggggagagtcatttagtcgttgaattctgccccatatgagctattggttacaagaagtgtaagagaagaatagctaaaatcgccgggctaatagtggacaataggcccatacccattgacagagaacaaaagggatgctcgccgtcaaattggggtgggagggagtaggagatggagggtcagggcgttctggttgaatgcgtcgtggcagaaccggcgtaatgtgaggggaggaaa

SEQ ID NO: 530523 - DNA, 138 bp, Homo sapiens
  misc_feature (59)..(59): n is a, c, g, or t
gaacagccttgaactgagatatgtgggggtagagctctgtatgatctagggggcgtacngcttaccgaaatcaagcaaacttcgaataccatatatcatgttcaggagtgagtccgtggatgacaaggtcctcggacg

SEQ ID NO: 530524 - DNA, 913 bp, Homo sapiens
  misc_feature (3)..(3): n is a, c, g, or t
  misc_feature (167)..(167): n is a, c, g, or t
gtnaccgtgcgtaaggagtaactggtaagaaaccgggataaggcttctttacgagacatcttttgcaatacttgtgacagtggcccccatcaggtcccaacgtggcacatttgttgtgctccaatagccggttttacatatacccgccgggtttctaaaaaccgttngcaaacgcagccaactatccggcaagtgagcagggggcataaacattgttaccggggtcctttcccatatgcgcgcttcttttgcccacaggtcccgtccacaatttgtctccgaccaggtgcctaatctttttctaggggacccaataattgtaattgggccaaatttacacttttaatgggtccggcgccggatctcctccccctttaaaaaccttggggtagtaatagcaccccccacagcgggaaggttgtgtaataatcaaataccacgaacaggtgcactctgtcggttacaccccagactcttccattttgggacacggaagacccctgcaaatagacccttgtttaacagaggcgaacctgcgcacttttccccggcatttttctcgcccccgccaatttctttgggggattagttcatcgagtacatgagcagagtgcggtatcagggaggcgtgcactataccaggcccatcttgaatgcgaattatgctgagcctcgcgccgccatgtttaatatgccacctctcctgatgatacagaattctgttgaaaatctttggcactgaaccaccaaagacatattggatcccaagtgtcagaaaaacctacacaaagtgggtggatgaggacgcatgcacccccatgaccacccatgcatcctgaatgttaccgccctccggtgcccacgccaaaatcttcaaccctaccgattccaacaaagaaaaacccacaaaacg

SEQ ID NO: 530525 - DNA, 478 bp, Homo sapiens
cggccaatggcagttgtcatggtgtattgtaccccaccccatcccctgaggagacatggtgctcagtccctatgcctggtgccacagccacgagaagatggcatgtttctctagacctgagtattctgtggcgtggcagggtcagcacccctgagtgcatcgaagccatggtcagaggaaagtgttggcaggctcggtacagcgaaagaagtcaggagccatgagacgggtgaagcgtttccagatgcgtcaccttcacagggtcaaaacctccagtagaggcggccgagaaggcatgtcggcgtacccaatcagcatcctgaagtgaggcgtcggatctcatacggggacccctcttccagtcagtggcctccggggaagggcattgtctacatgctggggggggggggtggaaaggcatttgtcccctgctcgcaaggatgtgatcgtgtcttctcgggacccagaacaagggaga

SEQ ID NO: 530526 - DNA, 292 bp, Homo sapiens
aaacagaaattcaaaaactaagaataagaatgagcaaaaattgttctgtggtgagcaggtgcatgaaatcatactcccaaaggttgagggagctgagaggctgaagaaaagaggttaacaaattcagtttctcaacaagaaatattttatagggactcgccaacagaagcaatgtcctgggcaatcgggaggtggtggatccctgcactcaccctccagaaagtactctttatagaacaagcaatttacggtaaaatgcgtgcagctggttacatcttcagacttttttttc

SEQ ID NO: 530527 - DNA, 313 bp, Homo sapiens
tctctagtctatcaggaactagtatacaagagtccttttcatagtcttttccataaactctcctggccagtcttccttgaaatacaaaaagtgacatcacggcgtgctacgattgtggattatagaaaggcaaaagttcctaatcctggaggagcaatgactctgatagtcaaggatgtggagcttgcctcgccagtggctgagttacgagcagagcaagcatagagcccattatgctttggagtaatctgagggataaagagctttggtcctgatagctgaaacttcccattaattgtccaagaatactgtg

SEQ ID NO: 530528 - DNA, 668 bp, Homo sapiens
  misc_feature (14)..(14): n is a, c, g, or t
  misc_feature (40)..(41): n is a, c, g, or t
  misc_feature (57)..(57): n is a, c, g, or t
  misc_feature (59)..(60): n is a, c, g, or t
  misc_feature (70)..(70): n is a, c, g, or t
tctctcttccaacncacctccagtctcccccaagcccccnnacaatgataacctganannctcccagctncaccgccgtggtggacgctgtagaactagcggatcccacggactgcaggaatattttactaggacgcagtggccgacatgactgcttcgctggtggcggctattaatgtttccccaccgccaaacctgaacatgagcagtctctacacgtacctcttctcggtgctcaggacgcccctgtgactggggctaaaatcacctcgcccagatgcacgttttcaagagcgactattctattttcgaaccgataggggcgccggcggtagttccgcccaggacgaggccccttcttcaaaacaaaccctttttactaccgtttacgcaagacgattcagctgcagcgcattttagacacacttgtttaagaataccgacctggagaaactcagagaaccttttgaagcaaccagagggcctatctattcatgagccatctagcaaaggtttcaaacatgaaaccgcaagcttgggcttacaaactgtgtccggggcaccacatttggacaaacatttaaacaaatctttaaaattagaacagaacaagaaaaaacttgccaacaaataccctacctcccctaactctgccacccctcccctct

SEQ ID NO: 530529 - DNA, 287 bp, Homo sapiens
  misc_feature (10)..(10): n is a, c, g, or t
cccaccccgngcatctaacacacgggcacacgtactctgggcttcttaaacttgttcctgaactacttacggagagtggggttgggggatattggaaagaagtctgtgaaatatagcctgactcctgatcttcacctctgcccccacagacaagttcaccgattcagccattgccatgaactcgaaagtgaatggggaacacaacagagaaggtgcttcagcggctgggaggcggggtgacagcaaccagggacgactactgaccctcgacgtctgacactggtata

SEQ ID NO: 530530 - DNA, 346 bp, Homo sapiens
  misc_feature (27)..(27): n is a, c, g, or t
  misc_feature (41)..(41): n is a, c, g, or t
agcgctgcgtagtgtaaacgatcggangatcccgcaaggtnaacaacacagcgaaacgaagatacgaccacgtcattggttttaaaaccttcacgaaagagatcggcgggcgatgcgccgggctcaagcgcaagacgaggcggacgtggcggcatttgtccgcctgcgaccatgttctgatagaagcgctgggcatcccgcctgaaccaaagcctggcgacgggcagacctttttcagtgaaatcggcctcgatcagccgccctttgctgcggttgacatactcggtttcgggtaattgctttactcctcccggtacttcgtttcgctgtgttgttaaccttgcgg

SEQ ID NO: 530531 - DNA, 103 bp, Homo sapiens
agtcgtggtattagatcctagccgattgtatgacgcgtcgtacgtatacgcggcgaggcgaacgaatctctgcaatctggcgactgtcagtggagcggtaggg

SEQ ID NO: 530532 - DNA, 350 bp, Homo sapiens
  misc_feature (46)..(46): n is a, c, g, or t
  misc_feature (164)..(164): n is a, c, g, or t
  misc_feature (188)..(188): n is a, c, g, or t
  misc_feature (197)..(197): n is a, c, g, or t
  misc_feature (219)..(219): n is a, c, g, or t
aagaaagaagggtaacagagtctttgctgggccattcttggggaancctgttattaaaatagccactaggttgggcatggtggctcacacctataatcccagcactttggaagaccacggtgggtggatcacctgagctcaggagttcgagaccagcctggccnacatagtgaaaccccatctctatngaaaatacnaaaattagctgggcatggtggngcacacctgtagtcccagctactcagaaggctgaggcaggagaatggcttgaacccgggaggtggaggtcgcagtgagccaagattgcgccactgtgctccaggctgggcaacagagtgagactctgtctc

SEQ ID NO: 530533 - DNA, 137 bp, Homo sapiens
tatggactttatgtcataacttctgttactcctttggtccatagctaaggtcatccttccccacagggtggctttgggattggatgatacagcttttgttctgtgtacgtatacctgtacatacgcccaggtaagca

SEQ ID NO: 530534 - DNA, 921 bp, Homo sapiens
ggcagacacggtggctcacacctgtaatcccagcattttgggaggctgaggctggtggacctcctgaggtcaggagttcaagaccagtctggccaacatggtgaaccccgtctctactaaaaataaaaaaattagctgggcgtgatggcgtgagcctgtaatcccagctacttgggaggccgaggcaggagaatcacttgaacatgggaggcggaggttgtggtgagccaagatcgtgccattgcactccagcctgggcaacaagagggaaactccgtttcaaaaaaaaagagcaaaacagaaagaaatggagaagtaacgcctcataatatttgtccccagctttttaaattgaagctggttgcataatctggggaatagtccataatttccatgtgttatacagtttaaaaagcctgcaaaaagtgacttgtgctgggttactttctgcctcagattgactattttaaccaaatatgtcacgactagatcatagctcctagctgaataacatgaggtgttttaaagtcaggcctattacagaattaacataagcacaattttaattttatgatatctgatatgcctatctaatactccttatgcattaaatgctggcagataagaatcctgctattttccaaagtcagacgaacttgcacagttggaatcctgaaccctttcattcatcaaggcaaagccctgagtgtttgctcactagtgaatgggtatgggttccagaagggccctcatttcgggggggtcaaatccctgctttaaccttaaaaacccctgtttctaaaaagagaaaagaaaaaacatggcgggatctgggaagagagaaagaaatacttggtggcgcagggacacacccaagggaggaattacgccagggatttcacatctcgcccctcctccccc

SEQ ID NO: 530535 - DNA, 87 bp, Homo sapiens
aatgttttataatgtccctgcccagggacctgttagaaagcactttattttttatatattaaatatttatgtgtaagcatgaaaaaa

SEQ ID NO: 530536 - DNA, 646 bp, Homo sapiens
ttcaagccaagctggaattacaaattgtagcccatttgaaaatgcatacaaatgtgtgacatatacacccagaggaaaagaagtcacagttatgaaagaacaaagtgggaaaatatctttttcatgtaagattgagcattttggttgatactgtgataaaaaatcttgtgactgattctcttttgcattggtttttagtgtcatgtgcactctgcccaactcagataaaattgtatatgatgtaaatagcaggaaactataaatggtgatattgtcctgaaaggaagccacttcatttttcaaagatttcttccgcggcagggatctaggagtgtgcagggatggagttttgcatttctagaggaaacagcaggcagggtgtgtgcagccggaaaggaggcgtctaggttccaagggcaaatcccacccccttagaggggattggagagcctgggaaagaggctgggctgcctgtgatccccaccccacaccctgcctcctacaagcccctagaaggtccacactttgagttgtcagccagagacagtaactcaaaacctcggcttcgggcagccagaagcccagaaatgggggagagggcaggcctagacaccagggatgaaaataaagtgaatattaaaaatta

SEQ ID NO: 530537 - DNA, 158 bp, Homo sapiens
atttcgaattcggaaaggaagaagtcaaattatccttgtttgtagatgatataatcttatatctggaaaaacccagactccatcaaaaagctattaaaactgataacaaattcagttaagttgcagaacacaagtcattatacaacttcagtagtgtt

SEQ ID NO: 530538 - DNA, 259 bp, Homo sapiens
tgagatacaagaatactgcaattagaacaattactaattctataatgggccgaagtgggaggatcacttgaggtcaggagttcaagaccagcctggccaacatggtgaaacgccatctccactaaaatacaaaaattagccgggcgtggtggtgggcgcctatagtcccagctactcaataggctgaggcgggagaatcactggaacccgggaggcagaggttggggtgagccgagatcacgccattgcactctagcct

SEQ ID NO: 530539 - DNA, 113 bp, Homo sapiens
tttggccccccccccccttccccgttccttgggcccccccctaatttttttccggggggccccccccgggggggggttttgggcccttcccaaaaaaaattttttggttttca

SEQ ID NO: 530540 - DNA, 385 bp, Homo sapiens
tggggctgggttatcgccaacatgcccgagcagccttcatagatacagtatcttgaagtctgcttccaggtgtgactctatctccctacagtagttaagtattagagcaggaggtggtgtgtgtaggtctatcgtcaacagttctgccaagcgtttgcttgttcattatctgtgctgaaaaggcagctggaggcaaatctgagaggctaggactgagaaggggtcttaagacaaggccagaagtcagctcacagttgcaggaagatgttctcagtgaatctgaaagccagtttatctctccatggatgttctgacatttgtctcctggtttctgtctttagggcatttgtttacctgagcactctgctgtatcccgtgcccctga

SEQ ID NO: 530541 - DNA, 964 bp, Homo sapiens
gggggaggggcgctctcacctttccaaagtgctgagtgattgggaggcgttgctgcatgctggtctgagcggctggggagggctggtggcccatcagagcagaccccctcgctctgtcaggagcatcagtcctccatgccgtagtgaacgagacacgagtgaatgctgggaaggcatctgctcgacagagatcatcgcgccaggcgagcgcctctaggcagttgggctacttctagtgtatagctcgttcttgtgttctgtgtgtgtattcgacaattgcaagctctcagcgtcgatgtttggccccggggcttggcacgctgcgagttggctgaccatcgtcgcgcggtcagcggtgctaagcgctcttgacctcgcgcagggttcaagaggcgacttcgtccgtggcactctagactgtcccaaggatagcatgcggatgtactagggcagtgtcgcacaccgatagccgcaagctaattgtctgctagtttgaaggtatgagcatgtggcgtttcacctatggtgggatcgggcttggtctcagaaggtcctgcacctctaatgtgatccgacctctcctctggcctcccgaaggtgcgtggggattacgaggcgtgagccaaccgtgcccagtcgacagtcttcttgttcctcagagaccagggtctctctgtcagcccaggttggctgtacagtggcgctatctcaggcttactgcaacctccgccttctagcactcaagcaatccatattcagatcattcttaactatactgcggtagagacacggcctactatattgccaagctggtctcaatcgtcctgggctcaagctgtcctcctgactcggcactcactaaaggtgctgagatgacaggagtgacgccatgaacccggcgcaagtgacttaacttaatacatcagaaggctctgaccctcttcaagccaatcttgggcaataa

SEQ ID NO: 530542 - DNA, 959 bp, Homo sapiens
agcccagcatcccctatcgtgggcgtcatcgctgagctggtctctcttcggcagctggtgatcgctggagctgtggtcgctgttgtgatgtggatgcgagggaggagagcgtcacgatcaagagaacaggagggagctcagtcctcaaggcctggcaaaagacaagtgactagtagcccaaggggctcctgatagtagtgcttctcgacacgcgtggtagaagtgtggacgagagcttggctcgttgtggggcgactgagcatggcaccgatttcgttccgtgctccttcctcgttttgtgactttgagccgaacccttggacctctttgtttgccgtgcacatgggcatccgtgggatgtagtctgtgcttccgtgttggagcatagaagatgctcgaaggacgggtgaggcgaatgaaccaacctcgagacccctaatgatacgaagccaatgtacaccatcttcccatgagctgggcttgatgccttcccgttctaccaaattattcctggccatggttccaccagaggagccgactgaggtgtcctccatcccctggtctcagcattcctgggtgcagcctgaaacctgtaaaatgtctttccttcccctagttaaaagttagacagcctgtagttataacctggggcttctctacgcccattgctgggccatggagaccgttgagtgacgtcacgtcccccggcaaggatctcctgactatttgtgacgaccatctacatggacccactgtgacaacttgcggggaacaccggggtccttggaagactcccaagtagcccgcgaactgcataccccaaaacgaaaaggagaccttgggcgcccggcccactaaggccaacagagggatgccgttgccaccaacacgcggccaaacagggggcgaccccaaaaaaaccccggggcaccctgaaagagaaaggacggggaaggcca

SEQ ID NO: 530543 - DNA, 528 bp, Homo sapiens
cccacaaatggatcccatataggacacgaagcttggtgggcttaagctggttgtccaaaaagtgatgtttttattagtttgattttacccacttttgcctttgcgtttagtctcagtaaaatccaaaattgaaaatgaatccctaatgctactgtattttataaattaacagatttattcttattaatgttttccccttctcttctaaggattactttcgtcccctgcatttaaaggctttcacttatattaatctggcattaagcgggtcttgggtcccgccacttcaaggtttctgcccaccccactgttgtattcgcttattgagaaaacaatgccaaatgtgaagcctcccgttactgggccatttctatattaggacagccactgggccaacaaagttgagaaactcactttaaaccatgctggtttccctttcctttgctattctggaatccccacagtttctttctgtttttgcgaagacacagattatccttatttgggttcccccctggacaccttatt

SEQ ID NO: 530544 - DNA, 135 bp, Homo sapiens
ttcgttctagtgtgtagcgtgagcaataggggaaatcagtgtaatgaagcctcctatgatggcaaatacagttcctattgataggacatagtggaagtgagctacaatgtatatacgtgtcgtgtagcacggatg

SEQ ID NO: 530545 - DNA, 145 bp, Homo sapiens
gcactgctgcggcggggcgtggagggcagagggccgcggagccgcagttgcaaacatggctcagagcagagacggcggaaaccgttcgccgagccagtgagcttgacaacccctttcaggacccagctgtgatccagcaccgacc

SEQ ID NO: 530546 - DNA, 99 bp, Homo sapiens
  misc_feature (2)..(3): n is a, c, g, or t
annggggaaggagaagggggggagtaggggggggtggtgcgtgggggggggggggggtgggggggggggggtcggcgcgggcgggggtcgggcgggggg

SEQ ID NO: 530547 - DNA, 338 bp, Homo sapiens
aaggtttaagttgttagggattttgagtttttcattttattgcaaatctggggtggatgttagactaaaggaaaccccggaatatttacctggtgttacatttaatatttaatgtaactggtctagcaacattaagggggattttttaaaccaactccggagggtgtggggtgcacattttgccctggttttaaaaacttggattcaaatcctcttatcccctcagactcagacccaaggccttttacatggaaatttttcaaattacttccctttatgtaaaaaaacgtcctgtggcccagttgtttaaatggaaaataaagggctttttttaagga

SEQ ID NO: 530548 - DNA, 557 bp, Homo sapiens
  misc_feature (522)..(522): n is a, c, g, or t
tatacgtgttcggggttggtctgtcagtactgcatgacattcttcttcagttgccaagccatcaccagttcatgagtgcattagcgcccgactcgggctggggagttccttcgctatctgttactcagccctgctgaccaagacaaactgcattgcccgcatcttcgatggggtcaagaatggcgctcagaggccaaaattcatcagccccagttctcaggttttcatctgcctgggtctgatcctggtgcaaattgtgatggtgtctgtgtggctcatcctggaggccccaggcaccaggaggtatacccttgcagagaagcgggaaacagtcatcctaaaatgcaatgtcaaagattccagcatgttgatctctcttacctacgatgtgatcctggtgatcttatgcactgtgtacgccttcaaaacgcggaagtgcccagaaaatttcaacgaagctaagttcataggttttaccatgtacaccacgtgcatcatctggttggccttcctccctatatnttatgtgacatcaagtgactacagagtgcagacga

SEQ ID NO: 530549 - DNA, 288 bp, Homo sapiens
tatggcgttcgcacgtgacatcgcggctgccgacatcgcgtcactccttgctacatctcatagctcctgtgagcatcttatcggtccttccgaagtctcatgcgaccttcctccgatcttcttgccccttccaacatctcgattcctccttccaacatctcatccctccttccaccatctcattgcttcttccaacatctcatagcccctaccacatctcaagccgccttccaacatctcatctcccttccaacatctcatacccccttccaaaatctcatagcccct

SEQ ID NO: 530550 - DNA, 283 bp, Homo sapiens
gggaaaaagaactaggatctctcgaaggttgataggtccgcacggtatgaggattctacgtggttctcttggttcccctggtgtgtgtgtgtgtaggaggatgccgcggcccttagatcaccttcttgatctcgtcgtcttggacatggcggcggcgatgcctccgggcaagaagtctttggcgaacgacatggcctgttccgtcttgcgatccaaccatcggtagtcgattccgtgtcttgatcaccgggtgggagggaaccgtggcgtcttgcgggggctg

SEQ ID NO: 530551 - DNA, 446 bp, Homo sapiens
cccggaaattcggccattatggccggggccacaaactttaagggccggcagagttcacaggtttttaggccaggagccaggaggaaaccaccggagggacccatttaattgggggtaaccatgatttccaggttggccggggttttttgggcagccttcctgatttctgcagttttgggtgaaggtgcagttttgccaaggggggctaaggaacttagatgtcagggcttaaggccatactccaaacttttcaacccaaaatttataaaggaactgaaagggattgaaagtggaccacattgggccaacacagaatttatggtaaggttttctgatggaagagagctctgtttggaccccagggaaaactggttgcaaagggttgtggagaagtttttgaagaggcctgagaattcataaaggcaaatttacttaaccatttaatg

SEQ ID NO: 530552 - DNA, 886 bp, Homo sapiens
ttctgtctgtaaaatgaggatgttggccaggcaccgtggctcaatcccgtcatctcagcactttgggaggctgaagcagaaggatggcttaagcccaggagttcaaaaccagcctgggcaacatagtgagatcccacctttagaaaaaaaaaaaaaattagctgggtatagtaagcatggtagcctcttggtatgtcacaagttaactggaggaggctagaggcgggaggatcgtttggagcccaaggagttcgaggatggaagtggaagctatggatcggagaccattggagatcttacaacttctggggtggacacacaggaaaggaaactctgggtgcatcctttataaaaaaatatgggatcgataagagctggagtaggggggggtgagactactatgggctttggaaatatccaaaggcaaactttggggaaagaggcccaagagtgggcgggtgggacatacaattgggagggggtccaaaagagaagtttctaccagaggaacacaaaacactttggtgcgccacaagaacaggggtagaagaacccgcacgaattctgggtgacatataaaaacaatctaacacgaggacaacattaaagacactgagggatcgtaagagaacgggattagtaatggcccccggtacaaaaataccccagagcgggtcaaacccaagtgggggcaacacatccacaaagcatgggggggtgaggacaacaacgaaaggcacagagaaaaaatccgtgccccctgacacaaacaaacaagaagaaaaacagaaaaaaagcaaaacaaaaaaaaagaaacgcgggaggggtcgaggcgaagaaagcacagaaaggaaaaaccaagcgagaatatacacgaacaaacacc

SEQ ID NO: 530553 - DNA, 284 bp, Homo sapiens
aaaatttctttagatagtagcttaacatactccacacttccaatgctgagacctaaaaccatatagcaactgtgtatccaatagtgaagtctgtggaactggaaaactccacaggtccaaccacctttcactattctccacttgcctcatgccttctccctttacaatactataggcagtcataggaatcactcctgtgcacatgcccccaccttccttgaacctctctcatctaaatacaacatacaaaaactaatctctgcctgaacctgtgctggagaata

SEQ ID NO: 530554 - DNA, 266 bp, Homo sapiens
ttgacaggtgggatcgtgttatgacacatgtgaacaatcatgctatggacatgcttcaggatatgttactatactcgattcagtggtgtaacccgtgggatagtcaacgccttccattatgtctgccagagatcttggagtcggtcacattatcacttgagcccaaagaagcaggcttataacctacgaatgaggttattaaccagttattgcaccacgtctggtgcgagtgtgcattgcaccgaactacaaagtcgggtaccgag

SEQ ID NO: 530555 - DNA, 129 bp, Homo sapiens
gctgtttgataatcttgtccttcgtattgcattttttacccctatcaaaggataatgcattatactgtccctattctgtccttccaaaatccacatttattctatgcaaacgtataacctctctgaacc

SEQ ID NO: 530556 - DNA, 199 bp, Homo sapiens
cacgagggcatcttacacccttctgtcttcagtcaaacccaacagtgatagcatgtgtctgcattcatttggcttgctaatgggccaattgggagatccctgtttcatctgatggacagcattggtgggactatgtggatcctaccgttactctagaattattagatgcgccactacatgagtttctagatgtattgcc

SEQ ID NO: 530557 - DNA, 128 bp, Homo sapiens
  misc_feature (33)..(33): n is a, c, g, or t
atggcagaacagtccctcaaaccactgctgtgntgatcttggggccaagccagcttttggtattgtcacagcgccacgtgacacgtgcccagccagggagtgcaagctctagcacctaaggtgcaaag

SEQ ID NO: 530558 - DNA, 960 bp, Homo sapiens
gtggttcagccaattggttctcctatgaagcccatcaatttatacttcctgggtgtgctgcgcagcaagttactaagaagtatgacgcttgtagcaacgatgagaggctgttaatcgctatgacctataacctatctagcaagccgaagtacgcttgaaagacttgaccggcggcatcgttggtgtgtcatgacatgtcatcatcagacataggtttacgtacagatggcacttgctgtaattataataataaaatctatagggactggacatggacctgtcccgcgaaactaaggctttacgaacaggacacttgttgggactggaccctgtaatgcgtactacgtaagtcctattggtgttgcaaacccagtgcttgtaacgtgactcatatgacgccaacgcgggaaggaataaatggtcggggacatcaaaggaagtacttgtcagctcatatttcaattgggtactattctgagcactttcggcgcccttctatgggaagtattaaacgatctcatttttttttctaatagcaggttcgcgcttgcgggtgcatccttacgcgattttcaaattccgaaccgaagttttgaactccccatgggatatcttactatcacggcacaagtccgggaattatccgcagtgcgcaaaatctttagggaaacgaactaggccatgcttcaggcaacacgtgcaatcctcccagggggaagccacaagtggctaccgcgtattgcatcagtcttgaccttgagcttaagagtgagagccaaaagccagaaagcctaaaagtccaacgccacgtgttcgggtcggcgctaggacaggcatcatcgggcccatccacgaagtctctagcgtagcaccgacgctggcggatgctatgcttggaattctgtgacacggctgtagagcgatctctcacccagcggaccttggctaccccccgattac

SEQ ID NO: 530559 - DNA, 471 bp, Homo sapiens
agccactaatctggccaccctgatctctgtggatttacctattctggatatttcatataaatggaatcatatgatatgtgaccttatttatgtatctggcttctttcacttagcataatattttcttttctttatatctgttctttttctgcacacaacagtttaactacttatttgcccaggctgtatgtgcaataggctgcaatctcaacctaccgactaccacaggtcatcaagacgattactccgtgcctacaggcatttcccccaaggtagctgtggtgcacatcactataggtggtgatacacaaccgagcgacccaagccaaagatttgttgtgcatacccatatatagcgtacataggaagaccgagagggtgaccaagacacaaagattgggacacacaggacagagccgctatgaacgagataccagacagagaggatacacacacggcaacggaacgacc

SEQ ID NO: 530560 - DNA, 717 bp, Homo sapiens
  misc_feature (27)..(27): n is a, c, g, or t
  misc_feature (46)..(46): n is a, c, g, or t
acgggtgtttcggtgcggaggcgcgcntgtcgatcagcatcggtancacttccggctcggggcggcggtaagcggcggtgattgcggcacgcaataccgattgcggcaggatgctctcggcgaactcaaggaagcactggtgggcgtggtcggcctggacctcgccggcatcatcggcctccttggtgctcaagccattgagctcggacagggttgcaccaccctcgagtttctccaggtaattgaaaatcgcctgcttgatcagccagtgcggcgtgcggtcaatggaggtcgcggcggccttcaggcgttcgcgggtcgggtcgtcgagtttgaccccaagggtggtcgttgccatttttttatcctcatgggtgccactaccgagtggcatctgctggcggcaagattagctttgcccatcctgaggtgcaaccgggtgcaacccttttgttggttaaatgttcgacgcttgatcggaaaaaaataaacacacgacggaatccgcttcgcgctggtgcatttgcttctgagatcggctgttcttgctccgaaaaggagcaaaaaaagcgcgtttgtcctaaaacatacttgggtgcaacttaaacggcagaaactggttgcaccttatttgctttgttgaatagcattcgcgcaccaaggtgcaaccaaccctctgggtgggtcatcggctggcggctttctgggaacgcagtc

SEQ ID NO: 530561 - DNA, 99 bp, Homo sapiens
tcaagcttctaacatgtacggggacatgattgagcttcagagctaaaatgccttcacccttcccccaagttggaatatatcctcccccaaattaaaaaa

SEQ ID NO: 530562 - DNA, 322 bp, Homo sapiens
tgtaattcaacgtgttacacgggcatatcggattcgagcctgggcctcatccgcgggcaccacaacagagtttcacctggatgtcagagtgggtatgagttgtcacgcagcggcacgccagagcagagcaggaaggcccgcatggatagctccgagtgtcccctgcagctcatgagcaggcgcaccttgacgccacgctcgtaggtcgcccgccgcagcccatcgtccatggcaggccaaaacctgtgagggtgggagaactccacattgcgcaggtagttcatgacagctacgtagatgaaactccgggcattgtccacca

SEQ ID NO: 530563 - DNA, 144 bp, Homo sapiens
gccccactttttcataaaagagcagacattgttatcctgcttgtccagattttggctgagaagtagttactgtgcacatgtgtagattgcagtctgtggctcctgatgggtctgagaagatggacgtggaggatgaaaatctgt

SEQ ID NO: 530564 - DNA, 182 bp, Homo sapiens
ataaagtgtaggttgggtatcccagcgtgcatctttagaagctgaataaaatttctttttttcagtaatggccttgtaacattggtaaagggagtctcgctctgtcacccaggctggagtgcaagggcctgatctgggctcacggcaacctcggccttctaggttcaagcaatttcacctga

SEQ ID NO: 530565 - DNA, 272 bp, Homo sapiens
attttacatttgcaccagcaatgtaggagggttgtgatatctccacgtcctcaccaacacttgtgattatgtgtcttttaaaattatagccatccgtgtggatgtgaagtggtaactcattgtggctttgatttacatttccttgatagctaatgatgagcatttttcatgtgcttatgggccgtttatatacctttggtgaaatgtcaatttaaatcttttgctcacttttcaggtgggttttttttctcattaaatagtaagagttctta

SEQ ID NO: 530566 - DNA, 118 bp, Homo sapiens
cggtcctcatatcttatacttcataccgggaaactgagaagctgtgagaagtataaagcgttgaggaagtataaagcgttgaggatgtataaagcgttggggaagtataaagcgttgg

SEQ ID NO: 530567 - DNA, 85 bp, Homo sapiens
cagactgaggctgacccggaaacttaggggccacgtgagcactccacggccgcataggcaagcaccggaagcaccccggcggccc

SEQ ID NO: 530568 - DNA, 173 bp, Homo sapiens
  misc_feature (9)..(9): n is a, c, g, or t
aggggtatnagtatttgaaagatcaaggggttatattacacggaattgcatattggctattatgaggggttaaaagagcaccaaagagaaaatattgcatacagcagtgattacaccagggtaatggtgatattcgaaagggctaagataatttgggagggggcttagagaat

SEQ ID NO: 530569 - DNA, 686 bp, Homo sapiens
  misc_feature (486)..(486): n is a, c, g, or t
  misc_feature (612)..(612): n is a, c, g, or t
gaactagtctcgagtttttttttttctgttttgttttgttttgttttagcacaaccctttttcttcttcttcacttcccttcttggtgctcagcctgttccagccaccgtgtcaacatgccttggtccatagctctggaaggcacacaccaagcaggaccagtgaacagaagatgagaagggtacattttgacaccaaactgcctgggttggaaacccagctctgtgacctaggaccagtcacttaacttctgtgcctcggtttccccatctgtcgactggggatgatgagagtatctctcactgggttgttgtgaggaatggatgaggaagtacaaatgccgtgcctaaagcagcgcctggtgcacactgatatgataagttttattattatcatcatccaattatcatgatttctggcaagtgggcactttccgtcagaaatctcggtgaggagacagggccatccacccgtataagaatgcangctcagcggttggcactttcattgagaatcaacggtgacttattttgcagtccccaatcccctcattgtcttccatcgaaatgggctcaccgcttggtctgtgtgttcgtgggccccatgctttanccattatgccccgaatagccccttttaggtcacattaattgcgtattttggggttccccctttggggtgggggg

SEQ ID NO: 530570 - DNA, 581 bp, Homo sapiens
gggtaaactacctttgcatgaatttggttgaaagcgtgctgttaataatgacttacctgtcttggtttactctatggagatgcagccgactccattgccatgcgtttgatttcatctatacgggacagtccatcagggacatctacgttcaggtaaactcgatggtgatgaatggtccaaagttaccggcaccatttggcaaagtgaaggagaaaaagctctatatcgacgactcctctgctcttccacctacagaagttcgtgctcgcgcacgtcgtattgccaaacagcacgatggtaaactcgggctgcatcatggtcgattacttacagctgattgaaagtaccaggtatgggtgataaccgtgtcggtgagatttcagaaatttcacgaggcttaaaaaagctcttgccaaaaggaaaatgatgtgccctgtaatttgcactatcgcagcttaaccgttccctcgagaatcgtcccaacaaacgtcccgtgatgtcagacttacgttgatccgggtgcgatcggagcaggaagccgacttggtcatgtttatttaccgtgaggaagtctataacaa

SEQ ID NO: 530571 - DNA, 202 bp, Homo sapiens
cccgtatttcactgcagatagtggatggtaagatgacgatgctcagattattcttctcattggcaatgccaggatggcagtggatgacttcaacctcaagtatgaaaatgaacactcctttaagaaagacttggaaatttgaagtcgagggcctccgaaggaccttagacaacctgaccatggtcacaacagacctagaaca

SEQ ID NO: 530572 - DNA, 200 bp, Homo sapiens
  misc_feature (85)..(85): n is a, c, g, or t
cagtgtgacagcaagtttcattctagcgtggccgctggtcactgaggtctgaccttatgcatgtatttattagaagggaattctntcattctcaccttgggatacagtacagctttctcttcttgagctgtgtgggctattaaaattcccccaggctgagtgtttcaggaagcaccataaataaataaaattgtctgtga

SEQ ID NO: 530573 - DNA, 138 bp, Homo sapiens
gaaggaagaaccagattgctgattggagaatccacaggaggggagaggaggaaagggaacgtggctagggaggaggccaataagaccccttcctttctgggcacaggaaggcagcgcaggggcaccagagtccaggca

SEQ ID NO: 530574 - DNA, 772 bp, Homo sapiens
ggccattatggccgggcttggtggctcatgcctgtatttccagcactttgggaggctcaggcaggtggattacctgaggtcaggagttcaagaccagcctggccaacatggtgaaaccccgtctctactaaaaatacaaaaattagccaggcgtggtggcggtgcctgtaatcccagctactcgggaggctgaggcaggagaatcacttgagtctgggaggcgaggttgcagtgagccgagattgcgccactgcactccagcctcagcgacagagtgagactctgtctcaaaaaatctatctcaataaagtttataggtgcaatatatatgacatgaagcagaaaagatgagaggaataaatgtacctataaatgcaaggttcgtttattttacacgaagtaggaaaaacagactttgataaattaacgatgcatattataatccctagagctaccatcttaaaaaatgcgagagaacagtttcagcgccaaaatactatccaaacgaaatgctaccattctaattaacccggcaccacacagttaggtcttaggcacagggcatccattctcctctcttctattcctcccccacaactatgccgtccggcttcgcccatccgctcctagcatcctgcacagcttactccttcctgctgacttcccggcttcatttggcccaactcgcccttaactgactccgactaccactcactcgctctcgttaccacttcggcgctcctcgctcctctctcgtcgtcctctcctctcc

SEQ ID NO: 530575 - DNA, 160 bp, Homo sapiens
acggcagtatagctgtatcgtgagtgtaaaacgacggcagtcatagctgttcctgattgtaccccgacggtgagtcatagctgttgcctgattgtacaacgcacggccagtcataactgttgcctgattgtaaacggccggccagtcatacctgatgcct

SEQ ID NO: 530576 - DNA, 759 bp, Homo sapiens
tagaaacattcttcaggagcgcgggcgcaggaggtccgtgaacatgggcgtagctgttacttaggagatcctgagtcagatagtactgagtgcttggagtattcttctctcggaatctacgaacaaaacgcctcgtgtggatggaccggtagcggtatcattggaccttgtttcttggaatcgcgcagtccatcgataggtcgatctacgtgggatctaatcgtacgtcgagtgcagaatcctaaggggcagtctcgattagcaaaagttgacgcgcctcgagatcggcccttagtgtcgtatgggtcacctcaatttccattcaggcctgtgccatgctgtcgtgcacttggtgctcccctggatacttgactgactttggactgactggacaacagcctccatacgccactgaaaactgacacatgaaaacgactgggaacgttcttggctgggatttggcactttcctttacagtgaagttggggccatagggagcccctatggcccccgttggaggaaggatctatccgataaactttgcgttgagtcaaaggacacacaccgatgaccaaattcacttttcacacaaacatgtgagctcttcccactgaggggccaacgggcgcaactagacatctttttaacccatgtgctttcaacacccttacaagattggccacctacataatttggccaaaggggccggcgccggtaagggcttaacccctcatatatccttggcggaagaggttactc

SEQ ID NO: 530577 - DNA, 562 bp, Homo sapiens
aatatgtatttttaatcattcatagtgctggtaaaaaaaaaaaaaaaaaaaaaaaaaatggggggggggccggggcgcaggggctcaccccggttaatcccagcacttggggaggccaagggggggggattcaccttcatggggccgtggatacatccccagcattggggagtgggaggctgagggtgggtgggatggcttgagaagtttcaaagaccagcctgtgtccaaccatgtgggcaaaaccccggtcctcataccataaaacattagaaaacttagccgtgggcatgtgggtggcacacggcctgtttaatccccaggttaaccgggggaggcgctgagagggcaacaagaaaactggtcgttgggaaccttgggagaagggcacgaaaggtttggcgacgtggagcgcccaaagagaatcaacgcgccacgggcgattctccagggcctgggggccgagaacagggggtgaaaacggggtttcaaagagacaaaaataaagggaaggcaacatgaacggaaaacaggaaaaacttggggggaacattagtgtccg

SEQ ID NO: 530578 - DNA, 211 bp, Homo sapiens
  misc_feature (29)..(29): n is a, c, g, or t
gcttcctttgcctttacccaaaacctttntgacgtccccccccgtttgttgtgtgctcacccccaggatgtgtacccggttgtagtaggagctgaaatccatgttgagctgtaccaggaacttgcatatttaaagacaaagactgagtccctggcccatttttttgtttttgtgccccaggccaaaataaaaaataaagtgtaaagtgtca

SEQ ID NO: 530579 - DNA, 270 bp, Homo sapiens
  misc_feature (255)..(255): n is a, c, g, or t
atctcccggctgggcacggtggctcatgcctctaatcccaacactttgggaggctgaggctgggggatcacctgaggtcaggagttcgagatcagcctggccaacatggtgaaatcccctctctactaaaaatataaaatttagccaagtttggtggcatgcacctgtaatcccagctacttgggaggctgaggcaggagaattgtttgaacccagggaggcacaaaatattttattgaaggaaaaacgaggggngaggagtcaggtggg

SEQ ID NO: 530580 - DNA, 375 bp, Homo sapiens
tgaatcagcaacgcaccccatcgttcctggtccagcgtgacgaggtcaagcgcgtcggttacatcgtggtctcctccgaccgcggtctggccggcggcctgaacaacaacctgttccgcaagatgctgggcgaaatgcgccagtggcaggacaagggcgccgacatcgacgtggtcaccgtcggccagaaggcctcgaccttcttccgccgcgtcaaggtcaacatggtcggcaccgtcacccacatgggcgatgtgccgcacctggaacagctgatcggcgtgatcaaggtcatgctcgatgccttcaccgagggcaaggtcgaccgcgtctacctggtctacaaccgcttcatcaatacgatgacgcagaagg

SEQ ID NO: 530581 - DNA, 135 bp, Homo sapiens
gagcgtgaaactccgtctcagacaaaaaaagtctggttctcgtaggttcatccggtgtcacaaatggacaggatttccttctttttaaaggctggactaaggctggggtatgatgggctcattcctaataatcgc

SEQ ID NO: 530582 - DNA, 1472 bp, Homo sapiens
aaactattatacgtagcagtttacctttcctgcacgtgcctagaggaagtactgagctatgatcagcgtcacaacgctcatatccatcctctactatgcctagcaaggcaataatcactatcgactggcaccattactagccatactcatcaataaggcgcgtcaagacgacgcagcgacgtccgcatcttagaccaagtatatggtgaccctattggccaatacgtaggtctttgccgacctgcgaaagcagacggtgggccctagacccatacctagctctcaaaatctccaaacacactactggcactacgcacctaacgctacaatacaccctcaaaccctaactcccacatgctaaacaactcaatacgtacccaacaaactcatcatcacctacccacactgcaccatgcaccttatcccaaaaaaacaccacccataaaatatcgacactccaaaccacaaaccaaccacaacaagaccttacaattatttcacacactcaataccacatcataacatcactcttatatatcaaccaaaaatccaatcacacaaaccctaattgatcagacctagctaatgccacaccagaaggcctataacaccaatcccggaaaccaccaccattaaaacatacacatccctcgccttccagtaaaactgaacgtaaacgcattaacctctgcacattcactaacccctacatcaccagaatgacgatgcgacaagcacaaatagacacaacgatcattccagcagatgacaccccatcctaacgttccagcccgcacacacaacccaacacatccagcacacaccatccacaccgtaagcatcacgtgaaaaacatcgctcgacgctgacagccaaacatcctaccagagtagaacatgaaacacaacccactcccgagagaggaagccagtaaggcaacgtcaaactcacacacaactcgaaatagcatgcagcctcacagcgaactacacacggcagtaaactgccgcccacctatgcgactcaaacatccacgcccggaactagaacggaccaccccagaggcgaacccgcgcccagcaaaaatgcgccagcgcagaacacacaccgccctcagacgcagcacccccgcaaaaagtgaggcgcaccgaaccccagacacaccaacggaacaagaccatactagagacctcacagaacagccaccccacaagcaaccaagtacacacaaacaacgaacctaacctactgccgaccaagaaccacaaaccacctcacgaaccacaccaaaaagaaccaagacaagacaacaaagaaaacaagccaccagccgcaggaacagacagaccacagcaccgacacacacctcacgagcatcaacacactgcacacaccacgcgaaggcaaagacacaagtcacagaagaaagaaaaagtacagcaacacaccataacacgacacacacacagaac

SEQ ID NO: 530583 - DNA, 940 bp, Homo sapiens
gtgtgcactgaagaagggtaactgggtccagacccactgcgtcgccgcgtatctcctgagtgtgaacggacaacccggtgcagagcagttccgtaactgattgtggatcacgagggttcacctcttattggaggaactcatgcgttgtgcggttcagaaacacatgctggatgaacaggttaagggtgaaatttgggggacatcgttctcgtgttgataagatgtagccaagggcgtcttagaagcattgggtaggaattttttacagtgggaaatgtgaaggcacgatgggtagtatgcagggaggagttgggttttgatagtgggttcattgatagagtgtcggaggatatatatgagtggaaaagcataaagatgttggtatacacattatactgtctagtgttacgtggcccatgtttgtgagtgtatgccccggtgggttaaacataaaactgggaagttttgtcctgttgaaatcgaaacaagggataccaaccttttttgaatgggtacaaactcttatttttttggagaaacccttttgtgtgttcgggacacaacaacacaacgctgggggggggggttcaacaaaaacaaacacttttttttttgccttcttctgttcccaacacacacccatacaaacacacgcggtcttttttttctcacacaaccgcgggcggggggggggggggaacaacccaacctataatcaaaaaacaaccagcctccttcttttttctttcttggtccccgcccactcaacacgcagaggcacggggggcgggccacttccatttcatcattccaacctcaaacccgcacacgcaacacgaatacaacgatacgataggtcggtcggccccaccccaaccgataggcacgatggtcgtactcaattcatcgccggcgaagcacacaccacgacccaccaaca

SEQ ID NO: 530584 - DNA, 1531 bp, Homo sapiens
  misc_feature (325)..(325): n is a, c, g, or t
  misc_feature (824)..(824): n is a, c, g, or t
  misc_feature (926)..(926): n is a, c, g, or t
  misc_feature (1087)..(1087): n is a, c, g, or t
  misc_feature (1089)..(1089): n is a, c, g, or t
  misc_feature (1142)..(1142): n is a, c, g, or t
  misc_feature (1237)..(1237): n is a, c, g, or t
gaacgctcaccccgcgaccttggtggggtgtcagcagacaaggggtgggggtggagaacacttgtctccgccgcgcttttttataagaatatgtgatcgcctgtgtggcgggcgccgtctggttgttgtggtgctccagacgaccagccggccgctcgtgttagtggtgtccacccccccagccgtggtgctttatagggggggagaactcctgttgtgatgcacgcccaagaggggggggagctagttcttccccccgttgttaggacgaccgtgggggggagagactgattgtgtggtacaaagagacttggttgcccaacancaagtgtggggggcgccgcaggagaggaggagttgttttgtgtgcggccgccaaccgcggctcggcagacagcgtctgcacaccagcaggcgcaccactgtggggggcggaaaaccaccaacaagatgacgccccaccagggagtgtttttcttttggaggacacgttctacgacagtttgtgaatatcagcgcggcccctctagatgatttgttggtagcccaccccgttcctcctcgcgccgttgtggttgatcgagcacctgcgctcgccccaggcttcatatattttttcctggaggacaccctagctaaaaaggtgtctcggagagaggggggagaaatgttttctctcgctgggggggaggcccctctcttgaggaaggcggggagatattgagagagggggtaattagttgtggtgtcggcgccacacagggcgacacaacacacgcgggtctcgacacgcacacacacacgtgcgccccctctgtgttgtnggtgtttttttaaggagagaccaacacagcggggtgtcacaactctcagcagctggtgctctttggggtgctccacacagcacacctctggggggacaacancacacaagcagggtgtgagagagacccccctctgttgtgtctcacgacacaacaaaaaatagaagagtgtcccccctctcgagacactttgggccgcagaatggccctcatatatatagggggggctggaaatacacccacactcgggctctcacatatananaggagagagagagtgtgagagcccaccactctttgctctataaaaagagagtnttggtgcgccacacagaagtgataatatagagagggttttggggtatacgggtgtgcgtttataccgccctgttataatctccaccgcacacttnttgtggagagggccacacaggagagggccggagatcacatttgagagtgtcacaagagagttctgaagagccaccgcgcctggcgcacacacacatggccacaaaccctcgtttcttgctataaaaatacccacaaaattatggctggggcgtggtggcggcacaagcctattataccaccacgctaacttgggagggctgaatgccacggagagagagttgcttgaaacccgggagggcggagaagttgccatgagcccagatcaagcccctgcactcccggatttgtttcca

SEQ ID NO: 530585 - DNA, 746 bp, Homo sapiens
  misc_feature (38)..(38): n is a, c, g, or t
  misc_feature (101)..(101): n is a, c, g, or t
  misc_feature (160)..(160): n is a, c, g, or t
  misc_feature (171)..(171): n is a, c, g, or t
  misc_feature (200)..(200): n is a, c, g, or t
  misc_feature (205)..(206): n is a, c, g, or t
  misc_feature (211)..(211): n is a, c, g, or t
  misc_feature (215)..(215): n is a, c, g, or t
  misc_feature (243)..(245): n is a, c, g, or t
  misc_feature (247)..(247): n is a, c, g, or t
  misc_feature (250)..(251): n is a, c, g, or t
  misc_feature (254)..(254): n is a, c, g, or t
  misc_feature (314)..(314): n is a, c, g, or t
  misc_feature (358)..(358): n is a, c, g, or t
  misc_feature (371)..(371): n is a, c, g, or t
  misc_feature (433)..(434): n is a, c, g, or t
  misc_feature (437)..(437): n is a, c, g, or t
  misc_feature (448)..(449): n is a, c, g, or t
  misc_feature (462)..(462): n is a, c, g, or t
  misc_feature (465)..(467): n is a, c, g, or t
  misc_feature (472)..(472): n is a, c, g, or t
  misc_feature (474)..(474): n is a, c, g, or t
  misc_feature (477)..(477): n is a, c, g, or t
  misc_feature (484)..(486): n is a, c, g, or t
  misc_feature (490)..(490): n is a, c, g, or t
  misc_feature (494)..(495): n is a, c, g, or t
  misc_feature (500)..(500): n is a, c, g, or t
  misc_feature (581)..(581): n is a, c, g, or t
  misc_feature (588)..(589): n is a, c, g, or t
  misc_feature (597)..(597): n is a, c, g, or t
  misc_feature (614)..(614): n is a, c, g, or t
  misc_feature (639)..(639): n is a, c, g, or t
  misc_feature (641)..(643): n is a, c, g, or t
  misc_feature (653)..(653): n is a, c, g, or t
  misc_feature (657)..(657): n is a, c, g, or t
  misc_feature (662)..(662): n is a, c, g, or t
  misc_feature (671)..(671): n is a, c, g, or t
  misc_feature (684)..(684): n is a, c, g, or t
  misc_feature (714)..(714): n is a, c, g, or t
aaacttttttctgacaaaaaccagacagtaaataattnggctttgtaggctttaccatctctattgcaactactcatttcaaagcagccacagataatatntaaacagatgagtatagctagttccaataaagctttatttgtgaattctgataattttnacgtcatgaantattagtctttgatttcttttcccaaccntttannactgngggncccattcttagcttacagggtatattannncnggnngcnggctggatttggcccacatgctgtagattgccaacccatgctacaaaatataccttaaangcctgtcacctcaaaatttcaaatcactgcttcccaaaggcttnaagtgttttttcnaatcttcctcagtaacttcttttagatcagctggtttccattttggactctggtctttttcnnttnaaacagctctnncgccttcatgaangtnnnggccncncgnggggggnnngggngggnnggggngccggggggggggggtcggggggggcgggagagggcccgcgcgggggggggcgtagtgtgatctttagaaatgttggaganattttannaattaccntcaattgctctagggcnaaaaaagaaccatcttgctgtaagnannnaataatttcntccncagtnttggctganaaacaactgtttnttttgtccatgtgttcctcaagtataaaanacttgtctcgctcaatcttagactctgtatgg

SEQ ID NO: 530586 - DNA, 111 bp, Homo sapiens
cggcgaattcgtggtgctgctcggcgaattcgtggtgctgctcggcgaattcgtggtgctgctcggcgaattcgtggtgctgctgagaagagtgtgctggagatgctctag

SEQ ID NO: 530587 - DNA, 1131 bp, Homo sapiens
  misc_feature (109)..(109): n is a, c, g, or t
  misc_feature (111)..(111): n is a, c, g, or t
  misc_feature (113)..(113): n is a, c, g, or t
  misc_feature (122)..(122): n is a, c, g, or t
  misc_feature (133)..(133): n is a, c, g, or t
  misc_feature (163)..(163): n is a, c, g, or t
  misc_feature (210)..(210): n is a, c, g, or t
  misc_feature (220)..(220): n is a, c, g, or t
  misc_feature (225)..(225): n is a, c, g, or t
  misc_feature (228)..(228): n is a, c, g, or t
atagatgactgtgctcctgatagtccaacgctacccccactcccctcctcctggtgagtaaattgatactgatactgaatttagaaatattgctttaaacaacagaganananaaaaagaanaaaggaatctngtcatttttattctgtatattcattatctngtatacttgtgaagaagaatcttttactctgatttggacaaaattgnctaacacaantgtcnatngcttttttgaataaaaaaatgttttataaagaaaaaaataagtaaaaactattaagaaaattttacccagtatttcctagaatatgtccaagttttattggaaattatcagtacccacatgtttaatttaagtttcacgatggatggctaacatgagttttttaaaacattgaaccggctcggcatggtggctgacacctgtaatcccagcactttgtgaggccgaggcgggcagataaccaggtgaagagttcgagatcaacctggccaacttggtgaaaccccgtctctactaaagatacaaaaaaaacacacaaaaaaaatttagcgggggcgtattacccatgtgccggttaaccccaggttacccagggagggctggggcgcgggaaaatcggtttggaccctggggatcgggcacaatttggctgtggacccaagatcattcccatgtgggcactccacagcctgggggtagaccaggggggaagactccattctgggggaaacaacaaacaaaaacaaaacaaaaggggcgcggagcgccataaaaaatatccccagaggagggcaccaaactatacggatacccagagctttctggaaccaaggcgcctcaataggagagagggcgacattaataacgcgcatcaaagacacaggcgacgcagagagttaacacacacggcgccacaacgggggaaaaacagcggcaaccacggagagaaccacatggaggaagaggagaaccccaatcatcggcgcggggcgcgcacacacaggtggggaacaaactccacatgacagagaggatatataaacaccggcgagacacacatcaacactacagacgagtcaaaagtgagtgaacaaacaggagacataaaccgggccgtggacaaa

SEQ ID NO: 530588 - DNA, 713 bp, Homo sapiens
  misc_feature (54)..(54): n is a, c, g, or t
  misc_feature (73)..(73): n is a, c, g, or t
  misc_feature (81)..(81): n is a, c, g, or t
  misc_feature (89)..(89): n is a, c, g, or t
  misc_feature (92)..(94): n is a, c, g, or t
  misc_feature (101)..(103): n is a, c, g, or t
  misc_feature (105)..(105): n is a, c, g, or t
  misc_feature (129)..(132): n is a, c, g, or t
  misc_feature (135)..(135): n is a, c, g, or t
  misc_feature (141)..(142): n is a, c, g, or t
  misc_feature (144)..(144): n is a, c, g, or t
  misc_feature (149)..(149): n is a, c, g, or t
  misc_feature (151)..(151): n is a, c, g, or t
  misc_feature (153)..(153): n is a, c, g, or t
  misc_feature (159)..(160): n is a, c, g, or t
  misc_feature (166)..(166): n is a, c, g, or t
  misc_feature (168)..(168): n is a, c, g, or t
  misc_feature (175)..(175): n is a, c, g, or t
  misc_feature (181)..(181): n is a, c, g, or t
  misc_feature (197)..(197): n is a, c, g, or t
  misc_feature (204)..(204): n is a, c, g, or t
  misc_feature (212)..(212): n is a, c, g, or t
  misc_feature (226)..(226): n is a, c, g, or t
  misc_feature (240)..(240): n is a, c, g, or t
  misc_feature (246)..(246): n is a, c, g, or t
  misc_feature (249)..(249): n is a, c, g, or t
  misc_feature (252)..(252): n is a, c, g, or t
  misc_feature (254)..(254): n is a, c, g, or t
  misc_feature (532)..(532): n is a, c, g, or t
  misc_feature (628)..(628): n is a, c, g, or t
  misc_feature (694)..(694): n is a, c, g, or t
ggtagtgcctcccttagataacttgtggccaaaccctgtgcagctgctgggtgngtccaccctcatcctgtanttggagtntgtgggtnagnnntctggannntnttgggagcttgggacagccgtgannnnggngttgtnntnctttntngntctttnnactgtngntggaggnctgggnggggtttttttttttnttttttntttttttnggtagggaggtttnttgtattttttttngttacntcnttntncaaccctccactagcgctgctttcctggtcaaacctgcatcttcactgggtcatgccccaaggcctctgagggacttccacagtggtaaggagggctgccctttttatttttttttggttgtggctgagaatgctggagatgctcagttctctccctcacaaggtaggccacaaattcttggtggtgccctcacatctggggtcttcaggcaccagccatgcctgccgaggagtgctgtcaggacagaccatgtccgtgctaggcccaggcacagccnaaccactcctcatccaagtctctcccaggtttctggtcccgatgggcaaggatgacccctccagtggctggtacccaccatcccactacccctcanatgctctcactctccatcaggtcccaatcctggcttctctcttcacgaactctcaaagaaaagganggataaacctaaataaaca

SEQ ID NO: 530589 - DNA, 536 bp, Homo sapiens
taacttcataggccagggttgaagttctgaacacttggaagtctccaattatgaaaaatccatgtctaacgcctcgggcctggcgtatttacgcaataagtggcttaattgtgggaaggagggagtcatccactctggagccactggcagtggaatgtcactggatctcagtctggggggaaaacacttcaataagctaaactattctacgcttggatatttcctggaaggggaatcaccctgggtgttccacatttggggggtagttccttgggggggccactggcgtggactctggttatgacactggtggatccaagggaaaacgggggaaagaacagggtggggctttataaaatcgggagggtccatggttggctacgaaatagggcagattacaaaattcttatttcattcattaattaattttgggaaataagagtctgggctgggtggcccaagatggccccatggtactccagctaggcaacaagagggaaaggtctcaaaaacacaacacacacaacaacgggggg

SEQ ID NO: 530590 - DNA, 271 bp, Homo sapiens
atgatcatcgtaagtatgtgatctgtaagtggtgatcgttaagtaggtgatcgttaagtgtgtgatcggttaagtaggtgatcgttaagtatgtgatcgttaagtagtgatcgttagtaggatgacgttagtaggtgatcgttaataggtgatcgtttagtaggtgatcggttacagtaggttgatcgttaagtgaggttgatcgctacagtagggtgaccgcgttacagtagggtgatcgttaagtacggtgatcgcttaagtagggtga

SEQ ID NO: 530591 - DNA, 1491 bp, Homo sapiens
  misc_feature (656)..(656): n is a, c, g, or t
gaattggtcgccaatcaatttgtctttctgtgctgagcctgtcgccgatgaaggacgagcgtgtgcaggatattatgcggtatacagatgattcttgatccctgtgaacacggagcaggcgccgtactcatcacgggaccgatcgcggcacaggtcagtgcaatgatttactcatttgcgtatacctgcagaagatcgtggattgaccttgttccaattgaatggaacactccattcagcgactacggagtaaactgcgtgggaccataggtcgcctcttcacaagaaatgcgtaaagactgtaacaacacggtgcaccaggatctgtgacaagtactactttcagacttgctgaagagaggacaccctcggaccggaagcaagatcgaccatattgtccgagaaactgggctcgttttaagcttgacgttggcgatacttgcctctcgtcgtaggcattcatcgataattgagcgcacaaaatgcagggacaaattcgaagacagggccttgggaagggtttgaggcaagacatgggccttaccaaggcagaaacgtagaaccaagacggcctccattcgacgcgggacgttgcctcccatgcgcccccgcccaccgctcacacactgtggcgtgagaccacttttcgacggagncttacggcactaaagaactcttggacgactaacgttgaggtatttggccgatggccttaacgtgagttatacgggcttaatcaaagagtatgacgacatagcagactacatttatagggctcacaatcgaggaactatgtgtttgaaaaacgacactgtgttgatggagtaaatggattaaaatagaggactggtgacccgactgcaatagtttttagggtacgttgaaacaaaacagtgcctattaaagagagaggtggcaagggtaaatataacggaacaatttgtgtataaaacatattatagaacacggataggtatgggaggaagtaaggggattataaagtaacgataatacaaattatgaatattaaggcaagaagagtaaataaatgacagaaccaaaaaaaggagcggtcacgtttgaggatgtgagagcgcattagattaatgtgagcgaaaaagcagaaggaggtggatacaattaaagttttatacacatatgtgggtaagaacaggagaaaaccattttggaattgtaaagagccgatgtagtgcagtagaacgacagattagctacagagttgttcgtgtttatggataagtaatgaatagacacacgcagatatagatgaggtgaagagtatatgataggttaaggagccgagaagatattggaagatatcagctatagagaaatagccaagtatagttaagaagatacaagtgaaaattagtagaagatatagtagtagtatattctatatcagagcgatagaaacactagaataaaataaagcgattgtgtaggttaggaaggtaacaatagataaag

SEQ ID NO: 530592 - DNA, 1140 bp, Homo sapiens
cgagatcacaccattgcactccagcctgggcgatgagcgaaactgtctcaaaaaaataaaacacgtgggggtctcgcctgtgttgaccaggctggtctacgaactccgggcgctcaagtgatcctcccatcttggcctcccaaaagtgttggggattacgggcgtgagccaccaaagaccctgcctgggttggtgtactcttgttaaatactaagttattaaatggtaaacatgctggcttttcagcatcaccactgggtaaaacataccaccttatccaactgcagttcctgtctcagttcaacaacacattggcaacattggtaacttaagaacgtcttcacagatacttcacagccaatcaattccaaggctctccaatggggtgggggtctacttcaaggtattctctctcacattgtcttatctccagtttacaatcacgcatctgtggtcacaaatgtggcacaggcgagttctcacgtgtcgcaattttctcactgtggccggtgtgcagccactaagaggtggcctctgtggccaaccaaaaagtggtctcatatagaggggccccaaagttcacaagtgtgacagcacctgtggagaagcactcgtagcatctcgataaaacttcccgctcttgtgggacccaatttataaacacgtctattgtgggtcgccccgcgtgcttacaacaacccaagagcccatcagtgtttcccaaggcattgtggtcggcacacaagcacattttgttagtgggcgtcaacaagttaaagtagtggggatagttacgaatagcattacaaagcactcgtcttgagtcgtgcacacgcttatcgttatcagcagggggggatttatgataagacaggattacctcttgtaaaagcacgcggtactatcaagtcgttcatggggcacacgaagaggggaaagatagattttgatccaagagatgacgacggcgcagttagtatacaagaatgttggtgggggagcgttgtattagtgaagaaccccgagaggcgattagtttctgatagcgtcgcatctgtattaatcgcacccagtggttgataaaacacaagcccgccgagatgcaaattattggggccgaaatttagagttgggattaac

SEQ ID NO: 530593 - DNA, 215 bp, Homo sapiens
agcttcatataaatggcaccattgtgtgtataagtcatctgggactcgcataattcaatgttaagtttccaaattcattctgtgtgtagcttctgggtaatgttccattgtaaaaactgtatgaaaatttatcgatgtattttcatacagtttttacaatggaacatgtgggttttcagtgttttgttattaaaatgtgctgataataaaaaaaa

SEQ ID NO: 530594 - DNA, 266 bp, Homo sapiens
tcggttcgactctacgacggactccccgagcccggtcagtactcattgcaaaccggcttcaaagcctatttatacaaacccgtctgttccaatctctcagacttccgttcacggttttagccagttaaatacctcaaacctgcatctgttctccgtagctgtgttaaccactgtgctggctcactacagcactcttcggcatagtaaatgatagtcactacacccacaataagaaacaaacaaacaaaaaagcagtaggaaacatt

SEQ ID NO: 530595 - DNA, 637 bp, Homo sapiens
ccgctgctgactatgttgaaactcacagaattatacattaaataaggtaaatttcactatatgcaaattatatctcaatttacaaaaatgactacactacctaggttaactttataaaaactgacattggataaattcaatatgtgaataaagatcctcaagggaatctactttgtattatcaaaggattattcctatgtacaaaaagatttataatactagtctcttaaataggctcttcttttgagagcatttacatttgaatacagattagctattttctgctaagagtctagaagtcaaagaaatggtgtatagggtgaatcccagattaaacatgaaacataaataatatgacatctctgaaataatcataagtccatgggaaaatataaccacttaatgtaaatacatttttgccaggaaattatcatagagaaaaaggtatttattattatgacatttgtatttaactactgtatcataaatgccatttgagatctaataatgataaatctgaccctgaatctgacacatcctaaaagctaagcaattattatcacctaagtagtatttgtatggaagagtgccataaatgctaaaacagtcagtgactatacttatataaaatgtgaga

SEQ ID NO: 530596 - DNA, 228 bp, Homo sapiens
ggaccgactgtggtgtacgtaggtaagccctcttttgccagttccgggtgaatgtcatgttgaatgcaaattcaaagaagcagcttcaattctgccgggacttctcccgcctttttttcctgcggcgggagaagtagattgaagccagttgattagggtgtttagcatcttttcatgtgattttggacattctgtatatattcttgggagaaatatctatttagatct

SEQ ID NO: 530597 - DNA, 347 bp, Homo sapiens
tgacagcttactaagaatttgaaaggtgatggggaacaaggtaaagcccagttaatatgcctaagcagccggacacggcggctcacgcctgtaatctcaacactgtgggttgctgaagccggtggattgcttaaggtcaggagttcgagaccagtctggctaacatggctgaaaccccatctctactaaaaatacaaaaattagccaggtgaggtggtgcatgcctgtagtcctagctacttgggaggctgaagtaggagaatcacttgaatccaagagagggaggttgtggtgagccaagatcacaccactgtgctccagcctgggtgacaaaacgagactctggc

SEQ ID NO: 530598 - DNA, 126 bp, Homo sapiens
acgatcaacgccgcttggaatacggttgttagcggatagctaatattagtatggtaattaggaagatgattagatctttgaatattctgattattgtttggagtctgagttttatatctcacagtg

SEQ ID NO: 530599 - DNA, 105 bp, Homo sapiens
gaatcctctgggaaattatttaactcaaaggcctcgaaagcctgactgtgaaccttccagatattttcattaaaagactttacagttttcttgcaattcattttg

SEQ ID NO: 530600 - DNA, 870 bp, Homo sapiens
cgaccgcttagtgacgagcgatgattttaaagagcagaataaaaggtttccctgtgcctgccccacagcccctccagtctcgaataatggagaactgtcaatgcactccgcgagcggtggcccattgtactgcagctgatggcgagtgaggtcgactgggggtagcaggggctctcgttgaccctcgtccctatgcccataataaacgctgcaaatcgcgctcccgtcttctggtcagttaaaaggtgaagacgaacacgattaagaagtagaccatacagtaaagagaaacgcacataagaacaagcctttctatgtacagattctaaatcgtactccccagtacagtcatgatggcagggatgtcgagggccgatggcagcgaggcggagagagggatgatatgtgcgagggaaggagaacgcggatagagactaagggagtgggagacacagcgacagcagagcgccagtggcacctgtaggcgacactggatgcccagtccggcggcccagccgaacctcgtgaccctgtgaccgtgacgtcgttgggcaccgagaaacgtagactcggccataatcctgccttcaccagcaggtagcatgaagcctcacagagcaaacaggtgttggcattgaattgaaagctaggcccactgatggaaccatgttttactaccgtgtagccacatatattgataccatgggatgagatggctgtgtggcacgtcgtggcctgccatctacaggtctgcgagcagcactgttcgtcagatagtttcctatgtaaaagttttccttgtatgttcgcatgattgcaacgagtgatgcccctagaagcgtggcatccctatataggataggcttacca

SEQ ID NO: 530601 - DNA, 1173 bp, Homo sapiens
ggctggatcccgcacctctgggcctacccggcgacttgattgcctctccctgaccgcgcatcggccatcgtccgtgctcgagcagaccactaggacgtgactccgggaagacaagttcgacagtctgcaaacatcagattgttggcgacacgaagtagtggacacgatatgatcgcggcatcatgtattgggcagcgcacagtccgatgattgaactactgctttaggagcaccaaatggagaggcgattggtagagtgagccacattgagtaggacagagtagccgagttgctctgcgcaggaggactttcaacgtacacacgcgatcacgaggcgggacgacacgtcccgactggactcggataaacttacggagccgcgcaattcccaagggaaaatggaacgccagggcctagggagaagcaagtgggaagaaacactagagaacttccaatgcctcaaactactaactcatcccttggcctcaggggggcacaaatagatggcgtggtgtgcaatggtaacaagcctatagacgacgaccaatttccatggtagaaagtcgaaaaccaaggaaattgtcaagccccgaagagcacgcctcgggtttgtgaacttcccacggatggagcatttagacccccggcccaacacatggcccctatttgtggcgcgcacgttccaaattcaacttgacaaatctacaggccgtatggccccccttacccaagggaaagaacgatcgtgtcacccgttacgttgccccacaattacttcggcaaccattaacaaagtttggtagacactgcgtgttgcccaataccttgtgcaggatcgcctttgcaacacccaattccaaattacaacaccatggccgcttccttaaatttaaacccttaaacccgagaaaaggtgaacacaaggttcaaagggttcagagacagagcagggaccattatcaatgtaacacggccatttgggcgcgtacccaagttttttgccaccccatgggtgaaatttggccataggtttaggaaaggcaaatagagggagtaaccagacgcatcgcaggtaagcgtacacggaaaactctagggggaatccgggcgcaaatagaccatatactcaacgttatgcgctgaatctcgagacaactataaaacaacttacct

SEQ ID NO: 530602 - DNA, 1148 bp, Homo sapiens
taaaggggaggtgggttcctgcatttccactctttgaccataggaacgccgggcttacaaaaggggctgtaatgggctgctgcctataggggccccaggtccttcctccaatgtgcaaggcagcaattccgaagtctctaagtcccagtggaaagtggcaggtggtgtgggctggactgtggcttggaggattcacggggccttcggttcttcaagcaccactcgtgtcgtggctgcagctgtgggcccttcagctgtgggggccaggtgtgtgcttctccagtgtgcccccaccgggctcagatcatcttctggcgcaaggaacgacgctgggtgggatatcttcttaacgtggtgcctttctcgacaggctcttctctccactcttaggtgtggcctctctggaccgcctggcccccggaaggtcttcatcacacgctgtgggccctcccacatcatccagggagggttgggcatgttagaccgctggaagcccccagcggactggatggcttacaaccaagtgtgtttcctctttggacttcctcatttagggacttctctgaaaaggctcgggcaatgttcaacacagttctcctccggagggagacttttcccatagtgtttcaagcttgtccctgaataaagggatcttcagaacacagggggtttgggtcacccaagtccctgggaccggacaggaaacgccaaaagtcgttccagaaagaccacgctgctcggctcaacatcgggggaacggaattcaacggaaccttctccaacacggggagacatccggcacaaggaagctcttagaacaccccctctctggaaaaaagggaactcctctcccaggacaggtccaggacccctgtgtctacgccctgccaaccgggggtataattatatcttattttctcacccgagagatggggcagccacagatactgtagtatggctacacttgtggacacagtgaaaactactccgagcgccaccaaaagggataaacacaaaacgtcatgagtcgacaaccacacctcaacaaggcggtagcgcagggacaatccacaataagaaagacacaaagagacacagtgaagctagtgcgacctaatgactacttgggcgctgatactacaaccaac

SEQ ID NO: 530603 - DNA, 791 bp, Homo sapiens
  misc_feature (375)..(375): n is a, c, g, or t
ctgtataagaatacgtaagtaatccagagctgtgaagagtttaaaggccaacttctccagtgaactcaacctctgggtcacttgcaaccagaaattggatacctcataatgatgcaggaaagacccgagttcatgatgagtttcaaaggccacgttcatttaggaaccaactctctctggatttacctgctgagttccagcagcgtgatgggctgacatcccacctacaagtatgacacctgtgtaacaccagctaggtacggctggagaaggctgaagagagaatgccattaaatggaagaatgtactgattgtagtgaccttctccacacacacacacacacacacacacacacacacacacacacacacacncctacagtaatacagcaagcgtggaataatcagccaatatataacattccatcagtattttattaaggaaataacctgaatgtggttgattttgacatagctgcaattacagttttcttctatttttcaagccacaataaggaaaataaactactcatggtctaaatactagagataaagtagattcatggctcggtaaggaaattttaagcattccttcaaagattgacgtgctaaaataagcattgatgttttgagtttttttacacctaggatttttagcttgggtgttgtaggtgaaggccaagactttctgcaggaaaaagcttattttcaaacttcagaaataaaatgtcaatcataaaaatttactttcaactttagcaaaaggaaaaaaaaatatcaaccaaagagtt

SEQ ID NO: 530604 - DNA, 171 bp, Homo sapiens
cagagagtcaacttgggtggcggaacgccgagatgccagcccaagaaacaaccacatcgatatcgcgtgcagcaggtgccgtcggtcaagggtggcttgtacgaacggtttcggttcaaaccggcggtgtcggtggtttgcagaagaattaaccggggttgatttaaagct

SEQ ID NO: 530605 - DNA, 99 bp, Homo sapiens
cacctgactgccccaccggctcccctgagtacattcatcccctgcctgcgggagggcgacggacaagccgtgcgccggccgatagtgatgtgtccgctg

SEQ ID NO: 530606 - DNA, 303 bp, Homo sapiens
agaaaaactatgttactttgtatatatcatgtatataagaaatacatagaagaggccaggcatggtgtctcgtacctgtaatcccagcactttgggaggctgaggcgggcagatcacccaaggtcaggggttcgagaccagcttggccaacacagtgaaaccctgtctcttctaaaattacaaaaaattagctgggcgtggtggctcacgcctataatccaagctactcgggaggctgaagcaggggattcaattgaactccagaggaggaggttgcagtgagctgaaattgcacctctactc

SEQ ID NO: 530607 - DNA, 296 bp, Homo sapiens
acgtgggtacttgcgcttactttgtagccttcatcagggtttcgctgaagatggcggtatataggctgagcaagaggtggtgacgttgatcggggtttatcgcattacagaacaggctcctctacagggatatgaagcaccgccaggtcctttgagtatttaagctagctgcgctcgtaactgttctaggcgagcagttcacgtagatctaactagttgaggttcagggctaagcatagtggggtatctaatcccagtttgcgtctaagctattgtgtgttcagatatgtcaaagc

SEQ ID NO: 530608 - DNA, 82 bp, Homo sapiens
agacagcagcatatatctctgcagtgtgacgccgctaacctcctacgagcagttcgggccaggcacgcggctcctggtgctc

SEQ ID NO: 530609 - DNA, 193 bp, Homo sapiens
aattcaagcttctaacggatgtacggggacatggtggcacaccacctgtggtcccaagctactcaggagagctgaggcaggaggatggcttgagcccaggaagtgtgaatgctgcaagtgattgcgggtgagcctattatggtggccacatgcattccaagcctgggcaacggagtgaggctctatctcaaga

SEQ ID NO: 530610 - DNA, 316 bp, Homo sapiens
ttggttgggggggcctcggagcagaacccaacctccgagcaggacatggtaagacttccccagtcaaagcgaacttctatactccattgatcccataacttggcccacggaacaagtttccctagggataacagcgccatcctattttaaagtccatatcaacaatagggttttcgacctcgatgttggatcaggacatccccatggggcaaccgctattaaaggtttgtttgttcaacgattaaagtcctacgtgatttgagttcagaccggagtaatccagggcgggttttattttcttccaattcctccctga

SEQ ID NO: 530611 - DNA, 135 bp, Homo sapiens
agagtcgtgatctccttgccatggtgtattgccctctggctatagttcttggctgcatcttccttggcctgtcatgagttgctcaggtggaagagctggcggtagtgccagtgcgaacttcatcaatgactgtgg

SEQ ID NO: 530612 - DNA, 322 bp, Homo sapiens
  misc_feature (17)..(17): n is a, c, g, or t
  misc_feature (22)..(22): n is a, c, g, or t
  misc_feature (46)..(46): n is a, c, g, or t
  misc_feature (221)..(221): n is a, c, g, or t
  misc_feature (241)..(241): n is a, c, g, or t
  misc_feature (283)..(283): n is a, c, g, or t
acggcccagttgggttnaagcncccgagctttatcaccaactgatntcgcgcccgtcggacatggaagaccttgctgcttggtcgcgcccgcaaagcccgcccgtggctgcaccgttcctggccgaactgcgtgaagcggtgggcctgcgctcgttcgtcaaccccgtcccgttgcgcccaccaccaagaagaaagctgcgaaagccgcgcgctttgtcanttccgcgaagacgacggcanttccgcttccgtttgctggcgccgaaggcgagcaaactgctntgtcgcgcaactttgccgacggtaaaaccgcaggcgccg

SEQ ID NO: 530613 - DNA, 4386 bp, Homo sapiens
agcggattgtgcgaggcaccgggacgtcggcggctggcggagccgggctgggctgaagctggagcggcggtggcggcggcgtagggaggccggggccggggctgaggccgcggccgggtctgcgaggcccttggggcggcaggcggcggcggcccggggctcgagcccggaggcaggagcagccgccatggccgagagcatcataattcgtgtccagtccccggatggagtgaagcggatcacagcaacaaagagagaaacagcagcaacatttttgaaaaaggttgcaaaggagtttggcttccaaaataatggcttctcggtttacatcaatagaaacaagaccggagagataacagcctcctccaacaaatccctcaacttgctaaaaatcaagcatggcgatttgttgttcctgtttccctcgagccttgctgggccctcatctgaaatggagacgtcagttccaccgggcttcaaagtctttggcgctcccaacgtggtggaggatgagattgatcagtacctcagcaaacaggacgggaagatttacagaagccgagacccacagctatgccgccacggccctttggggaaatgcgtgcactgcgtccctctagagccattcgatgaggactatctaaaccatctcgagcctcccgtgaagcacatgtccttccacgcctacatccggaagctgactggaggggctgacaaggggaagtttgttgccctggagaacatcagctgcaagattaagtcagggtgcgaggggcacctcccgtggccgaatggcatctgtactaagtgccagccgagcgccatcacgctgaacagacagaagtacaggcatgtggacaatatcatgtttgagaatcacaccgtcgctgaccgctttcttgacttctggagaaagacagggaaccagcattttgggtacttatacggacggtacacggagcacaaagacattccccttggcatcagggctgaagtggctgcgatttatgagccacctcagattggtacacagaacagcttggagcttcttgaggatccaaaagctgaagtggtcgatgaaattgctgccaaacttggcctgcggaaggttggctggatatttacagacctcgtctcagaagatacccgaaagggtaccgtccgctacagtcgaaataaggacacctatttcctaagttcagaagagtgcatcactgcaggagacttccagaacaagcatcccaacatgtgccggctctctccagacggacattttggatccaagtttgttactgcagtggctacaggtggtcctgacaaccaagtccactttgaagggtaccaggtgtccaatcagtgtatggcactggtccgtgatgagtgtttgctgccatgcaaggacgccccggagcttggctacgccaaggagtctagcagtgagcagtacgtgcctgatgtgttttataaggacgtagacaagtttggcaacgagatcacccagctggcccggcccctgcctgtggagtatctcatcatagacatcacaacaactttccccaaggatccagtttacactttttctatttcgcaaaatccatttcctattgaaaaccgggatgtattgggtgagacacaggacttccatagcttggccacctatttgtctcagaatacctcatctgtgttcttggataccatctcagatttccacctcttgctgttcctggtcaccaatgaagttatgcctctgcaggacagcatcagcttgctgctggaggccgtgcggaccagaaatgaggagctcgcccagacatggaagaggtctgagcagtgggccaccatcgagcagctgtgcagcacagttggcgggcagctcccaggtctccatgagtacggcgccgtcgggggctccacacacacggccactgcagccatgtgggcctgtcagcactgcacgttcatgaaccagccaggcacaggccactgcgagatgtgcagcctccccaggacctagggcgcctgccctctgctggctaggaccgggcccagcccagcccttcctgaagccagaagcgttgctgagtgtgttccctgtaactgccccatagtgggcagccctggaggaacaaggggctggctgtcctgggctccctgacccactgaagcttctcagcacgttcctccctggagagcgggcgccacggctggtattctgcaggctgaatgcagtctccagactggaaacgcagagcggctcctcacgcctaatcctgttgacaagtcccccgccgtgttggaaagacctctcgcctctacgtggcacctggaattggggcgcacagggaggggcggatgctgccaccacccagccttctctttattttcagtgctttttgtttggcctccctgcccccatgtttttctggctgggagctcctggttacccccttgtctgactgcttggtggcaggcaccctgcctgtgagggccactttcctcttctagtagctgttgtctggtggggacgcagtggccctggacacggctcccctctgcaggtctgcaggtcggtttgctgcctgccctcctcctctcacccgatgtccaggtgggattttaaagtctgcattggttataataacagttatcagtaattcctgcccagaagacttttatttatttttttttaagataaaaactgcacaaaaggggagtgagagagactagtttccacatccttccctcctttagtgaagcccccgaggttgtgtccagggtgatgagtgtggacgggggcaccagtcagttctcccttgaagtaaacctcagtgcctgagacttttctaccaagccacacagctgcagcaactgcagatactgcgggctgagcaggagcagtggtggcgcctgccctgaggctgccctgcgatggcctgggtgggagagctgggtcaccggtgccgatgctctggccctccccaatacgctgcttcgtcccactgcaccgcctggctgagggcgttaggggctgtgcctcttgtgagggccatttgggacctccctggggcactgcacaattgatagtgtaccaatagagggagactgggcgatctggaacagcacgtggtggggtcctgcttgtgtgctctgcgttcctctgtggcgtggccaggccggggcctggctcttacccggggagtggtgggcatctcgatgcttctttgccttaatgatggccacatctgggctgctctgcacccacgggagaggctggcccagctgcagactgcttagggacttctgtgtccatcctggggggtaagcccacgtgacccacattcttggcactatgaacagagaacatttgcctgttggcttctgaagtggtcagggccatggctgacacctccaggtccgcctggcatgggacaccaagtggaaggcccaagcagctcatctgctcttgggaccaggggccagttgggttgggtctggtcacggcagagctattgtggagggtcaggaagggtggagaggagctgggttgaagcggactgctgcggatgcaactcccagcttgcccaccgcgggctgtctgctctccctcctagcagctgtcacactgaagttttgtcctctgctgtctcctctggtcctgagatgagctgtgagcctaggtggccaaggcttcctgcattgcttccctgtgagtccaaggccttcccccaccactgggcagaggctggacagcacggacttctagagagagccgcgttgccagttcctctcccactcgctcgtccttatccaccacgctattatagtttccgttgtcctccaccagcatttcccttactctgaagttccggcattcacatcattcatgttttcttttgtcttttagctaaaggaaaagcattggcgatttgtctgattctggttttgagttactctttgttcagtaatgcactttattttattgtccaaagagagtcagagctaagcatacaggcttgggggtgagccctgctgtgagagttcaggccctgggaggctcagccacctcctcttgtgggaaggaggtctcagccccacctcgcatcttcacctgcccttggtgtggacacaccctctcatgctaccagcaccataatccagtgggggtgactgggtgcacacctgcccaggtgaacacagcggctgccagtctcctggtcccgagaggaggtggggcctggccctggctccctccaaccagctgctcctgggacacaggtgctcctgcttcggctctgtttcggctcacaggtgtgcatcactgggcttggatttgcattacattgaccccagccctgcagtggaacctaataaaagcgcctgaagcaa

SEQ ID NO: 530614 - DNA, 419 bp, Homo sapiens
attcgaggctcggtacccagctatgcccaccctataccccctatacctccctatatcacctgagggtttgttttttctgttgatcagaggtgaagagttgacagatatggactggttttgaatgccctttggtagactctttttaaaggtctctctccttgcaggtggtcctgacaaccaagtccactttgaagggtaccaggtgtccaatcagtgtatggcactggtccgtgatgagtgtttgctgccatgcaaggacgccccggagcttggctacgccaaggagtctagcagtgagcagtacgtgcctgatgtgttttataaggtaaaagtatggtaagaaaaagaactctgtacatggagaagtggtgtgacctgtcttggacctttctaatttgggtgtatcagcggatcctcta

SEQ ID NO: 530615 - DNA, 369 bp, Homo sapiens
gcacgagggcaggtgatgaacggaagtagatataatgcagcttagtgacctagcacctgtaatcctgagagaccagaataactttacatcatagcaggcggggagacgagagattgagtatgaggaccaaggtcgtgggtagcggatcttcttagatgctgtcacctattgatggggggaacagagatcatcttacagcttttctgagagaaagaggcatctgcagatgacatgctgcctctgtaagtactgctgctagctcttcatctgccaagtggtgacaatgcagacgcataccaggaacacgtgtacttgcatgttcagaacttatgatttgtcaacctgtcctgtgcacgaggctatggttcg

SEQ ID NO: 530616 - DNA, 9338 bp, Homo sapiens
  misc_feature (4052)..(4052): n is a, c, g, or t
  misc_feature (4061)..(4061): n is a, c, g, or t
  misc_feature (4065)..(4065): n is a, c, g, or t
  misc_feature (4070)..(4070): n is a, c, g, or t
  misc_feature (4080)..(4080): n is a, c, g, or t
  misc_feature (4095)..(4095): n is a, c, g, or t
  misc_feature (4129)..(4129): n is a, c, g, or t
  misc_feature (4159)..(4159): n is a, c, g, or t
  misc_feature (4168)..(4168): n is a, c, g, or t
  misc_feature (4172)..(4172): n is a, c, g, or t
  misc_feature (4175)..(4175): n is a, c, g, or t
  misc_feature (4185)..(4185): n is a, c, g, or t
  misc_feature (4194)..(4194): n is a, c, g, or t
  misc_feature (4374)..(4374): n is a, c, g, or t
  misc_feature (4379)..(4379): n is a, c, g, or t
  misc_feature (4454)..(4454): n is a, c, g, or t
  misc_feature (4458)..(4458): n is a, c, g, or t
  misc_feature (4498)..(4498): n is a, c, g, or t
  misc_feature (4506)..(4506): n is a, c, g, or t
  misc_feature (4514)..(4514): n is a, c, g, or t
  misc_feature (4516)..(4516): n is a, c, g, or t
  misc_feature (4542)..(4542): n is a, c, g, or t
  misc_feature (4552)..(4552): n is a, c, g, or t
  misc_feature (4604)..(4604): n is a, c, g, or t
  misc_feature (4611)..(4611): n is a, c, g, or t
  misc_feature (4623)..(4623): n is a, c, g, or t
  misc_feature (4686)..(4686): n is a, c, g, or t
  misc_feature (4795)..(4795): n is a, c, g, or t
  misc_feature (4838)..(4838): n is a, c, g, or t
  misc_feature (4888)..(4888): n is a, c, g, or t
  misc_feature (4893)..(4893): n is a, c, g, or t
  misc_feature (4900)..(4900): n is a, c, g, or t
  misc_feature (4953)..(4953): n is a, c, g, or t
  misc_feature (5035)..(5036): n is a, c, g, or t
  misc_feature (5061)..(5061): n is a, c, g, or t
  misc_feature (5142)..(5142): n is a, c, g, or t
  misc_feature (5152)..(5152): n is a, c, g, or t
  misc_feature (5177)..(5177): n is a, c, g, or t
  misc_feature (5191)..(5191): n is a, c, g, or t
  misc_feature (5200)..(5200): n is a, c, g, or t
  misc_feature (5207)..(5207): n is a, c, g, or t
  misc_feature (5221)..(5221): n is a, c, g, or t
  misc_feature (5238)..(5238): n is a, c, g, or t
agcggattgtgcgaggcaccgggacgtcggcggctggcggagccgggctgggctgaagctggagcggcggtggcggcggcgtagggaggccggggccggggctgaggccgcggccgggtctgcgaggcccttggggcggcaggcggcggcggcccggggctcgagcccggaggcaggagcagccgccatggccgagagcatcataattcgtgtccagtccccggatggagtgaagcggatcacagcaacaaagagagaaacagcagcaacatttttgaaaaaggttgcaaaggagtttggcttccaaaataatggcttctcggtttacatcaatagaaacaagaccggagagataacagcctcctccaacaaatccctcaacttgctaaaaatcaagcatggcgatttgttgttcctgtttccctcgagccttgctgggccctcatctgaaatggagacgtcagttccaccgggcttcaaagtctttggcgctcccaacgtggtggaggatgagattgatcagtacctcagcaaacaggacgggaagatttacagaagccgagacccacagctatgccgccacggccctttggggaaatgcgtgcactgcgtccctctagagccattcgatgaggactatctaaaccatctcgagcctcccgtgaagcacatgtccttccacgcctacatccggaagctgactggaggggctgacaaggggaagtttgttgccctggagaacatcagctgcaagattaagtcagggtgcgaggggcacctcccgtggccgaatggcatctgtactaagtgccagccgagcgccatcacgctgaacagacagaagtacaggcatgtggacaatatcatgtttgagaatcacaccgtcgctgaccgctttcttgacttctggagaaagacagggaaccagcattttgggtacttatacggacggtacacggagcacaaagacattccccttggcatcagggctgaagtggctgcgatttatgagccacctcagattggtacacagaacagcttggagcttcttgaggatccaaaagctgaagtggtcgatgaaattgctgccaaacttggcctgcggaaggttggctggatatttacagacctcgtctcagaagatacccgaaagggtaccgtccgctacagtcgaaataaggacacctatttcctaagttcagaagagtgcatcactgcaggagacttccagaacaagcatcccaacatgtgccggctctctccagacggacattttggatccaagtttgttactgcagtggctacaggtggtcctgacaaccaagtccactttgaagggtaccaggtgtccaatcagtgtatggcactggtccgtgatgagtgtttgctgccatgcaaggacgccccggagcttggctacgccaaggagtctagcagtgagcagtacgtgcctgatgtgttttataaggacgtagacaagtttggcaacgagatcacccagctggcccggcccctgcctgtggagtatctcatcatagacatcacaacaactttccccaaggatccagtttacactttttctatttcgcaaaatccatttcctattgaaaaccgggatgtattgggtgagacacaggacttccatagcttggccacctatttgtctcagaatacctcatctgtgttcttggataccatctcagatttccacctcttgctgttcctggtcaccaatgaagttatgcctctgcaggacagcatcagcttgctgctggaggccgtgcggaccagaaatgaggagctcgcccagacatggaagaggtctgagcagtgggccaccatcgagcagctgtgcagtgagtacccccaccccctgccccggcaccccgtggctggggccggagagcagcccactctgcacagctccccactgccggtggtgccctggattccgcacccagctgcatcctggcaggtgccatcggcaatgcaacgagtagagactcggcctccctgccaggcacgtggcaggctccggtgatggagcagacatgttgtccaggccgtacgtcttaggtacacagccctgtaaattttataaacctgtacatcagagatactaatctccaggcatcctaggagcactttgaacatcattgtcttaagagaatcagaaactttatggaagcgccggaagcgtgggaccttttggtctccttgagaatttccctttagtgcttaaagctgtaaggaggagaagcctgcagcatccatgttgttgctggtggacactacggaacggaccgcaggcattgcgtgtcttccggaccctcagtcaccaggtcctgaacgattccccactcgtgagaaccttctgtcagcattgctgcagggactcctcacgcaccgtggtgcctcgtgcagcccgagtgccctgagtccctgcagctgagagcaccagagtgcccgggagctacggccctggacaaatgctagaatccttctgttaacacagccttcaaaagacacatcaaacacctttataccatttcctgttttttttttttttttttgagacggagtttggctcttgtcacccaggctggagtgtggtggcgtgatcttgcctcactgcaacctccacctcctgggttcaaacgattctcctgcctcagcctcctgagtagctgggactacaggcatgtgccaccatgcctggataatttttgtattcttagtagagccagggtttcaccatgttagccaggctggtctcgaactcctgaccttgtgatctgcttgcctctgcctcccagagtgttgggattacaggtgtgagccaccacgcccagccgaggttttcttttcacacaattctttgttttttatttttatttttgtagagacagggtctcactctattgccgaggctggagtgcagttgcacaatcgtaactcactgcagcctcaaactccaggctcaagtgatctttctgcttcagcctgctgagtaactgggaccacaggcttgcaacaccacacccagctaattcttggggctttgttgttgctttttatttgtttgttttttaaaaataattttaacttattttagattcacagggtacatgtgcaggtttgtcacctgggtatattgcctgatgctgaggttggggtatgattgatcacatcacccaggtactacacatagtacctaatagtttttcagcccgccctgctctttgtgtgtgtgtgtgtgtgtgtgtgtgtgtgtgtgtgtgtgtgtgttttgagctggagcctcaccctgtctcccaggctggagtgcagtggcgcaatcttagctcactgcaaactctgcctcctgggttgaagcgattcccctccctcggcctcccgagtagctgggattacagatgtgtaccaccacacctggcgttgccatctttatgtacgtgagtacccatgtttagctcccacttataaatgaaaacatgtagtatttggtttgctgttcctgcattagtttgcttagaataatggccttcaactgcatccatgttgctgcaaaggacatgatttcattcctttttatggctgcaaaattttttaatatttttgtatcaatgaggtctcactgtgttgcccagactggtctcaaactttggcctcaagcattccttgcacctcagcctcacaaagtcctgagattatacctgggagccactgcacccagccctttgatgcagttctcaatgacaccagtctttttttttttttttcttttttgtttcccttttagagacagggtttcgctctgttgcctaggctggagtgcagtggagtgatcatagctcactacagccttcaattcctgagctcaagcgatcctcctgcatcagctttcggagtacctaggagtataaacatgagccactacacccaactaatgtttttggttggtgttttttttttttctttaagagatagggttggccgggcccggtggctggctcacacctgtaatcccagcactttgggaggctgaggcnggtggatcncaangtcangggattgagnccatcctggccaacntggtgaaaccccatttctgttaaaactacaaaanttagctgggcatggtggcgagcgcctgtgntcccagctnctcnggnggctgaggcnggagaatcncttgacccaggaagcgtaggttgtagtgagctgagatcgtgccactgtactccagcctgggcgacagagcgagactctgtctcaaaaaaaaaaaaaagatgtggtcttgccatgttgcccaggctggtctcaaactcctaggctcaagtgatcttcctgccttggttcccaaagtgctgngattncagctgtgagccactgcacctgaccttttttttttcccccctcctttttttttgagacaggttctcgctctgtcncccnggctgaagtgcagtggcatttgaggtcagtctcaccttgncctccccnggctcaancnatcctcccgcctcagcctcctgagcngctgggactncaggcatgtgccaccatccctggctgattttttaaatttgttgtagagatgnggtctcnctatgttgcccnggctggtcttgaactcttgggcccaagcgatcctcccgcctcagtgctgagattgcagtggtnagccaccatgtccagccaactctttaataataggcagttctgactggtgtaagttctgactggtatctcactgtggttttaatttgcatctctgatgattagtgatgtngggcattttttcatgggttttttgtttgtttgttttgagacanagtcttgttctgttgcccaggctggagtgcagtagtgtgatctcggctcnctgcngcctccncctcccgggttcaagccattgtccagcctctgcctcctaagtagctggaattncaggtggctgccaccacacccagctaatttttttagttttggtggagacagggtttctccatgttggccaggctggtctcgnnctcctgacctcaagtgatccacccncctcggcttcccaaagtgctgggattataggtgtgagccaccgcgcccggccctcatgggttgttttgttttgttttgagncggaatctcnccctgtcacccaggctgcagtgcantctcatgatctccncttactgcnacctccncgtcctgggttcangtgatgctcctgcctcngcctcccgagtggctgggactgcaggcgtgcacccacgcctggctaatttttatatttttggtggagatggggtttcaccatgttggtcaggctggtctggaactcctgacctcaggtgatccacctgcctcggtctcccaaagtgctgggattacagacgtgtatacacaagacacaaagatcagctcaggatgggtcataggcctaatggtaaaaggtaaaactatgaagcaggctgggcatgatgtctcatagctataatcctaacactctaggaggccaaagctggaggacactgtagcccagaagtgtgagaccagcccacacagcatagtgaagccccgtctgtacaaaaaaacaatattaaaaaaaaaagaattagctgggcatggtgagtggtccacgcctataatcccagcttctggggaggctgaaatgggaggatcccatgagtcaggagctcgaggtcacagtgagccatgattataccactccagcctgaatgacagagcaataccctgtcttaaaaaaataaaaactgtaaaacagttattaagttgaatctcttcagggccttggggtacgcaaagattcttttaggcaggatgcaggaccttggggtagaacacagaaaaacactggcataaaaataggtaaattgataaataaatttatctaaacaaaacacttgtgctcatcacagggcactgttagaaacatgaaaaggcaccaatgggggacgcagtattagcagtacatacacacaacatgacttctatctgaaacttaaaaataactctgcctgttgttaatcaaacagaaagcagaagaagaagctgggcggagggtgaaacgtttcacaaaaggaaatgcaggtcgggcatggtggctcgcgcctgtaatcccagcactttgggaggccgaggcggtggatcatttgaggtcaggagttcgagacagccaggccagcatggtgaaaacccatctctactaaaaataaaagaaattagccaggtgtggtggcacgtgcctgtggtcctagctgcttgggaggctgaggtaggagaatcgcttgaacccgggaggcagaggttgcagcgagccgagattgcgccactgcactccagcctcggcaacaacaaaaaaaaggagatgcaggaacagtcactatcattagtcatcagggaaatgcaaattaaaacatgagaagccgttacacattcatcagtgtggctcaaatgaaaaaaacgcgacaatgtcaagtgtgagtgaagatgtgaagcagctgggactctcgtaccttgcgagtgggaggcaaaaccgtgccaccctcgcgagaactgtgtctcagggtctcagaaagttcagcacacaattcattaccctgtgggccggcagattcattcctaggtaggttttttgttgttgttgtttgtttgtttgtttgttttgagatctcggcttactgcaacctcggttcactgcaacctccgcctcccgggttcacgcctttctccttcctcagccttcctagtggctgggattacaggtgcgcaccaccacccccaggcacagttggcgggcagctcccaggtctccatgagtacggcgccgtcgggggctccacacacacggccactgcagccatgtgggcctgtcagcactgcacgttcatgaaccagccaggcacaggccactgcgagatgtgcagcctccccaggacctagggcgcctgccctctgctggctaggaccgggcccagcccagcccttcctgaagccagaagcgttgctgagtgtgttccctgtaactgccccatagtgggcagccctggaggaacaaggggctggctgtcctgggctccctgacccactgaagcttctcagcacgttcctccctggagagcgggcgccacggctggtattctgcaggctgaatgcagtctccagactggaaacgcagagcggctcctcacgcctaatcctgttgacaagtcccccgccgtgttggaaagacctctcgcctctacgtggcacctggaattggggcgcacagggaggggcggatgctgccaccacccagccttctctttattttcagtgctttttgtttggcctccctgcccccatgtttttctggctgggagctcctggttacccccttgtctgactgcttggtggcaggcaccctgcctgtgagggccactttcctcttctagtagctgttgtctggtggggacgcagtggccctggacacggctcccctctgcaggtctgcaggtcggtttgctgcctgccctcctcctctcacccgatgtccaggtgggattttaaagtctgcattggttataataacagttatcagtaattcctgcccagaagacttttatttatttttttttaagataaaaactgcacaaaaggggagtgagagagactagtttccacatccttccctcctttagtgaagcccccgaggttgtgtccagggtgatgagtgtggacgggggcaccagtcagttctcccttgaagtaaacctcagtgcctgagacttttctaccaagccacacagctgcagcaactgcagatactgcgggctgagcaggagcagtggtggcgcctgccctgaggctgccctgcgatggcctgggtgggagagctgggtcaccggtgccgatgctctggccctccccaatacgctgcttcgtcccactgcaccgcctggctgagggcgttaggggctgtgcctcttgtgagggccatttgggacctccctggggcactgcacaattgatagtgtaccaatagagggagactgggcgatctggaacagcacgtggtggggtcctgcttgtgtgctctgcgttcctctgtggcgtggccaggccggggcctggctcttacccggggagtggtgggcatctcgatgcttctttgccttaatgatggccacatctgggctgctctgcacccacgggagaggctggcccagctgcagactgcttagggacttctgtgtccatcctggggggtaagcccacgtgacccacattcttggcactatgaacagagaacatttgcctgttggcttctgaagtggtcagggccatggctgacacctccaggtccgcctggcatgggacaccaagtggaaggcccaagcagctcatctgctcttgggaccaggggccagttgggttgggtctggtcacggcagagctattgtggagggtcaggaagggtggagaggagctgggttgaagcggactgctgcggatgcaactcccagcttgcccaccgcgggctgtctgctctccctcctagcagctgtcacactgaagttttgtcctctgctgtctcctctggtcctgagatgagctgtgagcctaggtggccaaggcttcctgcattgcttccctgtgagtccaaggccttcccccaccactgggcagaggctggacagcacggacttctagagagagccgcgttgccagttcctctcccactcgctcgtccttatccaccacgctattatagtttccgttgtcctccaccagcatttcccttactctgaagttccggcattcacatcattcatgttttcttttgtcttttagctaaaggaaaagcattggcgatttgtctgattctggttttgagttactctttgttcagtaatgcactttattttattgtccaaagagagtcagagctaagcatacaggcttgggggtgagccctgctgtgagagttcaggccctgggaggctcagccacctcctcttgtgggaaggaggtctcagccccacctcgcatcttcacctgcccttggtgtggacacaccctctcatgctaccagcaccataatccagtgggggtgactgggtgcacacctgcccaggtgaacacagcggctgccagtctcctggtcccgagaggaggtggggcctggccctggctccctccaaccagctgctcctgggacacaggtgctcctgcttcggctctgtttcggctcacaggtgtgcatcactgggcttggatttgcattacattgaccccagccctgcagtggaacctaataaaagcgcctgaagcaa

SEQ ID NO: 530617 - DNA, 134 bp, Homo sapiens
cacgacaagtacagaaacaagcccttgccacaacttccggcactgcttcggcgtggcccagatgatgtacagcatggtctggctctgcagtgctccaggtaaaagttctcacaaagcggggtaccgagacacga

SEQ ID NO: 530618 - DNA, 156 bp, Homo sapiens
ccaacttgtactgatgaatggagaaaaagtcagtgaatcatatgttatcacactagagagattagaagatgacctgcagatcaagggagaaagagctgatcagagctatggatatatttggctctgattgaggccttcagtgaagtcaatttaaat

SEQ ID NO: 530619 - DNA, 4456 bp, Homo sapiens
agcggattgtgcgaggcaccgggacgtcggcggctggcggagccgggctgggctgaagctggagcggcggtggcggcggcgtagggaggccggggccggggctgaggccgcggccgggtctgcgaggcccttggggcggcaggcggcggcggcccggggctcgagcccggaggcaggagcagccgccatggccgagagcatcataattcgtgtccagtccccggatggagtgaagcggatcacagcaacaaagagagaaacagcagcaacatttttgaaaaaggttggagtgcactggcaaagtcacagctcactgcaggccttgacttcccgggctcaaacgatcctcccacgttgcaaaggagtttggcttccaaaataatggcttctcggtttacatcaatagaaacaagaccggagagataacagcctcctccaacaaatccctcaacttgctaaaaatcaagcatggcgatttgttgttcctgtttccctcgagccttgctgggccctcatctgaaatggagacgtcagttccaccgggcttcaaagtctttggcgctcccaacgtggtggaggatgagattgatcagtacctcagcaaacaggacgggaagatttacagaagccgagacccacagctatgccgccacggccctttggggaaatgcgtgcactgcgtccctctagagccattcgatgaggactatctaaaccatctcgagcctcccgtgaagcacatgtccttccacgcctacatccggaagctgactggaggggctgacaaggggaagtttgttgccctggagaacatcagctgcaagattaagtcagggtgcgaggggcacctcccgtggccgaatggcatctgtactaagtgccagccgagcgccatcacgctgaacagacagaagtacaggcatgtggacaatatcatgtttgagaatcacaccgtcgctgaccgctttcttgacttctggagaaagacagggaaccagcattttgggtacttatacggacggtacacggagcacaaagacattccccttggcatcagggctgaagtggctgcgatttatgagccacctcagattggtacacagaacagcttggagcttcttgaggatccaaaagctgaagtggtcgatgaaattgctgccaaacttggcctgcggaaggttggctggatatttacagacctcgtctcagaagatacccgaaagggtaccgtccgctacagtcgaaataaggacacctatttcctaagttcagaagagtgcatcactgcaggagacttccagaacaagcatcccaacatgtgccggctctctccagacggacattttggatccaagtttgttactgcagtggctacaggtggtcctgacaaccaagtccactttgaagggtaccaggtgtccaatcagtgtatggcactggtccgtgatgagtgtttgctgccatgcaaggacgccccggagcttggctacgccaaggagtctagcagtgagcagtacgtgcctgatgtgttttataaggacgtagacaagtttggcaacgagatcacccagctggcccggcccctgcctgtggagtatctcatcatagacatcacaacaactttccccaaggatccagtttacactttttctatttcgcaaaatccatttcctattgaaaaccgggatgtattgggtgagacacaggacttccatagcttggccacctatttgtctcagaatacctcatctgtgttcttggataccatctcagatttccacctcttgctgttcctggtcaccaatgaagttatgcctctgcaggacagcatcagcttgctgctggaggccgtgcggaccagaaatgaggagctcgcccagacatggaagaggtctgagcagtgggccaccatcgagcagctgtgcagcacagttggcgggcagctcccaggtctccatgagtacggcgccgtcgggggctccacacacacggccactgcagccatgtgggcctgtcagcactgcacgttcatgaaccagccaggcacaggccactgcgagatgtgcagcctccccaggacctagggcgcctgccctctgctggctaggaccgggcccagcccagcccttcctgaagccagaagcgttgctgagtgtgttccctgtaactgccccatagtgggcagccctggaggaacaaggggctggctgtcctgggctccctgacccactgaagcttctcagcacgttcctccctggagagcgggcgccacggctggtattctgcaggctgaatgcagtctccagactggaaacgcagagcggctcctcacgcctaatcctgttgacaagtcccccgccgtgttggaaagacctctcgcctctacgtggcacctggaattggggcgcacagggaggggcggatgctgccaccacccagccttctctttattttcagtgctttttgtttggcctccctgcccccatgtttttctggctgggagctcctggttacccccttgtctgactgcttggtggcaggcaccctgcctgtgagggccactttcctcttctagtagctgttgtctggtggggacgcagtggccctggacacggctcccctctgcaggtctgcaggtcggtttgctgcctgccctcctcctctcacccgatgtccaggtgggattttaaagtctgcattggttataataacagttatcagtaattcctgcccagaagacttttatttatttttttttaagataaaaactgcacaaaaggggagtgagagagactagtttccacatccttccctcctttagtgaagcccccgaggttgtgtccagggtgatgagtgtggacgggggcaccagtcagttctcccttgaagtaaacctcagtgcctgagacttttctaccaagccacacagctgcagcaactgcagatactgcgggctgagcaggagcagtggtggcgcctgccctgaggctgccctgcgatggcctgggtgggagagctgggtcaccggtgccgatgctctggccctccccaatacgctgcttcgtcccactgcaccgcctggctgagggcgttaggggctgtgcctcttgtgagggccatttgggacctccctggggcactgcacaattgatagtgtaccaatagagggagactgggcgatctggaacagcacgtggtggggtcctgcttgtgtgctctgcgttcctctgtggcgtggccaggccggggcctggctcttacccggggagtggtgggcatctcgatgcttctttgccttaatgatggccacatctgggctgctctgcacccacgggagaggctggcccagctgcagactgcttagggacttctgtgtccatcctggggggtaagcccacgtgacccacattcttggcactatgaacagagaacatttgcctgttggcttctgaagtggtcagggccatggctgacacctccaggtccgcctggcatgggacaccaagtggaaggcccaagcagctcatctgctcttgggaccaggggccagttgggttgggtctggtcacggcagagctattgtggagggtcaggaagggtggagaggagctgggttgaagcggactgctgcggatgcaactcccagcttgcccaccgcgggctgtctgctctccctcctagcagctgtcacactgaagttttgtcctctgctgtctcctctggtcctgagatgagctgtgagcctaggtggccaaggcttcctgcattgcttccctgtgagtccaaggccttcccccaccactgggcagaggctggacagcacggacttctagagagagccgcgttgccagttcctctcccactcgctcgtccttatccaccacgctattatagtttccgttgtcctccaccagcatttcccttactctgaagttccggcattcacatcattcatgttttcttttgtcttttagctaaaggaaaagcattggcgatttgtctgattctggttttgagttactctttgttcagtaatgcactttattttattgtccaaagagagtcagagctaagcatacaggcttgggggtgagccctgctgtgagagttcaggccctgggaggctcagccacctcctcttgtgggaaggaggtctcagccccacctcgcatcttcacctgcccttggtgtggacacaccctctcatgctaccagcaccataatccagtgggggtgactgggtgcacacctgcccaggtgaacacagcggctgccagtctcctggtcccgagaggaggtggggcctggccctggctccctccaaccagctgctcctgggacacaggtgctcctgcttcggctctgtttcggctcacaggtgtgcatcactgggcttggatttgcattacattgaccccagccctgcagtggaacctaataaaagcgcctgaagcaa

SEQ ID NO: 530620 - DNA, 9262 bp, Homo sapiens
  misc_feature (4052)..(4052): n is a, c, g, or t
  misc_feature (4061)..(4061): n is a, c, g, or t
  misc_feature (4065)..(4065): n is a, c, g, or t
  misc_feature (4070)..(4070): n is a, c, g, or t
  misc_feature (4080)..(4080): n is a, c, g, or t
  misc_feature (4095)..(4095): n is a, c, g, or t
  misc_feature (4129)..(4129): n is a, c, g, or t
  misc_feature (4159)..(4159): n is a, c, g, or t
  misc_feature (4168)..(4168): n is a, c, g, or t
  misc_feature (4172)..(4172): n is a, c, g, or t
  misc_feature (4175)..(4175): n is a, c, g, or t
  misc_feature (4185)..(4185): n is a, c, g, or t
  misc_feature (4194)..(4194): n is a, c, g, or t
  misc_feature (4374)..(4374): n is a, c, g, or t
  misc_feature (4379)..(4379): n is a, c, g, or t
  misc_feature (4454)..(4454): n is a, c, g, or t
  misc_feature (4458)..(4458): n is a, c, g, or t
  misc_feature (4498)..(4498): n is a, c, g, or t
  misc_feature (4506)..(4506): n is a, c, g, or t
  misc_feature (4514)..(4514): n is a, c, g, or t
  misc_feature (4516)..(4516): n is a, c, g, or t
  misc_feature (4542)..(4542): n is a, c, g, or t
  misc_feature (4552)..(4552): n is a, c, g, or t
  misc_feature (4604)..(4604): n is a, c, g, or t
  misc_feature (4611)..(4611): n is a, c, g, or t
  misc_feature (4623)..(4623): n is a, c, g, or t
  misc_feature (4686)..(4686): n is a, c, g, or t
  misc_feature (4795)..(4795): n is a, c, g, or t
  misc_feature (4838)..(4838): n is a, c, g, or t
  misc_feature (4888)..(4888): n is a, c, g, or t
  misc_feature (4893)..(4893): n is a, c, g, or t
  misc_feature (4900)..(4900): n is a, c, g, or t
  misc_feature (4953)..(4953): n is a, c, g, or t
  misc_feature (5035)..(5036): n is a, c, g, or t
  misc_feature (5061)..(5061): n is a, c, g, or t
  misc_feature (5142)..(5142): n is a, c, g, or t
  misc_feature (5152)..(5152): n is a, c, g, or t
  misc_feature (5177)..(5177): n is a, c, g, or t
  misc_feature (5191)..(5191): n is a, c, g, or t
  misc_feature (5200)..(5200): n is a, c, g, or t
  misc_feature (5207)..(5207): n is a, c, g, or t
  misc_feature (5221)..(5221): n is a, c, g, or t
  misc_feature (5238)..(5238): n is a, c, g, or t
  misc_feature (6384)..(6384): n is a, c, g, or t
  misc_feature (6387)..(6387): n is a, c, g, or t
  misc_feature (6419)..(6419): n is a, c, g, or t
  misc_feature (6430)..(6431): n is a, c, g, or t
  misc_feature (6437)..(6437): n is a, c, g, or t
  misc_feature (6447)..(6447): n is a, c, g, or t
  misc_feature (6453)..(6454): n is a, c, g, or t
  misc_feature (6457)..(6459): n is a, c, g, or t
  misc_feature (6474)..(6474): n is a, c, g, or t
agcggattgtgcgaggcaccgggacgtcggcggctggcggagccgggctgggctgaagctggagcggcggtggcggcggcgtagggaggccggggccggggctgaggccgcggccgggtctgcgaggcccttggggcggcaggcggcggcggcccggggctcgagcccggaggcaggagcagccgccatggccgagagcatcataattcgtgtccagtccccggatggagtgaagcggatcacagcaacaaagagagaaacagcagcaacatttttgaaaaaggttgcaaaggagtttggcttccaaaataatggcttctcggtttacatcaatagaaacaagaccggagagataacagcctcctccaacaaatccctcaacttgctaaaaatcaagcatggcgatttgttgttcctgtttccctcgagccttgctgggccctcatctgaaatggagacgtcagttccaccgggcttcaaagtctttggcgctcccaacgtggtggaggatgagattgatcagtacctcagcaaacaggacgggaagatttacagaagccgagacccacagctatgccgccacggccctttggggaaatgcgtgcactgcgtccctctagagccattcgatgaggactatctaaaccatctcgagcctcccgtgaagcacatgtccttccacgcctacatccggaagctgactggaggggctgacaaggggaagtttgttgccctggagaacatcagctgcaagattaagtcagggtgcgaggggcacctcccgtggccgaatggcatctgtactaagtgccagccgagcgccatcacgctgaacagacagaagtacaggcatgtggacaatatcatgtttgagaatcacaccgtcgctgaccgctttcttgacttctggagaaagacagggaaccagcattttgggtacttatacggacggtacacggagcacaaagacattccccttggcatcagggctgaagtggctgcgatttatgagccacctcagattggtacacagaacagcttggagcttcttgaggatccaaaagctgaagtggtcgatgaaattgctgccaaacttggcctgcggaaggttggctggatatttacagacctcgtctcagaagatacccgaaagggtaccgtccgctacagtcgaaataaggacacctatttcctaagttcagaagagtgcatcactgcaggagacttccagaacaagcatcccaacatgtgccggctctctccagacggacattttggatccaagtttgttactgcagtggctacaggtggtcctgacaaccaagtccactttgaagggtaccaggtgtccaatcagtgtatggcactggtccgtgatgagtgtttgctgccatgcaaggacgccccggagcttggctacgccaaggagtctagcagtgagcagtacgtgcctgatgtgttttataaggacgtagacaagtttggcaacgagatcacccagctggcccggcccctgcctgtggagtatctcatcatagacatcacaacaactttccccaaggatccagtttacactttttctatttcgcaaaatccatttcctattgaaaaccgggatgtattgggtgagacacaggacttccatagcttggccacctatttgtctcagaatacctcatctgtgttcttggataccatctcagatttccacctcttgctgttcctggtcaccaatgaagttatgcctctgcaggacagcatcagcttgctgctggaggccgtgcggaccagaaatgaggagctcgcccagacatggaagaggtctgagcagtgggccaccatcgagcagctgtgcagtgagtacccccaccccctgccccggcaccccgtggctggggccggagagcagcccactctgcacagctccccactgccggtggtgccctggattccgcacccagctgcatcctggcaggtgccatcggcaatgcaacgagtagagactcggcctccctgccaggcacgtggcaggctccggtgatggagcagacatgttgtccaggccgtacgtcttaggtacacagccctgtaaattttataaacctgtacatcagagatactaatctccaggcatcctaggagcactttgaacatcattgtcttaagagaatcagaaactttatggaagcgccggaagcgtgggaccttttggtctccttgagaatttccctttagtgcttaaagctgtaaggaggagaagcctgcagcatccatgttgttgctggtggacactacggaacggaccgcaggcattgcgtgtcttccggaccctcagtcaccaggtcctgaacgattccccactcgtgagaaccttctgtcagcattgctgcagggactcctcacgcaccgtggtgcctcgtgcagcccgagtgccctgagtccctgcagctgagagcaccagagtgcccgggagctacggccctggacaaatgctagaatccttctgttaacacagccttcaaaagacacatcaaacacctttataccatttcctgttttttttttttttttttgagacggagtttggctcttgtcacccaggctggagtgtggtggcgtgatcttgcctcactgcaacctccacctcctgggttcaaacgattctcctgcctcagcctcctgagtagctgggactacaggcatgtgccaccatgcctggataatttttgtattcttagtagagccagggtttcaccatgttagccaggctggtctcgaactcctgaccttgtgatctgcttgcctctgcctcccagagtgttgggattacaggtgtgagccaccacgcccagccgaggttttcttttcacacaattctttgttttttatttttatttttgtagagacagggtctcactctattgccgaggctggagtgcagttgcacaatcgtaactcactgcagcctcaaactccaggctcaagtgatctttctgcttcagcctgctgagtaactgggaccacaggcttgcaacaccacacccagctaattcttggggctttgttgttgctttttatttgtttgttttttaaaaataattttaacttattttagattcacagggtacatgtgcaggtttgtcacctgggtatattgcctgatgctgaggttggggtatgattgatcacatcacccaggtactacacatagtacctaatagtttttcagcccgccctgctctttgtgtgtgtgtgtgtgtgtgtgtgtgtgtgtgtgtgtgtgtgtgttttgagctggagcctcaccctgtctcccaggctggagtgcagtggcgcaatcttagctcactgcaaactctgcctcctgggttgaagcgattcccctccctcggcctcccgagtagctgggattacagatgtgtaccaccacacctggcgttgccatctttatgtacgtgagtacccatgtttagctcccacttataaatgaaaacatgtagtatttggtttgctgttcctgcattagtttgcttagaataatggccttcaactgcatccatgttgctgcaaaggacatgatttcattcctttttatggctgcaaaattttttaatatttttgtatcaatgaggtctcactgtgttgcccagactggtctcaaactttggcctcaagcattccttgcacctcagcctcacaaagtcctgagattatacctgggagccactgcacccagccctttgatgcagttctcaatgacaccagtctttttttttttttttcttttttgtttcccttttagagacagggtttcgctctgttgcctaggctggagtgcagtggagtgatcatagctcactacagccttcaattcctgagctcaagcgatcctcctgcatcagctttcggagtacctaggagtataaacatgagccactacacccaactaatgtttttggttggtgttttttttttttctttaagagatagggttggccgggcccggtggctggctcacacctgtaatcccagcactttgggaggctgaggcnggtggatcncaangtcangggattgagnccatcctggccaacntggtgaaaccccatttctgttaaaactacaaaanttagctgggcatggtggcgagcgcctgtgntcccagctnctcnggnggctgaggcnggagaatcncttgacccaggaagcgtaggttgtagtgagctgagatcgtgccactgtactccagcctgggcgacagagcgagactctgtctcaaaaaaaaaaaaaagatgtggtcttgccatgttgcccaggctggtctcaaactcctaggctcaagtgatcttcctgccttggttcccaaagtgctgngattncagctgtgagccactgcacctgaccttttttttttcccccctcctttttttttgagacaggttctcgctctgtcncccnggctgaagtgcagtggcatttgaggtcagtctcaccttgncctccccnggctcaancnatcctcccgcctcagcctcctgagcngctgggactncaggcatgtgccaccatccctggctgattttttaaatttgttgtagagatgnggtctcnctatgttgcccnggctggtcttgaactcttgggcccaagcgatcctcccgcctcagtgctgagattgcagtggtnagccaccatgtccagccaactctttaataataggcagttctgactggtgtaagttctgactggtatctcactgtggttttaatttgcatctctgatgattagtgatgtngggcattttttcatgggttttttgtttgtttgttttgagacanagtcttgttctgttgcccaggctggagtgcagtagtgtgatctcggctcnctgcngcctccncctcccgggttcaagccattgtccagcctctgcctcctaagtagctggaattncaggtggctgccaccacacccagctaatttttttagttttggtggagacagggtttctccatgttggccaggctggtctcgnnctcctgacctcaagtgatccacccncctcggcttcccaaagtgctgggattataggtgtgagccaccgcgcccggccctcatgggttgttttgttttgttttgagncggaatctcnccctgtcacccaggctgcagtgcantctcatgatctccncttactgcnacctccncgtcctgggttcangtgatgctcctgcctcngcctcccgagtggctgggactgcaggcgtgcacccacgcctggctaatttttatatttttggtggagatggggtttcaccatgttggtcaggctggtctggaactcctgacctcaggtgatccacctgcctcggtctcccaaagtgctgggattacagacgtgtatacacaagacacaaagatcagctcaggatgggtcataggcctaatggtaaaaggtaaaactatgaagcaggctgggcatgatgtctcatagctataatcctaacactctaggaggccaaagctggaggacactgtagcccagaagtgtgagaccagcccacacagcatagtgaagccccgtctgtacaaaaaaacaatattaaaaaaaaaagaattagctgggcatggtgagtggtccacgcctataatcccagcttctggggaggctgaaatgggaggatcccatgagtcaggagctcgaggtcacagtgagccatgattataccactccagcctgaatgacagagcaataccctgtcttaaaaaaataaaaactgtaaaacagttattaagttgaatctcttcagggccttggggtacgcaaagattcttttaggcaggatgcaggaccttggggtagaacacagaaaaacactggcataaaaataggtaaattgataaataaatttatctaaacaaaacacttgtgctcatcacagggcactgttagaaacatgaaaaggcaccaatgggggacgcagtattagcagtacatacacacaacatgacttctatctgaaacttaaaaataactctgcctgttgttaatcaaacagaaagcagaagaagaagctgggcggagggtgaaacgtttcacaaaaggaaatgcaggtcgggcatggtggctcgcgcctgtaatcccagcactttgggaggccgaggcggtggatcatttgaggtcaggagttcgagacagccaggccagcatggtgaaaacccatctctactaaaaataaaagaaattagccaggtgtggtggcacgtgcctgtggtcctagctgcttgggaggctgaggtaggagaatcgcttgaacccgggaggcagaggttgcagcgagccgagattgcgccactgcactccagcctgggtgacagagcaanacnctacctcagaaaaaaaaaaaaaaaaaaaaaanaaaaaaaaaanntaaatnaaaaatcccntggggnnttnnntttattttataaggngaaggaccctctgcaacaaaaaggaaccagcaagcacaggctccctgttactccctgtggtgcaggaggcatttttctgagggcattaagcacttcaaagtgtgcctgtggtgggagtgctgtgtgggcaggaccagcactgggtgggatgttgggggcggggagctctcagctgcctgcccctgcccccatgcccacactctggcagtctctggtgggccagaaatgatgagtgctcatttctcttccaccctgcaggcacagttggcgggcagctcccaggtctccatgagtacggcgccgtcgggggctccacacacacggccactgcagccatgtgggcctgtcagcactgcacgttcatgaaccagccaggcacaggccactgcgagatgtgcagcctccccaggacctagggcgcctgccctctgctggctaggaccgggcccagcccagcccttcctgaagccagaagcgttgctgagtgtgttccctgtaactgccccatagtgggcagccctggaggaacaaggggctggctgtcctgggctccctgacccactgaagcttctcagcacgttcctccctggagagcgggcgccacggctggtattctgcaggctgaatgcagtctccagactggaaacgcagagcggctcctcacgcctaatcctgttgacaagtcccccgccgtgttggaaagacctctcgcctctacgtggcacctggaattggggcgcacagggaggggcggatgctgccaccacccagccttctctttattttcagtgctttttgtttggcctccctgcccccatgtttttctggctgggagctcctggttacccccttgtctgactgcttggtggcaggcaccctgcctgtgagggccactttcctcttctagtagctgttgtctggtggggacgcagtggccctggacacggctcccctctgcaggtctgcaggtcggtttgctgcctgccctcctcctctcacccgatgtccaggtgggattttaaagtctgcattggttataataacagttatcagtaattcctgcccagaagacttttatttatttttttttaagataaaaactgcacaaaaggggagtgagagagactagtttccacatccttccctcctttagtgaagcccccgaggttgtgtccagggtgatgagtgtggacgggggcaccagtcagttctcccttgaagtaaacctcagtgcctgagacttttctaccaagccacacagctgcagcaactgcagatactgcgggctgagcaggagcagtggtggcgcctgccctgaggctgccctgcgatggcctgggtgggagagctgggtcaccggtgccgatgctctggccctccccaatacgctgcttcgtcccactgcaccgcctggctgagggcgttaggggctgtgcctcttgtgagggccatttgggacctccctggggcactgcacaattgatagtgtaccaatagagggagactgggcgatctggaacagcacgtggtggggtcctgcttgtgtgctctgcgttcctctgtggcgtggccaggccggggcctggctcttacccggggagtggtgggcatctcgatgcttctttgccttaatgatggccacatctgggctgctctgcacccacgggagaggctggcccagctgcagactgcttagggacttctgtgtccatcctggggggtaagcccacgtgacccacattcttggcactatgaacagagaacatttgcctgttggcttctgaagtggtcagggccatggctgacacctccaggtccgcctggcatgggacaccaagtggaaggcccaagcagctcatctgctcttgggaccaggggccagttgggttgggtctggtcacggcagagctattgtggagggtcaggaagggtggagaggagctgggttgaagcggactgctgcggatgcaactcccagcttgcccaccgcgggctgtctgctctccctcctagcagctgtcacactgaagttttgtcctctgctgtctcctctggtcctgagatgagctgtgagcctaggtggccaaggcttcctgcattgcttccctgtgagtccaaggccttcccccaccactgggcagaggctggacagcacggacttctagagagagccgcgttgccagttcctctcccactcgctcgtccttatccaccacgctattatagtttccgttgtcctccaccagcatttcccttactctgaagttccggcattcacatcattcatgttttcttttgtcttttagctaaaggaaaagcattggcgatttgtctgattctggttttgagttactctttgttcagtaatgcactttattttattgtccaaagagagtcagagctaagcatacaggcttgggggtgagccctgctgtgagagttcaggccctgggaggctcagccacctcctcttgtgggaaggaggtctcagccccacctcgcatcttcacctgcccttggtgtggacacaccctctcatgctaccagcaccataatccagtgggggtgactgggtgcacacctgcccaggtgaacacagcggctgccagtctcctggtcccgagaggaggtggggcctggccctggctccctccaaccagctgctcctgggacacaggtgctcctgcttcggctctgtttcggctcacaggtgtgcatcactgggcttggatttgcattacattgaccccagccctgcagtggaacctaataaaagcgcctgaagcaa

SEQ ID NO: 530621 - DNA, 170 bp, Homo sapiens
tacttttccacaggtgggcagtttcaggtcagctgagtcacccgagggaggtggcatgtgctaagacactgccgggaagacggattcctgatggcagaagggtgtattaaggatttccacccccggtaggcggcccgtcctttgctgagcctctgaaaatgacccgcgcc

SEQ ID NO: 530622 - DNA, 143 bp, Homo sapiens
atgtacatatagtcactcaatgttatggatgaatcttctactattagtgacttttctgctacgcaagcgaaggcttctcaaatcatgaaaattattaatattacttgctgttagcagcaatgaatgatgcctacagactgata

SEQ ID NO: 530623 - DNA, 152 bp, Homo sapiens
tgtcgaggaactgtacaggggggcatgcaccgcagtggtgaatacacgtcgaccaggctccatctataacgatcttgggaggtgagcacggtgctcactgtgatctgaaggaactagtacagggaggcatgcaccggcagtggtgaatacac

SEQ ID NO: 530624 - DNA, 9061 bp, Homo sapiens
  misc_feature (4052)..(4052): n is a, c, g, or t
  misc_feature (4061)..(4061): n is a, c, g, or t
  misc_feature (4065)..(4065): n is a, c, g, or t
  misc_feature (4070)..(4070): n is a, c, g, or t
  misc_feature (4080)..(4080): n is a, c, g, or t
  misc_feature (4095)..(4095): n is a, c, g, or t
  misc_feature (4129)..(4129): n is a, c, g, or t
  misc_feature (4159)..(4159): n is a, c, g, or t
  misc_feature (4168)..(4168): n is a, c, g, or t
  misc_feature (4172)..(4172): n is a, c, g, or t
  misc_feature (4175)..(4175): n is a, c, g, or t
  misc_feature (4185)..(4185): n is a, c, g, or t
  misc_feature (4194)..(4194): n is a, c, g, or t
  misc_feature (4374)..(4374): n is a, c, g, or t
  misc_feature (4379)..(4379): n is a, c, g, or t
  misc_feature (4454)..(4454): n is a, c, g, or t
  misc_feature (4458)..(4458): n is a, c, g, or t
  misc_feature (4498)..(4498): n is a, c, g, or t
  misc_feature (4506)..(4506): n is a, c, g, or t
  misc_feature (4514)..(4514): n is a, c, g, or t
  misc_feature (4516)..(4516): n is a, c, g, or t
  misc_feature (4542)..(4542): n is a, c, g, or t
  misc_feature (4552)..(4552): n is a, c, g, or t
  misc_feature (4604)..(4604): n is a, c, g, or t
  misc_feature (4611)..(4611): n is a, c, g, or t
  misc_feature (4623)..(4623): n is a, c, g, or t
  misc_feature (4686)..(4686): n is a, c, g, or t
  misc_feature (4795)..(4795): n is a, c, g, or t
  misc_feature (4838)..(4838): n is a, c, g, or t
  misc_feature (4888)..(4888): n is a, c, g, or t
  misc_feature (4893)..(4893): n is a, c, g, or t
  misc_feature (4900)..(4900): n is a, c, g, or t
  misc_feature (4953)..(4953): n is a, c, g, or t
  misc_feature (5035)..(5036): n is a, c, g, or t
  misc_feature (5061)..(5061): n is a, c, g, or t
  misc_feature (5142)..(5142): n is a, c, g, or t
  misc_feature (5152)..(5152): n is a, c, g, or t
  misc_feature (5177)..(5177): n is a, c, g, or t
  misc_feature (5191)..(5191): n is a, c, g, or t
  misc_feature (5200)..(5200): n is a, c, g, or t
  misc_feature (5207)..(5207): n is a, c, g, or t
  misc_feature (5221)..(5221): n is a, c, g, or t
  misc_feature (5238)..(5238): n is a, c, g, or t
  misc_feature (6183)..(6183): n is a, c, g, or t
  misc_feature (6186)..(6186): n is a, c, g, or t
  misc_feature (6218)..(6218): n is a, c, g, or t
  misc_feature (6229)..(6230): n is a, c, g, or t
  misc_feature (6236)..(6236): n is a, c, g, or t
  misc_feature (6246)..(6246): n is a, c, g, or t
  misc_feature (6252)..(6253): n is a, c, g, or t
  misc_feature (6256)..(6258): n is a, c, g, or t
  misc_feature (6273)..(6273): n is a, c, g, or t
agcggattgtgcgaggcaccgggacgtcggcggctggcggagccgggctgggctgaagctggagcggcggtggcggcggcgtagggaggccggggccggggctgaggccgcggccgggtctgcgaggcccttggggcggcaggcggcggcggcccggggctcgagcccggaggcaggagcagccgccatggccgagagcatcataattcgtgtccagtccccggatggagtgaagcggatcacagcaacaaagagagaaacagcagcaacatttttgaaaaaggttgcaaaggagtttggcttccaaaataatggcttctcggtttacatcaatagaaacaagaccggagagataacagcctcctccaacaaatccctcaacttgctaaaaatcaagcatggcgatttgttgttcctgtttccctcgagccttgctgggccctcatctgaaatggagacgtcagttccaccgggcttcaaagtctttggcgctcccaacgtggtggaggatgagattgatcagtacctcagcaaacaggacgggaagatttacagaagccgagacccacagctatgccgccacggccctttggggaaatgcgtgcactgcgtccctctagagccattcgatgaggactatctaaaccatctcgagcctcccgtgaagcacatgtccttccacgcctacatccggaagctgactggaggggctgacaaggggaagtttgttgccctggagaacatcagctgcaagattaagtcagggtgcgaggggcacctcccgtggccgaatggcatctgtactaagtgccagccgagcgccatcacgctgaacagacagaagtacaggcatgtggacaatatcatgtttgagaatcacaccgtcgctgaccgctttcttgacttctggagaaagacagggaaccagcattttgggtacttatacggacggtacacggagcacaaagacattccccttggcatcagggctgaagtggctgcgatttatgagccacctcagattggtacacagaacagcttggagcttcttgaggatccaaaagctgaagtggtcgatgaaattgctgccaaacttggcctgcggaaggttggctggatatttacagacctcgtctcagaagatacccgaaagggtaccgtccgctacagtcgaaataaggacacctatttcctaagttcagaagagtgcatcactgcaggagacttccagaacaagcatcccaacatgtgccggctctctccagacggacattttggatccaagtttgttactgcagtggctacaggtggtcctgacaaccaagtccactttgaagggtaccaggtgtccaatcagtgtatggcactggtccgtgatgagtgtttgctgccatgcaaggacgccccggagcttggctacgccaaggagtctagcagtgagcagtacgtgcctgatgtgttttataaggacgtagacaagtttggcaacgagatcacccagctggcccggcccctgcctgtggagtatctcatcatagacatcacaacaactttccccaaggatccagtttacactttttctatttcgcaaaatccatttcctattgaaaaccgggatgtattgggtgagacacaggacttccatagcttggccacctatttgtctcagaatacctcatctgtgttcttggataccatctcagatttccacctcttgctgttcctggtcaccaatgaagttatgcctctgcaggacagcatcagcttgctgctggaggccgtgcggaccagaaatgaggagctcgcccagacatggaagaggtctgagcagtgggccaccatcgagcagctgtgcagtgagtacccccaccccctgccccggcaccccgtggctggggccggagagcagcccactctgcacagctccccactgccggtggtgccctggattccgcacccagctgcatcctggcaggtgccatcggcaatgcaacgagtagagactcggcctccctgccaggcacgtggcaggctccggtgatggagcagacatgttgtccaggccgtacgtcttaggtacacagccctgtaaattttataaacctgtacatcagagatactaatctccaggcatcctaggagcactttgaacatcattgtcttaagagaatcagaaactttatggaagcgccggaagcgtgggaccttttggtctccttgagaatttccctttagtgcttaaagctgtaaggaggagaagcctgcagcatccatgttgttgctggtggacactacggaacggaccgcaggcattgcgtgtcttccggaccctcagtcaccaggtcctgaacgattccccactcgtgagaaccttctgtcagcattgctgcagggactcctcacgcaccgtggtgcctcgtgcagcccgagtgccctgagtccctgcagctgagagcaccagagtgcccgggagctacggccctggacaaatgctagaatccttctgttaacacagccttcaaaagacacatcaaacacctttataccatttcctgttttttttttttttttttgagacggagtttggctcttgtcacccaggctggagtgtggtggcgtgatcttgcctcactgcaacctccacctcctgggttcaaacgattctcctgcctcagcctcctgagtagctgggactacaggcatgtgccaccatgcctggataatttttgtattcttagtagagccagggtttcaccatgttagccaggctggtctcgaactcctgaccttgtgatctgcttgcctctgcctcccagagtgttgggattacaggtgtgagccaccacgcccagccgaggttttcttttcacacaattctttgttttttatttttatttttgtagagacagggtctcactctattgccgaggctggagtgcagttgcacaatcgtaactcactgcagcctcaaactccaggctcaagtgatctttctgcttcagcctgctgagtaactgggaccacaggcttgcaacaccacacccagctaattcttggggctttgttgttgctttttatttgtttgttttttaaaaataattttaacttattttagattcacagggtacatgtgcaggtttgtcacctgggtatattgcctgatgctgaggttggggtatgattgatcacatcacccaggtactacacatagtacctaatagtttttcagcccgccctgctctttgtgtgtgtgtgtgtgtgtgtgtgtgtgtgtgtgtgtgtgtgtgttttgagctggagcctcaccctgtctcccaggctggagtgcagtggcgcaatcttagctcactgcaaactctgcctcctgggttgaagcgattcccctccctcggcctcccgagtagctgggattacagatgtgtaccaccacacctggcgttgccatctttatgtacgtgagtacccatgtttagctcccacttataaatgaaaacatgtagtatttggtttgctgttcctgcattagtttgcttagaataatggccttcaactgcatccatgttgctgcaaaggacatgatttcattcctttttatggctgcaaaattttttaatatttttgtatcaatgaggtctcactgtgttgcccagactggtctcaaactttggcctcaagcattccttgcacctcagcctcacaaagtcctgagattatacctgggagccactgcacccagccctttgatgcagttctcaatgacaccagtctttttttttttttttcttttttgtttcccttttagagacagggtttcgctctgttgcctaggctggagtgcagtggagtgatcatagctcactacagccttcaattcctgagctcaagcgatcctcctgcatcagctttcggagtacctaggagtataaacatgagccactacacccaactaatgtttttggttggtgttttttttttttctttaagagatagggttggccgggcccggtggctggctcacacctgtaatcccagcactttgggaggctgaggcnggtggatcncaangtcangggattgagnccatcctggccaacntggtgaaaccccatttctgttaaaactacaaaanttagctgggcatggtggcgagcgcctgtgntcccagctnctcnggnggctgaggcnggagaatcncttgacccaggaagcgtaggttgtagtgagctgagatcgtgccactgtactccagcctgggcgacagagcgagactctgtctcaaaaaaaaaaaaaagatgtggtcttgccatgttgcccaggctggtctcaaactcctaggctcaagtgatcttcctgccttggttcccaaagtgctgngattncagctgtgagccactgcacctgaccttttttttttcccccctcctttttttttgagacaggttctcgctctgtcncccnggctgaagtgcagtggcatttgaggtcagtctcaccttgncctccccnggctcaancnatcctcccgcctcagcctcctgagcngctgggactncaggcatgtgccaccatccctggctgattttttaaatttgttgtagagatgnggtctcnctatgttgcccnggctggtcttgaactcttgggcccaagcgatcctcccgcctcagtgctgagattgcagtggtnagccaccatgtccagccaactctttaataataggcagttctgactggtgtaagttctgactggtatctcactgtggttttaatttgcatctctgatgattagtgatgtngggcattttttcatgggttttttgtttgtttgttttgagacanagtcttgttctgttgcccaggctggagtgcagtagtgtgatctcggctcnctgcngcctccncctcccgggttcaagccattgtccagcctctgcctcctaagtagctggaattncaggtggctgccaccacacccagctaatttttttagttttggtggagacagggtttctccatgttggccaggctggtctcgnnctcctgacctcaagtgatccacccncctcggcttcccaaagtgctgggattataggtgtgagccaccgcgcccggccctcatgggttgttttgttttgttttgagncggaatctcnccctgtcacccaggctgcagtgcantctcatgatctccncttactgcnacctccncgtcctgggttcangtgatgctcctgcctcngcctcccgagtggctgggactgcaggcgtgcacccacgcctggctaatttttatatttttggtggagatggggtttcaccatgttggtcaggctggtctggaactcctgacctcaggtgatccacctgcctcggtctcccaaagtgctgggattacagacgtgtatacacaagacacaaagatcagctcaggatgggtcataggcctaatggtaaaaggtaaaactatgaagcaggctgggcatgatgtctcatagctataatcctaacactctaggaggccaaagctggaggacactgtagcccagaagtgtgagaccagcccacacagcatagtgaagccccgtctgtacaaaaaaacaatattaaaaaaaaaagaattagctgggcatggtgagtggtccacgcctataatcccagcttctggggaggctgaaatgggaggatcccatgagtcaggagctcgaggtcacagtgagccatgattataccactccagcctgaatgacagagcaataccctgtcttaaaaaaataaaaactgtaaaacagttattaagttgaatctcttcagggccttggggtacgcaaagattcttttaggcaggatgcaggaccttggggtagaacacagaaaaacactggcataaaaataggtaaattgataaataaatttatctaaacaaaacacttgtgctcatcacagggcactgttagaaacatgaaaaggcaccaatgggggacgcagtattagcagtacatacacacaacatggtgaaaccctagttctaccaaagaatagataaaattagccaggtgtggtggcacgtgcctgtggtcctagctgcttgggaggctgaggtaggagaatcgcttgaacccgggaggcagaggttgcagcgagccgagattgcgccactgcactccagcctgggtgacagagcaanacnctacctcagaaaaaaaaaaaaaaaaaaaaaanaaaaaaaaaanntaaatnaaaaatcccntggggnnttnnntttattttataaggngaaggaccctctgcaacaaaaaggaaccagcaagcacaggctccctgttactccctgtggtgcaggaggcatttttctgagggcattaagcacttcaaagtgtgcctgtggtgggagtgctgtgtgggcaggaccagcactgggtgggatgttgggggcggggagctctcagctgcctgcccctgcccccatgcccacactctggcagtctctggtgggccagaaatgatgagtgctcatttctcttccaccctgcaggcacagttggcgggcagctcccaggtctccatgagtacggcgccgtcgggggctccacacacacggccactgcagccatgtgggcctgtcagcactgcacgttcatgaaccagccaggcacaggccactgcgagatgtgcagcctccccaggacctagggcgcctgccctctgctggctaggaccgggcccagcccagcccttcctgaagccagaagcgttgctgagtgtgttccctgtaactgccccatagtgggcagccctggaggaacaaggggctggctgtcctgggctccctgacccactgaagcttctcagcacgttcctccctggagagcgggcgccacggctggtattctgcaggctgaatgcagtctccagactggaaacgcagagcggctcctcacgcctaatcctgttgacaagtcccccgccgtgttggaaagacctctcgcctctacgtggcacctggaattggggcgcacagggaggggcggatgctgccaccacccagccttctctttattttcagtgctttttgtttggcctccctgcccccatgtttttctggctgggagctcctggttacccccttgtctgactgcttggtggcaggcaccctgcctgtgagggccactttcctcttctagtagctgttgtctggtggggacgcagtggccctggacacggctcccctctgcaggtctgcaggtcggtttgctgcctgccctcctcctctcacccgatgtccaggtgggattttaaagtctgcattggttataataacagttatcagtaattcctgcccagaagacttttatttatttttttttaagataaaaactgcacaaaaggggagtgagagagactagtttccacatccttccctcctttagtgaagcccccgaggttgtgtccagggtgatgagtgtggacgggggcaccagtcagttctcccttgaagtaaacctcagtgcctgagacttttctaccaagccacacagctgcagcaactgcagatactgcgggctgagcaggagcagtggtggcgcctgccctgaggctgccctgcgatggcctgggtgggagagctgggtcaccggtgccgatgctctggccctccccaatacgctgcttcgtcccactgcaccgcctggctgagggcgttaggggctgtgcctcttgtgagggccatttgggacctccctggggcactgcacaattgatagtgtaccaatagagggagactgggcgatctggaacagcacgtggtggggtcctgcttgtgtgctctgcgttcctctgtggcgtggccaggccggggcctggctcttacccggggagtggtgggcatctcgatgcttctttgccttaatgatggccacatctgggctgctctgcacccacgggagaggctggcccagctgcagactgcttagggacttctgtgtccatcctggggggtaagcccacgtgacccacattcttggcactatgaacagagaacatttgcctgttggcttctgaagtggtcagggccatggctgacacctccaggtccgcctggcatgggacaccaagtggaaggcccaagcagctcatctgctcttgggaccaggggccagttgggttgggtctggtcacggcagagctattgtggagggtcaggaagggtggagaggagctgggttgaagcggactgctgcggatgcaactcccagcttgcccaccgcgggctgtctgctctccctcctagcagctgtcacactgaagttttgtcctctgctgtctcctctggtcctgagatgagctgtgagcctaggtggccaaggcttcctgcattgcttccctgtgagtccaaggccttcccccaccactgggcagaggctggacagcacggacttctagagagagccgcgttgccagttcctctcccactcgctcgtccttatccaccacgctattatagtttccgttgtcctccaccagcatttcccttactctgaagttccggcattcacatcattcatgttttcttttgtcttttagctaaaggaaaagcattggcgatttgtctgattctggttttgagttactctttgttcagtaatgcactttattttattgtccaaagagagtcagagctaagcatacaggcttgggggtgagccctgctgtgagagttcaggccctgggaggctcagccacctcctcttgtgggaaggaggtctcagccccacctcgcatcttcacctgcccttggtgtggacacaccctctcatgctaccagcaccataatccagtgggggtgactgggtgcacacctgcccaggtgaacacagcggctgccagtctcctggtcccgagaggaggtggggcctggccctggctccctccaaccagctgctcctgggacacaggtgctcctgcttcggctctgtttcggctcacaggtgtgcatcactgggcttggatttgcattacattgaccccagccctgcagtggaacctaataaaagcgcctgaagcaa

SEQ ID NO: 530625 - DNA, 4445 bp, Homo sapiens
agcggattgtgcgaggcaccgggacgtcggcggctggcggagccgggctgggctgaagctggagcggcggtggcggcggcgtagggaggccggggccggggctgaggccgcggccgggtctgcgaggcccttggggcggcaggcggcggcggcccggggctcgagcccggaggcaggagcagccgccatggccgagagcatcataattcgtgtccagtccccggatggagtgaagcggatcacagcaacaaagagagaaacagcagcaacatttttgaaaaaggttgcaaaggagtttggcttccaaaataatggcttctcggtttacatcaatagaaacaagaccggagagataacagcctcctccaacaaatccctcaacttgctaaaaatcaagcatggcgatttgttgttcctgtttccctcgagccttgctgggccctcatctgaaatggagacgtcagttccaccgggcttcaaagtctttggcgctcccaacgtggtggaggatgagattgatcagtacctcagcaaacaggacgggaagatttacagaagccgagacccacagctatgccgccacggccctttggggaaatgcgtgcactgcgtccctctagagccattcgatgaggactatctaaaccatctcgagcctcccgtgaagcacatgtccttccacgcctacatccggaagctgactggaggggctgacaaggggaagtttgttgccctggagaacatcagctgcaagattaagtcagggtgcgaggggcacctcccgtggccgaatggcatctgtactaagtgccagccgagcgccatcacgctgaacagacagaagtacaggcatgtggacaatatcatgtttgagaatcacaccgtcgctgaccgctttcttgacttctggagaaagacagggaaccagcattttgggtacttatacggacggtacacggagcacaaagacattccccttggcatcagggctgaagtggctgcgatttatgagccacctcagattggtacacagaacagcttggagcttcttgaggatccaaaagctgaagtggtcgatgaaattgctgccaaacttggcctgcggaaggttggctggatatttacagacctcgtctcagaagatacccgaaagggtaccgtccgctacagtcgaaataaggacacctatttcctaagttcagaagagtgcatcactgcaggagacttccagaacaagcatcccaacatgtgccggctctctccagacggacattttggatccaagtttgttactgcagtggctacaggtggtcctgacaaccaagtccactttgaagggtaccaggtgtccaatcagtgtatggcactggtccgtgatgagtgtttgctgccatgcaaggacgccccggagcttggctacgccaaggagtctagcagtgagcagtacgtgcctgatgtgttttataaggacgtagacaagtttggcaacgagatcacccagctggcccggcccctgcctgtggagtatctcatcatagacatcacaacaactttccccaaggatccagtttacactttttctatttcgcaaaatccatttcctattgaaaaccgggatgtattgggtgagacacaggacttccatagcttggccacctatttgtctcagaatacctcatctgtgttcttggataccatctcagatttccacctcttgctgttcctggtcaccaatgaagttatgcctctgcaggacagcatcagcttgctgctggaggccgtgcggaccagaaatgaggagctcgcccagacatggaagaggtctgagcagtgggccaccatcgagcagctgtgcacctcccgagtagctgggattacagatgtgtaccaccacacctggcgttgccatctttatgcacagttggcgggcagctcccaggtctccatgagtacggcgccgtcgggggctccacacacacggccactgcagccatgtgggcctgtcagcactgcacgttcatgaaccagccaggcacaggccactgcgagatgtgcagcctccccaggacctagggcgcctgccctctgctggctaggaccgggcccagcccagcccttcctgaagccagaagcgttgctgagtgtgttccctgtaactgccccatagtgggcagccctggaggaacaaggggctggctgtcctgggctccctgacccactgaagcttctcagcacgttcctccctggagagcgggcgccacggctggtattctgcaggctgaatgcagtctccagactggaaacgcagagcggctcctcacgcctaatcctgttgacaagtcccccgccgtgttggaaagacctctcgcctctacgtggcacctggaattggggcgcacagggaggggcggatgctgccaccacccagccttctctttattttcagtgctttttgtttggcctccctgcccccatgtttttctggctgggagctcctggttacccccttgtctgactgcttggtggcaggcaccctgcctgtgagggccactttcctcttctagtagctgttgtctggtggggacgcagtggccctggacacggctcccctctgcaggtctgcaggtcggtttgctgcctgccctcctcctctcacccgatgtccaggtgggattttaaagtctgcattggttataataacagttatcagtaattcctgcccagaagacttttatttatttttttttaagataaaaactgcacaaaaggggagtgagagagactagtttccacatccttccctcctttagtgaagcccccgaggttgtgtccagggtgatgagtgtggacgggggcaccagtcagttctcccttgaagtaaacctcagtgcctgagacttttctaccaagccacacagctgcagcaactgcagatactgcgggctgagcaggagcagtggtggcgcctgccctgaggctgccctgcgatggcctgggtgggagagctgggtcaccggtgccgatgctctggccctccccaatacgctgcttcgtcccactgcaccgcctggctgagggcgttaggggctgtgcctcttgtgagggccatttgggacctccctggggcactgcacaattgatagtgtaccaatagagggagactgggcgatctggaacagcacgtggtggggtcctgcttgtgtgctctgcgttcctctgtggcgtggccaggccggggcctggctcttacccggggagtggtgggcatctcgatgcttctttgccttaatgatggccacatctgggctgctctgcacccacgggagaggctggcccagctgcagactgcttagggacttctgtgtccatcctggggggtaagcccacgtgacccacattcttggcactatgaacagagaacatttgcctgttggcttctgaagtggtcagggccatggctgacacctccaggtccgcctggcatgggacaccaagtggaaggcccaagcagctcatctgctcttgggaccaggggccagttgggttgggtctggtcacggcagagctattgtggagggtcaggaagggtggagaggagctgggttgaagcggactgctgcggatgcaactcccagcttgcccaccgcgggctgtctgctctccctcctagcagctgtcacactgaagttttgtcctctgctgtctcctctggtcctgagatgagctgtgagcctaggtggccaaggcttcctgcattgcttccctgtgagtccaaggccttcccccaccactgggcagaggctggacagcacggacttctagagagagccgcgttgccagttcctctcccactcgctcgtccttatccaccacgctattatagtttccgttgtcctccaccagcatttcccttactctgaagttccggcattcacatcattcatgttttcttttgtcttttagctaaaggaaaagcattggcgatttgtctgattctggttttgagttactctttgttcagtaatgcactttattttattgtccaaagagagtcagagctaagcatacaggcttgggggtgagccctgctgtgagagttcaggccctgggaggctcagccacctcctcttgtgggaaggaggtctcagccccacctcgcatcttcacctgcccttggtgtggacacaccctctcatgctaccagcaccataatccagtgggggtgactgggtgcacacctgcccaggtgaacacagcggctgccagtctcctggtcccgagaggaggtggggcctggccctggctccctccaaccagctgctcctgggacacaggtgctcctgcttcggctctgtttcggctcacaggtgtgcatcactgggcttggatttgcattacattgaccccagccctgcagtggaacctaataaaagcgcctgaagcaa

SEQ ID NO: 530626 - DNA, 9670 bp, Homo sapiens
  misc_feature (4052)..(4052): n is a, c, g, or t
  misc_feature (4061)..(4061): n is a, c, g, or t
  misc_feature (4065)..(4065): n is a, c, g, or t
  misc_feature (4070)..(4070): n is a, c, g, or t
  misc_feature (4080)..(4080): n is a, c, g, or t
  misc_feature (4095)..(4095): n is a, c, g, or t
  misc_feature (4129)..(4129): n is a, c, g, or t
  misc_feature (4159)..(4159): n is a, c, g, or t
  misc_feature (4168)..(4168): n is a, c, g, or t
  misc_feature (4172)..(4172): n is a, c, g, or t
  misc_feature (4175)..(4175): n is a, c, g, or t
  misc_feature (4185)..(4185): n is a, c, g, or t
  misc_feature (4194)..(4194): n is a, c, g, or t
  misc_feature (4374)..(4374): n is a, c, g, or t
  misc_feature (4379)..(4379): n is a, c, g, or t
  misc_feature (4454)..(4454): n is a, c, g, or t
  misc_feature (4458)..(4458): n is a, c, g, or t
  misc_feature (4498)..(4498): n is a, c, g, or t
  misc_feature (4506)..(4506): n is a, c, g, or t
  misc_feature (4514)..(4514): n is a, c, g, or t
  misc_feature (4516)..(4516): n is a, c, g, or t
  misc_feature (4542)..(4542): n is a, c, g, or t
  misc_feature (4552)..(4552): n is a, c, g, or t
  misc_feature (4604)..(4604): n is a, c, g, or t
  misc_feature (4611)..(4611): n is a, c, g, or t
  misc_feature (4623)..(4623): n is a, c, g, or t
  misc_feature (4686)..(4686): n is a, c, g, or t
  misc_feature (4795)..(4795): n is a, c, g, or t
  misc_feature (4838)..(4838): n is a, c, g, or t
  misc_feature (4888)..(4888): n is a, c, g, or t
  misc_feature (4893)..(4893): n is a, c, g, or t
  misc_feature (4900)..(4900): n is a, c, g, or t
  misc_feature (4953)..(4953): n is a, c, g, or t
  misc_feature (5035)..(5036): n is a, c, g, or t
  misc_feature (5061)..(5061): n is a, c, g, or t
  misc_feature (5142)..(5142): n is a, c, g, or t
  misc_feature (5152)..(5152): n is a, c, g, or t
  misc_feature (5177)..(5177): n is a, c, g, or t
  misc_feature (5191)..(5191): n is a, c, g, or t
  misc_feature (5200)..(5200): n is a, c, g, or t
  misc_feature (5207)..(5207): n is a, c, g, or t
  misc_feature (5221)..(5221): n is a, c, g, or t
  misc_feature (5238)..(5238): n is a, c, g, or t
  misc_feature (6384)..(6384): n is a, c, g, or t
  misc_feature (6387)..(6387): n is a, c, g, or t
  misc_feature (6419)..(6419): n is a, c, g, or t
  misc_feature (6430)..(6431): n is a, c, g, or t
  misc_feature (6437)..(6437): n is a, c, g, or t
  misc_feature (6447)..(6447): n is a, c, g, or t
  misc_feature (6453)..(6454): n is a, c, g, or t
  misc_feature (6457)..(6459): n is a, c, g, or t
  misc_feature (6474)..(6474): n is a, c, g, or t
  misc_feature (9372)..(9372): n is a, c, g, or t
agcggattgtgcgaggcaccgggacgtcggcggctggcggagccgggctgggctgaagctggagcggcggtggcggcggcgtagggaggccggggccggggctgaggccgcggccgggtctgcgaggcccttggggcggcaggcggcggcggcccggggctcgagcccggaggcaggagcagccgccatggccgagagcatcataattcgtgtccagtccccggatggagtgaagcggatcacagcaacaaagagagaaacagcagcaacatttttgaaaaaggttgcaaaggagtttggcttccaaaataatggcttctcggtttacatcaatagaaacaagaccggagagataacagcctcctccaacaaatccctcaacttgctaaaaatcaagcatggcgatttgttgttcctgtttccctcgagccttgctgggccctcatctgaaatggagacgtcagttccaccgggcttcaaagtctttggcgctcccaacgtggtggaggatgagattgatcagtacctcagcaaacaggacgggaagatttacagaagccgagacccacagctatgccgccacggccctttggggaaatgcgtgcactgcgtccctctagagccattcgatgaggactatctaaaccatctcgagcctcccgtgaagcacatgtccttccacgcctacatccggaagctgactggaggggctgacaaggggaagtttgttgccctggagaacatcagctgcaagattaagtcagggtgcgaggggcacctcccgtggccgaatggcatctgtactaagtgccagccgagcgccatcacgctgaacagacagaagtacaggcatgtggacaatatcatgtttgagaatcacaccgtcgctgaccgctttcttgacttctggagaaagacagggaaccagcattttgggtacttatacggacggtacacggagcacaaagacattccccttggcatcagggctgaagtggctgcgatttatgagccacctcagattggtacacagaacagcttggagcttcttgaggatccaaaagctgaagtggtcgatgaaattgctgccaaacttggcctgcggaaggttggctggatatttacagacctcgtctcagaagatacccgaaagggtaccgtccgctacagtcgaaataaggacacctatttcctaagttcagaagagtgcatcactgcaggagacttccagaacaagcatcccaacatgtgccggctctctccagacggacattttggatccaagtttgttactgcagtggctacaggtggtcctgacaaccaagtccactttgaagggtaccaggtgtccaatcagtgtatggcactggtccgtgatgagtgtttgctgccatgcaaggacgccccggagcttggctacgccaaggagtctagcagtgagcagtacgtgcctgatgtgttttataaggacgtagacaagtttggcaacgagatcacccagctggcccggcccctgcctgtggagtatctcatcatagacatcacaacaactttccccaaggatccagtttacactttttctatttcgcaaaatccatttcctattgaaaaccgggatgtattgggtgagacacaggacttccatagcttggccacctatttgtctcagaatacctcatctgtgttcttggataccatctcagatttccacctcttgctgttcctggtcaccaatgaagttatgcctctgcaggacagcatcagcttgctgctggaggccgtgcggaccagaaatgaggagctcgcccagacatggaagaggtctgagcagtgggccaccatcgagcagctgtgcagtgagtacccccaccccctgccccggcaccccgtggctggggccggagagcagcccactctgcacagctccccactgccggtggtgccctggattccgcacccagctgcatcctggcaggtgccatcggcaatgcaacgagtagagactcggcctccctgccaggcacgtggcaggctccggtgatggagcagacatgttgtccaggccgtacgtcttaggtacacagccctgtaaattttataaacctgtacatcagagatactaatctccaggcatcctaggagcactttgaacatcattgtcttaagagaatcagaaactttatggaagcgccggaagcgtgggaccttttggtctccttgagaatttccctttagtgcttaaagctgtaaggaggagaagcctgcagcatccatgttgttgctggtggacactacggaacggaccgcaggcattgcgtgtcttccggaccctcagtcaccaggtcctgaacgattccccactcgtgagaaccttctgtcagcattgctgcagggactcctcacgcaccgtggtgcctcgtgcagcccgagtgccctgagtccctgcagctgagagcaccagagtgcccgggagctacggccctggacaaatgctagaatccttctgttaacacagccttcaaaagacacatcaaacacctttataccatttcctgttttttttttttttttttgagacggagtttggctcttgtcacccaggctggagtgtggtggcgtgatcttgcctcactgcaacctccacctcctgggttcaaacgattctcctgcctcagcctcctgagtagctgggactacaggcatgtgccaccatgcctggataatttttgtattcttagtagagccagggtttcaccatgttagccaggctggtctcgaactcctgaccttgtgatctgcttgcctctgcctcccagagtgttgggattacaggtgtgagccaccacgcccagccgaggttttcttttcacacaattctttgttttttatttttatttttgtagagacagggtctcactctattgccgaggctggagtgcagttgcacaatcgtaactcactgcagcctcaaactccaggctcaagtgatctttctgcttcagcctgctgagtaactgggaccacaggcttgcaacaccacacccagctaattcttggggctttgttgttgctttttatttgtttgttttttaaaaataattttaacttattttagattcacagggtacatgtgcaggtttgtcacctgggtatattgcctgatgctgaggttggggtatgattgatcacatcacccaggtactacacatagtacctaatagtttttcagcccgccctgctctttgtgtgtgtgtgtgtgtgtgtgtgtgtgtgtgtgtgtgtgtgtgttttgagctggagcctcaccctgtctcccaggctggagtgcagtggcgcaatcttagctcactgcaaactctgcctcctgggttgaagcgattcccctccctcggcctcccgagtagctgggattacagatgtgtaccaccacacctggcgttgccatctttatgtacgtgagtacccatgtttagctcccacttataaatgaaaacatgtagtatttggtttgctgttcctgcattagtttgcttagaataatggccttcaactgcatccatgttgctgcaaaggacatgatttcattcctttttatggctgcaaaattttttaatatttttgtatcaatgaggtctcactgtgttgcccagactggtctcaaactttggcctcaagcattccttgcacctcagcctcacaaagtcctgagattatacctgggagccactgcacccagccctttgatgcagttctcaatgacaccagtctttttttttttttttcttttttgtttcccttttagagacagggtttcgctctgttgcctaggctggagtgcagtggagtgatcatagctcactacagccttcaattcctgagctcaagcgatcctcctgcatcagctttcggagtacctaggagtataaacatgagccactacacccaactaatgtttttggttggtgttttttttttttctttaagagatagggttggccgggcccggtggctggctcacacctgtaatcccagcactttgggaggctgaggcnggtggatcncaangtcangggattgagnccatcctggccaacntggtgaaaccccatttctgttaaaactacaaaanttagctgggcatggtggcgagcgcctgtgntcccagctnctcnggnggctgaggcnggagaatcncttgacccaggaagcgtaggttgtagtgagctgagatcgtgccactgtactccagcctgggcgacagagcgagactctgtctcaaaaaaaaaaaaaagatgtggtcttgccatgttgcccaggctggtctcaaactcctaggctcaagtgatcttcctgccttggttcccaaagtgctgngattncagctgtgagccactgcacctgaccttttttttttcccccctcctttttttttgagacaggttctcgctctgtcncccnggctgaagtgcagtggcatttgaggtcagtctcaccttgncctccccnggctcaancnatcctcccgcctcagcctcctgagcngctgggactncaggcatgtgccaccatccctggctgattttttaaatttgttgtagagatgnggtctcnctatgttgcccnggctggtcttgaactcttgggcccaagcgatcctcccgcctcagtgctgagattgcagtggtnagccaccatgtccagccaactctttaataataggcagttctgactggtgtaagttctgactggtatctcactgtggttttaatttgcatctctgatgattagtgatgtngggcattttttcatgggttttttgtttgtttgttttgagacanagtcttgttctgttgcccaggctggagtgcagtagtgtgatctcggctcnctgcngcctccncctcccgggttcaagccattgtccagcctctgcctcctaagtagctggaattncaggtggctgccaccacacccagctaatttttttagttttggtggagacagggtttctccatgttggccaggctggtctcgnnctcctgacctcaagtgatccacccncctcggcttcccaaagtgctgggattataggtgtgagccaccgcgcccggccctcatgggttgttttgttttgttttgagncggaatctcnccctgtcacccaggctgcagtgcantctcatgatctccncttactgcnacctccncgtcctgggttcangtgatgctcctgcctcngcctcccgagtggctgggactgcaggcgtgcacccacgcctggctaatttttatatttttggtggagatggggtttcaccatgttggtcaggctggtctggaactcctgacctcaggtgatccacctgcctcggtctcccaaagtgctgggattacagacgtgtatacacaagacacaaagatcagctcaggatgggtcataggcctaatggtaaaaggtaaaactatgaagcaggctgggcatgatgtctcatagctataatcctaacactctaggaggccaaagctggaggacactgtagcccagaagtgtgagaccagcccacacagcatagtgaagccccgtctgtacaaaaaaacaatattaaaaaaaaaagaattagctgggcatggtgagtggtccacgcctataatcccagcttctggggaggctgaaatgggaggatcccatgagtcaggagctcgaggtcacagtgagccatgattataccactccagcctgaatgacagagcaataccctgtcttaaaaaaataaaaactgtaaaacagttattaagttgaatctcttcagggccttggggtacgcaaagattcttttaggcaggatgcaggaccttggggtagaacacagaaaaacactggcataaaaataggtaaattgataaataaatttatctaaacaaaacacttgtgctcatcacagggcactgttagaaacatgaaaaggcaccaatgggggacgcagtattagcagtacatacacacaacatgacttctatctgaaacttaaaaataactctgcctgttgttaatcaaacagaaagcagaagaagaagctgggcggagggtgaaacgtttcacaaaaggaaatgcaggtcgggcatggtggctcgcgcctgtaatcccagcactttgggaggccgaggcggtggatcatttgaggtcaggagttcgagacagccaggccagcatggtgaaaacccatctctactaaaaataaaagaaattagccaggtgtggtggcacgtgcctgtggtcctagctgcttgggaggctgaggtaggagaatcgcttgaacccgggaggcagaggttgcagcgagccgagattgcgccactgcactccagcctgggtgacagagcaanacnctacctcagaaaaaaaaaaaaaaaaaaaaaanaaaaaaaaaanntaaatnaaaaatcccntggggnnttnnntttattttataaggngaaggaccctctgcaacaaaaaggaaccagcaagcacaggctccctgttactccctgtggtgcaggaggcatttttctgagggcattaagcacttcaaagtgtgcctgtggtgggagtgctgtgtgggcaggaccagcactgggtgggatgttgggggcggggagctctcagctgcctgcccctgcccccatgcccacactctggcagtctctggtgggccagaaatgatgagtgctcatttctcttccaccctgcaggcacagttggcgggcagctcccaggtctccatgagtacggcgccgtcgggggctccacacacacggccactgcagccatgtgggcctgtcagcactgcacgttcatgaaccagccaggcacaggccactgcgagatgtgcagcctccccaggacctagggcgcctgccctctgctggctaggaccgggcccagcccagcccttcctgaagccagaagcgttgctgagtgtgttccctgtaactgccccatagtgggcagccctggaggaacaaggggctggctgtcctgggctccctgacccactgaagcttctcagcacgttcctccctggagagcgggcgccacggctggtattctgcaggctgaatgcagtctccagactggaaacgcagagcggctcctcacgcctaatcctgttgacaagtcccccgccgtgttggaaagacctctcgcctctacgtggcacctggaattggggcgcacagggaggggcggatgctgccaccacccagccttctctttattttcagtgctttttgtttggcctccctgcccccatgtttttctggctgggagctcctggttacccccttgtctgactgcttggtggcaggcaccctgcctgtgagggccactttcctcttctagtagctgttgtctggtggggacgcagtggccctggacacggctcccctctgcaggtctgcaggtcggtttgctgcctgccctcctcctctcacccgatgtccaggtgggattttaaagtctgcattggttataataacagttatcagtaattcctgcccagaagacttttatttatttttttttaagataaaaactgcacaaaaggggagtgagagagactagtttccacatccttccctcctttagtgaagcccccgaggttgtgtccagggtgatgagtgtggacgggggcaccagtcagttctcccttgaagtaaacctcagtgcctgagacttttctaccaagccacacagctgcagcaactgcagatactgcgggctgagcaggagcagtggtggcgcctgccctgaggctgccctgcgatggcctgggtgggagagctgggtcaccggtgccgatgctctggccctccccaatacgctgcttcgtcccactgcaccgcctggctgagggcgttaggggctgtgcctcttgtgagggccatttgggacctccctggggcactgcacaattgatagtgtaccaatagagggagactgggcgatctggaacagcacgtggtggggtcctgcttgtgtgctctgcgttcctctgtggcgtggccaggccggggcctggctcttacccggggagtggtgggcatctcgatgcttctttgccttaatgatggccacatctgggctgctctgcacccacgggagaggctggcccagctgcagactgcttagggacttctgtgtccatcctggggggtaagcccacgtgacccacattcttggcactatgaacagagaacatttgcctgttggcttctgaagtggtcagggccatggctgacacctccaggtccgcctggcatgggacaccaagtggaaggcccaagcagctcatctgctcttgggaccaggggccagttgggttgggtctggtcacggcagagctattgtggagggtcaggaagggtggagaggagctgggttgaagcggactgctgcggatgcaactcccagcttgcccaccgcgggctgtctgctctccctcctagcagctgtcacactgaagttttgtcctctgctgtctcctctggtcctgagatgagctgtgagcctaggtggccaaggcttcctgcattgcttccctgtgagtccaaggccttcccccaccactgggcagaggctggacagcacggacttctagagagagccgcgttgccagttcctctcccactcgctcgtccttatccaccacgctattatagtttccgttgtcctccaccagcatttcccttactctgaagttccggcattcacatcattcatgttttcttttgtcttttagctaaaggaaaagcattggcgatttgtctgattctggttttgagttactctttgttcagtaatgcactttattttattgtccaaagagagtcagagctaagcatacaggcttgggggtgagccctgctgtgagagttcaggccctgggaggctcagccacctcctcttgtgggaaggaggtctcagccccacctcgcatcttcacctgcccttggtgtggacacaccctctcatgctaccagcaccataatccagtgggggtgactgggtgcacacctgcccaggtgaacacagcggctgccagtctcctggtcccgagaggaggtggggcctggccctggctccctccaaccagctgctcctgggacacaggtgctcctgcttcggctctgtttcggctcacaggtgtgcatcactgggcttggatttgcattacattgaccccagccctgcagtggaacctaataaaagcgcctgaagcaaaaaaaaaaaaaaaaaaaaaaaaaaaaaaaaaaaaaaaaaaaaaaaaaacgggggttttttggggggggggacaaagtaaaggcggttcacgttgttttttcggcaacccnttttttctcaacgaggggaaaagcggcgggaccccaaaggggggaggataaaattcaaaaaccggcgtctccctcttcgttctctctgcatagacaaccataagatcaacaaacagaacgcagcagatacatagcatagagggataagagaaaagaaaagagagatcataacacagacacagaactaacaaacgcagcacagaaatgacgcaacagacatgatcaatcaacaataaatgagagaaatcagaagtagagggtaagccaatatcaagcaatgagagaaagacgagaggca

SEQ ID NO: 530627 - DNA, 167 bp, Homo sapiens
ggccctcatgcttatactttctcaacgcttcatacgttcgtcaacgcttatactttctcaacgctttatacttcctcaacgctttatacttctcaacgctttatactttctcaacgctttatacttcatacccggaaatgacatgagaagcgttgagaagcgttgag

SEQ ID NO: 530628 - DNA, 1103 bp, Homo sapiens
ggtactgtggcgccttatgagactgcgaggtggtgcctctcacccagctaattggtctctagacccttggtacttcacaggctgttgcctgcctggccgagtaacagcactctctgacctgtggcccgctcatcatgtcatccgcacaagacgtttggtgcctgatggaggcgggacacggagtgactgtcgatgtcgtagatctgaccacgagcatgacaggtgccgtgggtccatccgtaagctgtggagactatgcgagtcggtacctgatggtccacagcactgtgcgtcccggttcatgtctatacgcagcgtgggaccatccgtagagatgggagttcccgcgagcaaatgtaaaagtgcaaaccaacaaggcggtctgggatagtcgggcctagggatcatggcttaggtgctggtaccgtacttatataggggacgccttgtcgaatactcattcaatagacaattatatccaaccgcgttgcgaaaaaatttggtgattgctacgccaaatgggttggggagaaaaactcttatagtggtgggttgcgatctctgcctaatttgacaggagaggcagggaattctgtagagggcaaataactgaccatgtattggagggatatttgccttataggggaagcgtgtttggaatacgtttacgaaattaacttgcgcatacacattgtgcattggtaaacaccatgcgttgtggagatttggtggggctttcggggcagaccaggggacggatactattgggggaactggcgtgggaattagaaagatattggtttaggggcaccttacaaggaatttacccatgggttaaagaacgactttgggtggcgcccccagttcatggtggagacgtctttttcttataaagaaatattggtggaacggaagctggatacttggttcagttgtggtttcaaaacttagtgggatttgtgggcaaagtggacggacggtaaacaacttgcggcaaggtatggagcttatagggagcgctacaacttctcaccggggcgtttttgagaaggtacccttggaggatagaataatcggtcttgtggggaaaagactggctgggc

SEQ ID NO: 530629 - DNA, 965 bp, Homo sapiens
  misc_feature (965)..(965): n is a, c, g, or t
cggaaataggcatactagaatctcgcgtacgtgggggccgacatgggcgaacagttggtaatgtggccaatgttgctgttacatgaggccgagatgacttcagggtctatgaccgcggttgaaactgggcactgaagaaccatgacatctgttcccggcagtttgattgcttctatagccagccttaaacatggtggttgtaagtaaagttttacagagcaattagtgaaacataaactcatagcttgggagcgtaccaaaactgtccaggctatcggttgacaaatgcaggatatgattacctggctttgaaaacactttcttctaggcaagtagttgagtgtgtggaaaccagatgggtgttggcgaaagaatcagatatttacattgtggcccatgaagaaggacaacaatttgcattaacagcttcacagactaggaagaacctcgttcgacactttgaaaaacaaacgcgattatcataaacataggcacaatgtggtctggcttcattatctcgtctctactggcatgaacggattttgcctattgacggcattgtttgacgaggacactttcccagctccaaggcgattgaataaccacggccattgcggggacatggcacgtcatacatggttccctatgtacacttccctgtgaaaaccggcccagaatgcgacttggacttatgccactgcacatggagatatggagaacacaacagcgcagaggagatctactgtggcatcgactaagccaccaccttagaaaatcaccatctactacagacttgttttcttttttttcctgtttcctcctaaatatccttccccccaaaaaaaaacaaccaagacaacaaaaacaacaaaacaaacacaaaaataaaaaatacaacataactcatcatcaactcaaccataaaagaacatcaactcaaatagaacaacaaaaacaaacgccgn

SEQ ID NO: 530630 - DNA, 9900 bp, Homo sapiens
  misc_feature (4052)..(4052): n is a, c, g, or t
  misc_feature (4061)..(4061): n is a, c, g, or t
  misc_feature (4065)..(4065): n is a, c, g, or t
  misc_feature (4070)..(4070): n is a, c, g, or t
  misc_feature (4080)..(4080): n is a, c, g, or t
  misc_feature (4095)..(4095): n is a, c, g, or t
  misc_feature (4129)..(4129): n is a, c, g, or t
  misc_feature (4159)..(4159): n is a, c, g, or t
  misc_feature (4168)..(4168): n is a, c, g, or t
  misc_feature (4172)..(4172): n is a, c, g, or t
  misc_feature (4175)..(4175): n is a, c, g, or t
  misc_feature (4185)..(4185): n is a, c, g, or t
  misc_feature (4194)..(4194): n is a, c, g, or t
  misc_feature (4374)..(4374): n is a, c, g, or t
  misc_feature (4379)..(4379): n is a, c, g, or t
  misc_feature (4454)..(4454): n is a, c, g, or t
  misc_feature (4458)..(4458): n is a, c, g, or t
  misc_feature (4498)..(4498): n is a, c, g, or t
  misc_feature (4506)..(4506): n is a, c, g, or t
  misc_feature (4514)..(4514): n is a, c, g, or t
  misc_feature (4516)..(4516): n is a, c, g, or t
  misc_feature (4542)..(4542): n is a, c, g, or t
  misc_feature (4552)..(4552): n is a, c, g, or t
  misc_feature (4604)..(4604): n is a, c, g, or t
  misc_feature (4611)..(4611): n is a, c, g, or t
  misc_feature (4623)..(4623): n is a, c, g, or t
  misc_feature (4686)..(4686): n is a, c, g, or t
  misc_feature (4795)..(4795): n is a, c, g, or t
  misc_feature (4838)..(4838): n is a, c, g, or t
  misc_feature (4888)..(4888): n is a, c, g, or t
  misc_feature (4893)..(4893): n is a, c, g, or t
  misc_feature (4900)..(4900): n is a, c, g, or t
  misc_feature (4953)..(4953): n is a, c, g, or t
  misc_feature (5035)..(5036): n is a, c, g, or t
  misc_feature (5061)..(5061): n is a, c, g, or t
  misc_feature (5142)..(5142): n is a, c, g, or t
  misc_feature (5152)..(5152): n is a, c, g, or t
  misc_feature (5177)..(5177): n is a, c, g, or t
  misc_feature (5191)..(5191): n is a, c, g, or t
  misc_feature (5200)..(5200): n is a, c, g, or t
  misc_feature (5207)..(5207): n is a, c, g, or t
  misc_feature (5221)..(5221): n is a, c, g, or t
  misc_feature (5238)..(5238): n is a, c, g, or t
  misc_feature (6384)..(6384): n is a, c, g, or t
  misc_feature (6387)..(6387): n is a, c, g, or t
  misc_feature (6419)..(6419): n is a, c, g, or t
  misc_feature (6430)..(6431): n is a, c, g, or t
  misc_feature (6437)..(6437): n is a, c, g, or t
  misc_feature (6447)..(6447): n is a, c, g, or t
  misc_feature (6453)..(6454): n is a, c, g, or t
  misc_feature (6457)..(6459): n is a, c, g, or t
  misc_feature (6474)..(6474): n is a, c, g, or t
agcggattgtgcgaggcaccgggacgtcggcggctggcggagccgggctgggctgaagctggagcggcggtggcggcggcgtagggaggccggggccggggctgaggccgcggccgggtctgcgaggcccttggggcggcaggcggcggcggcccggggctcgagcccggaggcaggagcagccgccatggccgagagcatcataattcgtgtccagtccccggatggagtgaagcggatcacagcaacaaagagagaaacagcagcaacatttttgaaaaaggttgcaaaggagtttggcttccaaaataatggcttctcggtttacatcaatagaaacaagaccggagagataacagcctcctccaacaaatccctcaacttgctaaaaatcaagcatggcgatttgttgttcctgtttccctcgagccttgctgggccctcatctgaaatggagacgtcagttccaccgggcttcaaagtctttggcgctcccaacgtggtggaggatgagattgatcagtacctcagcaaacaggacgggaagatttacagaagccgagacccacagctatgccgccacggccctttggggaaatgcgtgcactgcgtccctctagagccattcgatgaggactatctaaaccatctcgagcctcccgtgaagcacatgtccttccacgcctacatccggaagctgactggaggggctgacaaggggaagtttgttgccctggagaacatcagctgcaagattaagtcagggtgcgaggggcacctcccgtggccgaatggcatctgtactaagtgccagccgagcgccatcacgctgaacagacagaagtacaggcatgtggacaatatcatgtttgagaatcacaccgtcgctgaccgctttcttgacttctggagaaagacagggaaccagcattttgggtacttatacggacggtacacggagcacaaagacattccccttggcatcagggctgaagtggctgcgatttatgagccacctcagattggtacacagaacagcttggagcttcttgaggatccaaaagctgaagtggtcgatgaaattgctgccaaacttggcctgcggaaggttggctggatatttacagacctcgtctcagaagatacccgaaagggtaccgtccgctacagtcgaaataaggacacctatttcctaagttcagaagagtgcatcactgcaggagacttccagaacaagcatcccaacatgtgccggctctctccagacggacattttggatccaagtttgttactgcagtggctacaggtggtcctgacaaccaagtccactttgaagggtaccaggtgtccaatcagtgtatggcactggtccgtgatgagtgtttgctgccatgcaaggacgccccggagcttggctacgccaaggagtctagcagtgagcagtacgtgcctgatgtgttttataaggacgtagacaagtttggcaacgagatcacccagctggcccggcccctgcctgtggagtatctcatcatagacatcacaacaactttccccaaggatccagtttacactttttctatttcgcaaaatccatttcctattgaaaaccgggatgtattgggtgagacacaggacttccatagcttggccacctatttgtctcagaatacctcatctgtgttcttggataccatctcagatttccacctcttgctgttcctggtcaccaatgaagttatgcctctgcaggacagcatcagcttgctgctggaggccgtgcggaccagaaatgaggagctcgcccagacatggaagaggtctgagcagtgggccaccatcgagcagctgtgcagtgagtacccccaccccctgccccggcaccccgtggctggggccggagagcagcccactctgcacagctccccactgccggtggtgccctggattccgcacccagctgcatcctggcaggtgccatcggcaatgcaacgagtagagactcggcctccctgccaggcacgtggcaggctccggtgatggagcagacatgttgtccaggccgtacgtcttaggtacacagccctgtaaattttataaacctgtacatcagagatactaatctccaggcatcctaggagcactttgaacatcattgtcttaagagaatcagaaactttatggaagcgccggaagcgtgggaccttttggtctccttgagaatttccctttagtgcttaaagctgtaaggaggagaagcctgcagcatccatgttgttgctggtggacactacggaacggaccgcaggcattgcgtgtcttccggaccctcagtcaccaggtcctgaacgattccccactcgtgagaaccttctgtcagcattgctgcagggactcctcacgcaccgtggtgcctcgtgcagcccgagtgccctgagtccctgcagctgagagcaccagagtgcccgggagctacggccctggacaaatgctagaatccttctgttaacacagccttcaaaagacacatcaaacacctttataccatttcctgttttttttttttttttttgagacggagtttggctcttgtcacccaggctggagtgtggtggcgtgatcttgcctcactgcaacctccacctcctgggttcaaacgattctcctgcctcagcctcctgagtagctgggactacaggcatgtgccaccatgcctggataatttttgtattcttagtagagccagggtttcaccatgttagccaggctggtctcgaactcctgaccttgtgatctgcttgcctctgcctcccagagtgttgggattacaggtgtgagccaccacgcccagccgaggttttcttttcacacaattctttgttttttatttttatttttgtagagacagggtctcactctattgccgaggctggagtgcagttgcacaatcgtaactcactgcagcctcaaactccaggctcaagtgatctttctgcttcagcctgctgagtaactgggaccacaggcttgcaacaccacacccagctaattcttggggctttgttgttgctttttatttgtttgttttttaaaaataattttaacttattttagattcacagggtacatgtgcaggtttgtcacctgggtatattgcctgatgctgaggttggggtatgattgatcacatcacccaggtactacacatagtacctaatagtttttcagcccgccctgctctttgtgtgtgtgtgtgtgtgtgtgtgtgtgtgtgtgtgtgtgtgtgttttgagctggagcctcaccctgtctcccaggctggagtgcagtggcgcaatcttagctcactgcaaactctgcctcctgggttgaagcgattcccctccctcggcctcccgagtagctgggattacagatgtgtaccaccacacctggcgttgccatctttatgtacgtgagtacccatgtttagctcccacttataaatgaaaacatgtagtatttggtttgctgttcctgcattagtttgcttagaataatggccttcaactgcatccatgttgctgcaaaggacatgatttcattcctttttatggctgcaaaattttttaatatttttgtatcaatgaggtctcactgtgttgcccagactggtctcaaactttggcctcaagcattccttgcacctcagcctcacaaagtcctgagattatacctgggagccactgcacccagccctttgatgcagttctcaatgacaccagtctttttttttttttttcttttttgtttcccttttagagacagggtttcgctctgttgcctaggctggagtgcagtggagtgatcatagctcactacagccttcaattcctgagctcaagcgatcctcctgcatcagctttcggagtacctaggagtataaacatgagccactacacccaactaatgtttttggttggtgttttttttttttctttaagagatagggttggccgggcccggtggctggctcacacctgtaatcccagcactttgggaggctgaggcnggtggatcncaangtcangggattgagnccatcctggccaacntggtgaaaccccatttctgttaaaactacaaaanttagctgggcatggtggcgagcgcctgtgntcccagctnctcnggnggctgaggcnggagaatcncttgacccaggaagcgtaggttgtagtgagctgagatcgtgccactgtactccagcctgggcgacagagcgagactctgtctcaaaaaaaaaaaaaagatgtggtcttgccatgttgcccaggctggtctcaaactcctaggctcaagtgatcttcctgccttggttcccaaagtgctgngattncagctgtgagccactgcacctgaccttttttttttcccccctcctttttttttgagacaggttctcgctctgtcncccnggctgaagtgcagtggcatttgaggtcagtctcaccttgncctccccnggctcaancnatcctcccgcctcagcctcctgagcngctgggactncaggcatgtgccaccatccctggctgattttttaaatttgttgtagagatgnggtctcnctatgttgcccnggctggtcttgaactcttgggcccaagcgatcctcccgcctcagtgctgagattgcagtggtnagccaccatgtccagccaactctttaataataggcagttctgactggtgtaagttctgactggtatctcactgtggttttaatttgcatctctgatgattagtgatgtngggcattttttcatgggttttttgtttgtttgttttgagacanagtcttgttctgttgcccaggctggagtgcagtagtgtgatctcggctcnctgcngcctccncctcccgggttcaagccattgtccagcctctgcctcctaagtagctggaattncaggtggctgccaccacacccagctaatttttttagttttggtggagacagggtttctccatgttggccaggctggtctcgnnctcctgacctcaagtgatccacccncctcggcttcccaaagtgctgggattataggtgtgagccaccgcgcccggccctcatgggttgttttgttttgttttgagncggaatctcnccctgtcacccaggctgcagtgcantctcatgatctccncttactgcnacctccncgtcctgggttcangtgatgctcctgcctcngcctcccgagtggctgggactgcaggcgtgcacccacgcctggctaatttttatatttttggtggagatggggtttcaccatgttggtcaggctggtctggaactcctgacctcaggtgatccacctgcctcggtctcccaaagtgctgggattacagacgtgtatacacaagacacaaagatcagctcaggatgggtcataggcctaatggtaaaaggtaaaactatgaagcaggctgggcatgatgtctcatagctataatcctaacactctaggaggccaaagctggaggacactgtagcccagaagtgtgagaccagcccacacagcatagtgaagccccgtctgtacaaaaaaacaatattaaaaaaaaaagaattagctgggcatggtgagtggtccacgcctataatcccagcttctggggaggctgaaatgggaggatcccatgagtcaggagctcgaggtcacagtgagccatgattataccactccagcctgaatgacagagcaataccctgtcttaaaaaaataaaaactgtaaaacagttattaagttgaatctcttcagggccttggggtacgcaaagattcttttaggcaggatgcaggaccttggggtagaacacagaaaaacactggcataaaaataggtaaattgataaataaatttatctaaacaaaacacttgtgctcatcacagggcactgttagaaacatgaaaaggcaccaatgggggacgcagtattagcagtacatacacacaacatgacttctatctgaaacttaaaaataactctgcctgttgttaatcaaacagaaagcagaagaagaagctgggcggagggtgaaacgtttcacaaaaggaaatgcaggtcgggcatggtggctcgcgcctgtaatcccagcactttgggaggccgaggcggtggatcatttgaggtcaggagttcgagacagccaggccagcatggtgaaaacccatctctactaaaaataaaagaaattagccaggtgtggtggcacgtgcctgtggtcctagctgcttgggaggctgaggtaggagaatcgcttgaacccgggaggcagaggttgcagcgagccgagattgcgccactgcactccagcctgggtgacagagcaanacnctacctcagaaaaaaaaaaaaaaaaaaaaaanaaaaaaaaaanntaaatnaaaaatcccntggggnnttnnntttattttataaggngaaggaccctctgcaacaaaaaggaaccagcaagcacaggctccctgttactccctgtggtgcaggaggcatttttctgagggcattaagcacttcaaagtgtgcctgtggtgggagtgctgtgtgggcaggaccagcactgggtgggatgttgggggcggggagctctcagctgcctgcccctgcccccatgcccacactctggcagtctctggtgggccagaaatgatgagtgctcatttctcttccaccctgcaggcacagttggcgggcagctcccaggtctccatgagtacggcgccgtcgggggctccacacacacggccactgcagccatgtgggcctgtcagcactgcacgttcatgaaccagccaggcacaggccactgcgagatgtgcagcctccccaggacctagggcgcctgccctctgctggctaggaccgggcccagcccagcccttcctgaagccagaagcgttgctgagtgtgttccctgtaactgccccatagtgggcagccctggaggaacaaggggctggctgtcctgggctccctgacccactgaagcttctcagcacgttcctccctggagagcgggcgccacggctggtattctgcaggctgaatgcagtctccagactggaaacgcagagcggctcctcacgcctaatcctgttgacaagtcccccgccgtgttggaaagacctctcgcctctacgtggcacctggaattggggcgcacagggaggggcggatgctgccaccacccagccttctctttattttcagtgctttttgtttggcctccctgcccccatgtttttctggctgggagctcctggttacccccttgtctgactgcttggtggcaggcaccctgcctgtgagggccactttcctcttctagtagctgttgtctggtggggacgcagtggccctggacacggctcccctctgcaggtctgcaggtcggtttgctgcctgccctcctcctctcacccgatgtccaggtgggattttaaagtctgcattggttataataacagttatcagtaattcctgcccagaagacttttatttatttttttttaagataaaaactgcacaaaaggggagtgagagagactagtttccacatccttccctcctttagtgaagcccccgaggttgtgtccagggtgatgagtgtggacgggggcaccagtcagttctcccttgaagtaaacctcagtgcctgagacttttctaccaagccacacagctgcagcaactgcagatactgcgggctgagcaggagcagtggtggcgcctgccctgaggctgccctgcgatggcctgggtgggagagctgggtcaccggtgccgatgctctggccctccccaatacgctgcttcgtcccactgcaccgcctggctgagggcgttaggggctgtgcctcttgtgagggccatttgggacctccctggggcactgcacaattgatagtgtaccaatagagggagactgggcgatctggaacagcacgtggtggggtcctgcttgtgtgctctgcgttcctctgtggcgtggccaggccggggcctggctcttacccggggagtggtgggcatctcgatgcttctttgccttaatgatggccacatctgggctgctctgcacccacgggagaggctggcccagctgcagactgcttagggacttctgtgtccatcctggggggtaagcccacgtgacccacattcttggcactatgaacagagaacatttgcctgttggcttctgaagtggtcagggccatggctgacacctccaggtccgcctggcatgggacaccaagtggaaggcccaagcagctcatctgctcttgggaccaggggccagttgggttgggtctggtcacggcagagctattgtggagggtcaggaagggtggagaggagctgggttgaagcggactgctgcggatgcaactcccagcttgcccaccgcgggctgtctgctctccctcctagcagctgtcacactgaagttttgtcctctgctgtctcctctggtcctgagatgagctgtgagcctaggtggccaaggcttcctgcattgcttccctgtgagtccaaggccttcccccaccactgggcagaggctggacagcacggacttctagagagagccgcgttgccagttcctctcccactcgctcgtccttatccaccacgctattatagtttccgttgtcctccaccagcatttcccttactctgaagttccggcattcacatcattcatgttttcttttgtcttttagctaaaggaaaagcattggcgatttgtctgattctggttttgagttactctttgttcagtaatgcactttattttattgtccaaagagagtcagagctaagcatacaggcttgggggtgagccctgctgtgagagttcaggccctgggaggctcagccacctcctcttgtgggaaggaggtctcagccccacctcgcatcttcacctgcccttggtgtggacacaccctctcatgctaccagcaccataatccagtgggggtgactgggtgcacacctgcccaggtgaacacagcggctgccagtctcctggtcccgagaggaggtggggcctggccctggctccctccaaccagctgctcctgggacacaggtgctcctgcttcggctctgtttcggctcacaggtgtgcatcactgggcttggatttgcattacattgaccccagccctgcagtggaacctaataaaagcgcctgaagcaaaaaaaaaaaaaaaaaaaaaaaaaaaaaaaaaaaaaaaaaaaaaaaaaaaaaaaaaaaaaaaaaaaaaaaaaaaaaaaagaaaacgcacaaaaaagaagaaaagggggggcggcgcgcgccgcgcaataaagaactctatctacgcccaggggcgcggcgcaacaaacctcagacggcgcgccgcccgcagctgttatgctgagagaaagaggagcggcgcgccacctaacacggaggcggctggtcatatatatacaaacggcgcaggcacggcgcgcggcgcgtagataaaaaacaacggcaaccgtcagcgccaccacaccgaccgcgccaccagacgagaaagcactacgtgtcgaaggaaacccaccccacaaccaagagggggggggagagaagcaaaaaacgaaggagggggggcacaactcacacgccccccaacgaagaaaacaagacacaacacaacgccgcgagcgagggaaagcccacaacaacagagccaccagagcaacgggagacgaagcggcggaccaaccccacccgcgcgcgccactacacccaccgcaccgagaaaacaacaaaaaacggcgcggccccaaagaaggacactcaccccacaaacacatctttacacaggg

SEQ ID NO: 530631 - DNA, 179 bp, Homo sapiens
aatgacggatggtagcatcttgggtcatacgcattgtctgagaagtgtatggatctagccttggtataaggttctgggtatgccatgtctgagaaggtaggatcttggccctgataggagggatcatgaggatctggatctgtcagaatctgaggaggtaggatctggttgccggtatg

SEQ ID NO: 530632 - DNA, 181 bp, Homo sapiens
acctgcctgccaagtgctgtgattacaggcatagccatcacacctggtcttcttcgtatgtttcttaccctactcttattatctagtgtcacatttagaaaatcatagacatgtcttaaagtcttcattgttggaaacactcttgtcattgaacgcaataccatggctatctactggtccc

SEQ ID NO: 530633 - DNA, 124 bp, Homo sapiens
ccgtcagctacgccgacgatgctcgccgcagttaccaggtgccggccggcagcctgagtgcggcgctgacccggtttgccgggttggcgtcacgtcggtgatgctggcgatcttatagccacag

SEQ ID NO: 530634 - DNA, 9243 bp, Homo sapiens
  misc_feature (3957)..(3957): n is a, c, g, or t
  misc_feature (3966)..(3966): n is a, c, g, or t
  misc_feature (3970)..(3970): n is a, c, g, or t
  misc_feature (3975)..(3975): n is a, c, g, or t
  misc_feature (3985)..(3985): n is a, c, g, or t
  misc_feature (4000)..(4000): n is a, c, g, or t
  misc_feature (4034)..(4034): n is a, c, g, or t
  misc_feature (4064)..(4064): n is a, c, g, or t
  misc_feature (4073)..(4073): n is a, c, g, or t
  misc_feature (4077)..(4077): n is a, c, g, or t
  misc_feature (4080)..(4080): n is a, c, g, or t
  misc_feature (4090)..(4090): n is a, c, g, or t
  misc_feature (4099)..(4099): n is a, c, g, or t
  misc_feature (4279)..(4279): n is a, c, g, or t
  misc_feature (4284)..(4284): n is a, c, g, or t
  misc_feature (4359)..(4359): n is a, c, g, or t
  misc_feature (4363)..(4363): n is a, c, g, or t
  misc_feature (4403)..(4403): n is a, c, g, or t
  misc_feature (4411)..(4411): n is a, c, g, or t
  misc_feature (4419)..(4419): n is a, c, g, or t
  misc_feature (4421)..(4421): n is a, c, g, or t
  misc_feature (4447)..(4447): n is a, c, g, or t
  misc_feature (4457)..(4457): n is a, c, g, or t
  misc_feature (4509)..(4509): n is a, c, g, or t
  misc_feature (4516)..(4516): n is a, c, g, or t
  misc_feature (4528)..(4528): n is a, c, g, or t
  misc_feature (4591)..(4591): n is a, c, g, or t
  misc_feature (4700)..(4700): n is a, c, g, or t
  misc_feature (4743)..(4743): n is a, c, g, or t
  misc_feature (4793)..(4793): n is a, c, g, or t
  misc_feature (4798)..(4798): n is a, c, g, or t
  misc_feature (4805)..(4805): n is a, c, g, or t
  misc_feature (4858)..(4858): n is a, c, g, or t
  misc_feature (4940)..(4941): n is a, c, g, or t
  misc_feature (4966)..(4966): n is a, c, g, or t
  misc_feature (5047)..(5047): n is a, c, g, or t
  misc_feature (5057)..(5057): n is a, c, g, or t
  misc_feature (5082)..(5082): n is a, c, g, or t
  misc_feature (5096)..(5096): n is a, c, g, or t
  misc_feature (5105)..(5105): n is a, c, g, or t
  misc_feature (5112)..(5112): n is a, c, g, or t
  misc_feature (5126)..(5126): n is a, c, g, or t
  misc_feature (5143)..(5143): n is a, c, g, or t
agcggattgtgcgaggcaccgggacgtcggcggctggcggagccgggctgggctgaagctggagcggcggtggcggcggcgtagggaggccggggccggggctgaggccgcggccgggtctgcgaggcccttggggcggcaggcggcggcggcccggggctcgagcccggaggcaggagcagccgccatggccgagagcatcataattcgtgtccagtccccggatggagtgaagcggatcacagcaacaaagagagaaacagcagcaacatttttgaaaaaggttgcaaaggagtttggcttccaaaataatggcttctcggtttacatcaatagaaacaagaccggagagataacagcctcctccaacaaatccctcaacttgctaaaaatcaagcatggcgatttgttgttcctgtttccctcgagccttgctgggccctcatctgaaatggagacgtcagttccaccgggcttcaaagtctttggcgctcccaacgtggtggaggatgagattgatcagtacctcagcaaacaggacgggaagatttacagaagccgagacccacagctatgccgccacggccctttggggaaatgcgtgcactgcgtccctctagagggggaagtttgttgccctggagaacatcagctgcaagattaagtcagggtgcgaggggcacctcccgtggccgaatggcatctgtactaagtgccagccgagcgccatcacgctgaacagacagaagtacaggcatgtggacaatatcatgtttgagaatcacaccgtcgctgaccgctttcttgacttctggagaaagacagggaaccagcattttgggtacttatacggacggtacacggagcacaaagacattccccttggcatcagggctgaagtggctgcgatttatgagccacctcagattggtacacagaacagcttggagcttcttgaggatccaaaagctgaagtggtcgatgaaattgctgccaaacttggcctgcggaaggttggctggatatttacagacctcgtctcagaagatacccgaaagggtaccgtccgctacagtcgaaataaggacacctatttcctaagttcagaagagtgcatcactgcaggagacttccagaacaagcatcccaacatgtgccggctctctccagacggacattttggatccaagtttgttactgcagtggctacaggtggtcctgacaaccaagtccactttgaagggtaccaggtgtccaatcagtgtatggcactggtccgtgatgagtgtttgctgccatgcaaggacgccccggagcttggctacgccaaggagtctagcagtgagcagtacgtgcctgatgtgttttataaggacgtagacaagtttggcaacgagatcacccagctggcccggcccctgcctgtggagtatctcatcatagacatcacaacaactttccccaaggatccagtttacactttttctatttcgcaaaatccatttcctattgaaaaccgggatgtattgggtgagacacaggacttccatagcttggccacctatttgtctcagaatacctcatctgtgttcttggataccatctcagatttccacctcttgctgttcctggtcaccaatgaagttatgcctctgcaggacagcatcagcttgctgctggaggccgtgcggaccagaaatgaggagctcgcccagacatggaagaggtctgagcagtgggccaccatcgagcagctgtgcagtgagtacccccaccccctgccccggcaccccgtggctggggccggagagcagcccactctgcacagctccccactgccggtggtgccctggattccgcacccagctgcatcctggcaggtgccatcggcaatgcaacgagtagagactcggcctccctgccaggcacgtggcaggctccggtgatggagcagacatgttgtccaggccgtacgtcttaggtacacagccctgtaaattttataaacctgtacatcagagatactaatctccaggcatcctaggagcactttgaacatcattgtcttaagagaatcagaaactttatggaagcgccggaagcgtgggaccttttggtctccttgagaatttccctttagtgcttaaagctgtaaggaggagaagcctgcagcatccatgttgttgctggtggacactacggaacggaccgcaggcattgcgtgtcttccggaccctcagtcaccaggtcctgaacgattccccactcgtgagaaccttctgtcagcattgctgcagggactcctcacgcaccgtggtgcctcgtgcagcccgagtgccctgagtccctgcagctgagagcaccagagtgcccgggagctacggccctggacaaatgctagaatccttctgttaacacagccttcaaaagacacatcaaacacctttataccatttcctgttttttttttttttttttgagacggagtttggctcttgtcacccaggctggagtgtggtggcgtgatcttgcctcactgcaacctccacctcctgggttcaaacgattctcctgcctcagcctcctgagtagctgggactacaggcatgtgccaccatgcctggataatttttgtattcttagtagagccagggtttcaccatgttagccaggctggtctcgaactcctgaccttgtgatctgcttgcctctgcctcccagagtgttgggattacaggtgtgagccaccacgcccagccgaggttttcttttcacacaattctttgttttttatttttatttttgtagagacagggtctcactctattgccgaggctggagtgcagttgcacaatcgtaactcactgcagcctcaaactccaggctcaagtgatctttctgcttcagcctgctgagtaactgggaccacaggcttgcaacaccacacccagctaattcttggggctttgttgttgctttttatttgtttgttttttaaaaataattttaacttattttagattcacagggtacatgtgcaggtttgtcacctgggtatattgcctgatgctgaggttggggtatgattgatcacatcacccaggtactacacatagtacctaatagtttttcagcccgccctgctctttgtgtgtgtgtgtgtgtgtgtgtgtgtgtgtgtgtgtgtgtgtgttttgagctggagcctcaccctgtctcccaggctggagtgcagtggcgcaatcttagctcactgcaaactctgcctcctgggttgaagcgattcccctccctcggcctcccgagtagctgggattacagatgtgtaccaccacacctggcgttgccatctttatgtacgtgagtacccatgtttagctcccacttataaatgaaaacatgtagtatttggtttgctgttcctgcattagtttgcttagaataatggccttcaactgcatccatgttgctgcaaaggacatgatttcattcctttttatggctgcaaaattttttaatatttttgtatcaatgaggtctcactgtgttgcccagactggtctcaaactttggcctcaagcattccttgcacctcagcctcacaaagtcctgagattatacctgggagccactgcacccagccctttgatgcagttctcaatgacaccagtctttttttttttttttcttttttgtttcccttttagagacagggtttcgctctgttgcctaggctggagtgcagtggagtgatcatagctcactacagccttcaattcctgagctcaagcgatcctcctgcatcagctttcggagtacctaggagtataaacatgagccactacacccaactaatgtttttggttggtgttttttttttttctttaagagatagggttggccgggcccggtggctggctcacacctgtaatcccagcactttgggaggctgaggcnggtggatcncaangtcangggattgagnccatcctggccaacntggtgaaaccccatttctgttaaaactacaaaanttagctgggcatggtggcgagcgcctgtgntcccagctnctcnggnggctgaggcnggagaatcncttgacccaggaagcgtaggttgtagtgagctgagatcgtgccactgtactccagcctgggcgacagagcgagactctgtctcaaaaaaaaaaaaaagatgtggtcttgccatgttgcccaggctggtctcaaactcctaggctcaagtgatcttcctgccttggttcccaaagtgctgngattncagctgtgagccactgcacctgaccttttttttttcccccctcctttttttttgagacaggttctcgctctgtcncccnggctgaagtgcagtggcatttgaggtcagtctcaccttgncctccccnggctcaancnatcctcccgcctcagcctcctgagcngctgggactncaggcatgtgccaccatccctggctgattttttaaatttgttgtagagatgnggtctcnctatgttgcccnggctggtcttgaactcttgggcccaagcgatcctcccgcctcagtgctgagattgcagtggtnagccaccatgtccagccaactctttaataataggcagttctgactggtgtaagttctgactggtatctcactgtggttttaatttgcatctctgatgattagtgatgtngggcattttttcatgggttttttgtttgtttgttttgagacanagtcttgttctgttgcccaggctggagtgcagtagtgtgatctcggctcnctgcngcctccncctcccgggttcaagccattgtccagcctctgcctcctaagtagctggaattncaggtggctgccaccacacccagctaatttttttagttttggtggagacagggtttctccatgttggccaggctggtctcgnnctcctgacctcaagtgatccacccncctcggcttcccaaagtgctgggattataggtgtgagccaccgcgcccggccctcatgggttgttttgttttgttttgagncggaatctcnccctgtcacccaggctgcagtgcantctcatgatctccncttactgcnacctccncgtcctgggttcangtgatgctcctgcctcngcctcccgagtggctgggactgcaggcgtgcacccacgcctggctaatttttatatttttggtggagatggggtttcaccatgttggtcaggctggtctggaactcctgacctcaggtgatccacctgcctcggtctcccaaagtgctgggattacagacgtgtatacacaagacacaaagatcagctcaggatgggtcataggcctaatggtaaaaggtaaaactatgaagcaggctgggcatgatgtctcatagctataatcctaacactctaggaggccaaagctggaggacactgtagcccagaagtgtgagaccagcccacacagcatagtgaagccccgtctgtacaaaaaaacaatattaaaaaaaaaagaattagctgggcatggtgagtggtccacgcctataatcccagcttctggggaggctgaaatgggaggatcccatgagtcaggagctcgaggtcacagtgagccatgattataccactccagcctgaatgacagagcaataccctgtcttaaaaaaataaaaactgtaaaacagttattaagttgaatctcttcagggccttggggtacgcaaagattcttttaggcaggatgcaggaccttggggtagaacacagaaaaacactggcataaaaataggtaaattgataaataaatttatctaaacaaaacacttgtgctcatcacagggcactgttagaaacatgaaaaggcaccaatgggggacgcagtattagcagtacatacacacaacatgacttctatctgaaacttaaaaataactctgcctgttgttaatcaaacagaaagcagaagaagaagctgggcggagggtgaaacgtttcacaaaaggaaatgcaggtcgggcatggtggctcgcgcctgtaatcccagcactttgggaggccgaggcggtggatcatttgaggtcaggagttcgagacagccaggccagcatggtgaaaacccatctctactaaaaataaaagaaattagccaggtgtggtggcacgtgcctgtggtcctagctgcttgggaggctgaggtaggagaatcgcttgaacccgggaggcagaggttgcagcgagccgagattgcgccactgcactccagcctcggcaacaacaaaaaaaaggagatgcaggaacagtcactatcattagtcatcagggaaatgcaaattaaaacatgagaagccgttacacattcatcagtgtggctcaaatgaaaaaaacgcgacaatgtcaagtgtgagtgaagatgtgaagcagctgggactctcgtaccttgcgagtgggaggcaaaaccgtgccaccctcgcgagaactgtgtctcagggtctcagaaagttcagcacacaattcattaccctgtgggccggcagattcattcctaggtaggttttttgttgttgttgtttgtttgtttgtttgttttgagatctcggcttactgcaacctcggttcactgcaacctccgcctcccgggttcacgcctttctccttcctcagccttcctagtggctgggattacaggtgcgcaccaccacccccaggcacagttggcgggcagctcccaggtctccatgagtacggcgccgtcgggggctccacacacacggccactgcagccatgtgggcctgtcagcactgcacgttcatgaaccagccaggcacaggccactgcgagatgtgcagcctccccaggacctagggcgcctgccctctgctggctaggaccgggcccagcccagcccttcctgaagccagaagcgttgctgagtgtgttccctgtaactgccccatagtgggcagccctggaggaacaaggggctggctgtcctgggctccctgacccactgaagcttctcagcacgttcctccctggagagcgggcgccacggctggtattctgcaggctgaatgcagtctccagactggaaacgcagagcggctcctcacgcctaatcctgttgacaagtcccccgccgtgttggaaagacctctcgcctctacgtggcacctggaattggggcgcacagggaggggcggatgctgccaccacccagccttctctttattttcagtgctttttgtttggcctccctgcccccatgtttttctggctgggagctcctggttacccccttgtctgactgcttggtggcaggcaccctgcctgtgagggccactttcctcttctagtagctgttgtctggtggggacgcagtggccctggacacggctcccctctgcaggtctgcaggtcggtttgctgcctgccctcctcctctcacccgatgtccaggtgggattttaaagtctgcattggttataataacagttatcagtaattcctgcccagaagacttttatttatttttttttaagataaaaactgcacaaaaggggagtgagagagactagtttccacatccttccctcctttagtgaagcccccgaggttgtgtccagggtgatgagtgtggacgggggcaccagtcagttctcccttgaagtaaacctcagtgcctgagacttttctaccaagccacacagctgcagcaactgcagatactgcgggctgagcaggagcagtggtggcgcctgccctgaggctgccctgcgatggcctgggtgggagagctgggtcaccggtgccgatgctctggccctccccaatacgctgcttcgtcccactgcaccgcctggctgagggcgttaggggctgtgcctcttgtgagggccatttgggacctccctggggcactgcacaattgatagtgtaccaatagagggagactgggcgatctggaacagcacgtggtggggtcctgcttgtgtgctctgcgttcctctgtggcgtggccaggccggggcctggctcttacccggggagtggtgggcatctcgatgcttctttgccttaatgatggccacatctgggctgctctgcacccacgggagaggctggcccagctgcagactgcttagggacttctgtgtccatcctggggggtaagcccacgtgacccacattcttggcactatgaacagagaacatttgcctgttggcttctgaagtggtcagggccatggctgacacctccaggtccgcctggcatgggacaccaagtggaaggcccaagcagctcatctgctcttgggaccaggggccagttgggttgggtctggtcacggcagagctattgtggagggtcaggaagggtggagaggagctgggttgaagcggactgctgcggatgcaactcccagcttgcccaccgcgggctgtctgctctccctcctagcagctgtcacactgaagttttgtcctctgctgtctcctctggtcctgagatgagctgtgagcctaggtggccaaggcttcctgcattgcttccctgtgagtccaaggccttcccccaccactgggcagaggctggacagcacggacttctagagagagccgcgttgccagttcctctcccactcgctcgtccttatccaccacgctattatagtttccgttgtcctccaccagcatttcccttactctgaagttccggcattcacatcattcatgttttcttttgtcttttagctaaaggaaaagcattggcgatttgtctgattctggttttgagttactctttgttcagtaatgcactttattttattgtccaaagagagtcagagctaagcatacaggcttgggggtgagccctgctgtgagagttcaggccctgggaggctcagccacctcctcttgtgggaaggaggtctcagccccacctcgcatcttcacctgcccttggtgtggacacaccctctcatgctaccagcaccataatccagtgggggtgactgggtgcacacctgcccaggtgaacacagcggctgccagtctcctggtcccgagaggaggtggggcctggccctggctccctccaaccagctgctcctgggacacaggtgctcctgcttcggctctgtttcggctcacaggtgtgcatcactgggcttggatttgcattacattgaccccagccctgcagtggaacctaataaaagcgcctgaagcaa

SEQ ID NO: 530635 - DNA, 305 bp, Homo sapiens
tccccctgaaagggaaaaaggggatagtccccggggcccccccccccaaaatttttaaaaaagccaaaaagggaaaaaagggggcggggggcccgcccccgaacaggggggccccgaagctccccccgcaaaaaaggggggggtttggccctttggggattttaggccccaaaggagatcctttaaattttggttttttttggggaaagggttaagaaatttcccctaaatcttgttttgtttggtgggatgaaaagttacctttttttcccaaaaaaaaggggggatttttcctgtttggttta

SEQ ID NO: 530636 - DNA, 269 bp, Homo sapiens
ccctgtttctgacttgctggctgactttggctaccgcccgaaccatattaagtacgttactcatacttgaatgtaacacaatttgccataaaagaagtaatttgataagtgagcaggaggatactgatacattagctaattttgggcggaagtgaatattggcgccgtgcctgtagctaaacgagatcatgtgatataagtgctgtagggcgcgcagatgcagtgatatttaaacggacggaccaccagaccccgattatagcgcatcg

SEQ ID NO: 530637 - DNA, 427 bp, Homo sapiens
gcagccagtgctgtggtcaatcacaaggcctagggttagggtacaggttagggtaacgagccaggttatggtcaacatgagacttaggattcagggtttgatgttggagttagggttagtgctagggtttaggctagtggttagtgttagggttaggcttagggttagggttggaattaggggttcagggtacgggtccatatgcagtgcatggtaagggttagctgtcagggcccacatgaggcattgtaaattaggtttagggctcgggatagggttagggtagtaagtaaggagtaatggtaaaggttaaggtttgggttgaagttagggttagggttagagttaacggtaaaggttatggtagtaggagtaagtataactggttaggggtaaggtataggagtagagatagggttaggattag

SEQ ID NO: 530638 - DNA, 197 bp, Homo sapiens
aaggcagagaaaaataataaagatacagaacacatgaaggaaggtaatcagaaggaaaggagtctagatatgtcttaactatgtaagatagataaagactcacacttctaatcttctcaaccctgagagtgatttaacactggtcttgagacagactttattcggctatccctctatataataggtaccaccagggg

SEQ ID NO: 530639 - DNA, 430 bp, Homo sapiens
  misc_feature (21)..(21): n is a, c, g, or t
  misc_feature (40)..(40): n is a, c, g, or t
  misc_feature (56)..(56): n is a, c, g, or t
  misc_feature (79)..(79): n is a, c, g, or t
  misc_feature (108)..(108): n is a, c, g, or t
  misc_feature (421)..(422): n is a, c, g, or t
cccagaatgggcgcccttaanagctgtaaaactcaacgcnaaaggtctgcagcttnactccctgagcccagcgagaccnacgaaccccacccagaaggaagaaacttnagacgcgcccaccttaagagctgtaacaccgcgagggtccgcggcttcattcttgaagtcagcgagaccaagaacccaccaaatccggacacaactccctttctccctatccctagcccctggcaaccactaatctgctttctgtctctatggatttacctatcttgggtatttcatgcaatgaaattgttaatggaaaggagtcctgacccagagcccaagagagggttcttggatctcgtgcaaaaaagaattcagggcaagtccataaagtgaaagcaagtttatttaaaaagtaaaggaataaaagaannaatactct

SEQ ID NO: 530640 - DNA, 192 bp, Homo sapiens
ttgtatagctgttctagagtgtacctgagaggtagaggtgggaatcgtggcagcatgtgaggatgtgctgggaagtctggtcgagaggtgagaggtgggaactcggtcagagtgtgagaggtgggaactcggtcagaggtgagaggtgtggaactcgtgtcagagtgtgcccgccctggtcccaatgatcgg

SEQ ID NO: 530641 - DNA, 1233 bp, Homo sapiens
cgtttcttgttctgtattgtttctgttcatcttttctctttgttttctctctttttgttctgttgttttctttcttttttttttgttcttctctgttgtttttgtttctctttttcttgttttattattatggctcagacgggggcggcagcaggaggagcgccgttttctcgtctcattgtgagttcacctttatggcgtgaatggtgatcttcttctaaaggttcccggtattttgtttttatgcgcgcgtggggtcgtgcgggaggtggccccaccctcggggtggaagcagccccttttagtgccgccaaagcgccaccaagaaaaggggcacgacatctttgaaagaaagggagtaaaaatgggcaccccccctctctttgtccaatatgagaattggggaagccgctgcgtccccggaccccgagggaccacaagggctatcggagggttcaccaaggtccctgtgtgttgaaaaggattctttcggattgtcagaatgtagagagttgccattttagaaaagttccacctgggttccgggagatttttcacggggttaaaactgccctcgactgacttccatggccacggatcttacccgtgaccaaaatgtgtttcccatggtcccaaaaactggccagcaccatgattgaagctcacgcttgatgtcaagacatacccgatggtgtaccttgcttctgtcatgattctgtgtgtggttcttacctacgagataacctgccgaccaatccagattaccggaagacctctctatgcgtcgagcgaacaccaaccaggtcccgctcctaatcccggaagaagatgcatggcacaatcgctgagccccgagaggtcgccagtaccaatgagcattgcaatagtatatgtggtgccatattcacatctggattccaacgacagcacttggaacaagacactagaacaaggcttgcccactctatttatcctctcccctgactgtgcttcgttagaaaacacgtataaaactgctgaagaagccccacgtttgatacttgggagaaagctcactggaggcttcattggtgaacggcacgtagttcctgggaaagccacctggggacgtatgtacccgagtgcctataagttgtatacgagactgatgcgatatgaacccccccgtcgccgagaatctgtttaaagttcagacttccaatagtggccaattaaaagtgctatttgtgatgg

SEQ ID NO: 530642 - DNA, 418 bp, Homo sapiens
caaatcactaagctaaagggaaaagtcaagctgggaactgcttagggccaacctgcctcccattctattcaaagtcacccctctgctcactgagataaatgcatatctggttgccttctttggaaaggctaatcagaaactcagaagaaatgcaaccatctgtcccttatctgcctatgacctggaagccccctccccactttgagtcctcccgcctttgctttgagttgtcccgcctttccagaccgagccaatgtttatcttctatatgttgattgatgtctcatgtctccctagaatttataaaaccaaactgtgctctgatcacctttgacacatgtcttcaggacctcctgaggctgtgtcatgggcatgcatcctcaatcttggcaaaataaactttctaaattagctgaaa

SEQ ID NO: 530643 - DNA, 338 bp, Homo sapiens
ctaatggtcaccgccacgttctgtccgatcagtattattttaaaatgactaatcttggctgggtgcggtggctcacgcctgtaatcccagcactttgggaggccgaggtgggcggatcatctgaggtcgggagttggagaccagcctcaccaacatggagaaatcctgtctctactaaaaatacaaaattagccaggcctggtggcgcattcctgtaatcccagccactcaggaggctgaggcaggagagttgcttgaaccttggaggcgaaggttgcggtgagtcgagatcgtgccactgcactccagcctgggcaacaagagcaaaactcagtctc

SEQ ID NO: 530644 - DNA, 935 bp, Homo sapiens
gattttccgggagactgcagtcgaaggtcgtgaggtacttctaagtcagccatagtggcaggtgaagaaattactgaagactatccagtagaatttcacgagtgtttgtcagcgtatgagaattccattgaggctgtggatgagatgctgaagaccatgatgtctgtttctagaaatgagttgttgcacaagttgtggatccaacttgaacatgcaaatagtggattcggtttctgcaatacacattaaattcattgttgggcggtttgattgtggcaacccaaggagtgtaatcctaaggaacttccagtaaaacatggagttggaatgatgtcagaggtatattactgcagacggagtcagggacatgtagcagacaagagaaaaggcctggcaggacgtggtactgaggtgcaagcttcaagtattgcgtaaaccctggtgccctctgggagaccaaagatcgacaaatttgcattcaacagagttgccaactaatggacagcaagctacaagctaaacctgtttggtttgatgtacacctatgcaaaacagtacatttttttccccccgcgccaacgcaggtaataaaattggtgtgggagctacagtggttcatgatcttccaaaggcttgaggcattcgcactgaaaagttaggccgaataggtactgcccggagaagactgctatttgagcgagaccgggtattaccctgcggaagcgcttttatacttccacgacatcttggatgagcacgcatggttatcatgagcggcgcggagcaacccttttggacgtcaagctgtgaagtgctttgatcactcgcactaagtgaggggctcgccaagacttggagaagtcctgtggcaattaaacacaagagctaaatgtcgagttaccaataatgtggtgaagaaaaagaattgggctcat

SEQ ID NO: 530645 - DNA, 956 bp, Homo sapiens
tctgaaagttggctataatttctctatccctacccacaaccctgggaagtggagcaagaggggcatactattgggctgggaggatttgacagcatttccccagttgccctttaagttcttctatttcaaacgttaattttgcttctctttctaaaaaaaaaaaaaaaaaagaaagaaaagaaaagaaagtgattcctacccccttaaactccagaagtgtgcttgaaagctgaaaagcttcacaagaattcttcctgttaaactggggattctcgttccagaaaatggggggataaaccgggaatatctgggtttaagaaaaactttctttagaagaaggggtacctagacttacgggatgaagtggtgttaaggaagtggggcaacgtgagagtgcgtgtcagtgtgtggaacactatttaaggggccctattattaacatttatcctattaagaaagtggacaagtggttctacctccaaaaggtcttaaacattatttccaagtggcaagtgtacagaaactttccgtggaagaaccacctgtggaatgaactgttggaaaaaagtggtctgacgaggagattaaaattagacttgtggacaaaaagccctttttaatatgagaaaattatatttgtgaaatgtggccataactatgggggggctctttaaaaaaaccgcgaggtctattttaaaacccgtggttaaaaaagtgggtcaagtacggcgcaaatgtggaagggacttgaaaggtatatatgttcttaccgtgagaaagtgtccacaaatcttaccctgtttgggaagttttataaaacaaggggtgggcccctcaagaagaaactaacctgtgaaaaaactccacacgattttttcacaggagcacactgtgtgggggagaaaattaaagggattcaggaaaatgagagggggacaaaccgcggggtaagatca

SEQ ID NO: 530646 - DNA, 664 bp, Homo sapiens
cacgaggtttttctctcactcctaacaaccttctgttcactgcctctcaatttttttgcataattgttaaaacttaatgtttaggtctatagtgaaatcataaaaaataaaggctcatcaaatcaactcataaatatctgagtagatttttcactgggctttgtaatcttatagctccatcctcacatttctagtggctctctcgacctttcctttcattacatcccaaactgtaatcatttccagcagcatgtcccgtgttctgtgttactgtgtcctgttaattaactctgccatgtgagtcattcaagctggaaacattgcaattacatatgatctctccctttcccttcacatttaatccacacttttaccaactcctgccaactcttctactacaccatttcccttccctttatctgtctaatcccaccaccatttttttagtcagtctctcattggtcattattgaggtctttttaacggactttccatcacgagtatcttccctctgctttaacagcctgtctccctgatataatggctctttggttctaagaaagaagctattatatcttgtcattcagaatacccatggggaaagactcatcttcttccaatctaatttctaactaaacttcatactttttccaaatgaatttgt

SEQ ID NO: 530647 - DNA, 573 bp, Homo sapiens
gagctcttctgatacagtctgagccgaacatttgtcgtagtttgtagcaaggtctaatctcactatcgagtgaccacagtccggaccaggctggagtcagtcatgtgtccgagcacctttcatagccatagtagaggcttcttcagacaatcgaaggcagggcggtactgggcgccactgcaacaatggtcttcaaaccactttctacatatccggaaaactcacggctcacactgcttaacaagtctcgattagccatcctagaataagcctccatggtagctctcagctgaggaaagcttcttgtagcaaggatcatgttaaagcaagattcatcggtccctagtctcccctcaccagcttgatagagacgctgagcatcttcctgagccatttggtggtttatactctggttctcatcacgatttccctggcacatggacacaagtaaacgttcaaaatgtcctgatgtatctgacctaatgtccttttcaaggtctcgtccaaattctgactgataacatctgacaatttctcggatttcctgatttgttcttgtggtccgagcggacc

SEQ ID NO: 530648 - DNA, 259 bp, Homo sapiens
  misc_feature (24)..(24): n is a, c, g, or t
  misc_feature (38)..(38): n is a, c, g, or t
aggctgaggtgggcagatcttctngaggtcgggagttncaagaacagggccggccaacatgggtgaaacccccccactcactaaaaatacaaaaattggctgggtgtggtggcatgcgcctgtagtcctggctacttgggagtctgaggcaggagaatcacttgaaccagaaaggcggatgtgtagtgagccgagatcgtgccactgcatttcagcctgggtgacacagcaagactccatctaaaaaaaataataaatt

SEQ ID NO: 530649 - DNA, 449 bp, Homo sapiens
cctgcaaggtcgattcttgaggtatcccgtttctgcttctgcctagagtgatagatgcaagaccctatctcatacaatgatcgaaaccgaaagcagaacaaaaactctctctggaaaggttttctctctgaaagcagttcccctgctccagaagatgcttatggcccatcgtatcttcttccaactggtcgagacagttaaatacttcaaaatgccccaagaggtcccaaaatttagtcaaggcaagtatcaatcaggctacatactttctaggtgtgacaaatatcagagttttgagaaagacattaaaatcatcatggaatccttggaggcctgagatactaaagcaccaatgcagacagtcttataggaagtctggaaccaatacttcttccgtcagtaacataggcctttctagactttggtctagaagaagatgatttttttgt

SEQ ID NO: 530650 - DNA, 110 bp, Homo sapiens
cactctctcagtgtggatcccacccctctttcatctctgtaccccacaaataacacagacaccccatcctatcgtcgacgcggccgcgaatttagtagtagtagtcgacc

SEQ ID NO: 530651 - DNA, 563 bp, Homo sapiens
taggctagtcgagccgcgggtaatcggacgagggagtggggcacagcgaggcggctgggggaacgctggctctgaaactagctctgggaccggggctctgctggcggcccctaggcgtggccccggtctcccagtgccccagaagggtattcactggggattcgtgagctatggctactccagtttcccacgacacgagtgttccctgttctagcaggctgctggaggactggagctgctactactactcctgggctgtggcaggtgaggagaatcctggcggacagaaggaaaaaacttgcgaggttggtaggagagaaagggtaaagagtctgagaaagagttggctctagtgaagagggtgaaaccactgtttaataaaagctttgagagcactgtgggccagggttcagacacgatacatctacatcttcagggtgtgccgggagagctggctaaccgacactatcgtggggcaggccgtggtgcgaaatcaacaataagtaatgggaaggagacagtggtagggagactccaacgagactcacatcttcgacggaagt

SEQ ID NO: 530652 - DNA, 236 bp, Homo sapiens
  misc_feature (154)..(154): n is a, c, g, or t
  misc_feature (190)..(190): n is a, c, g, or t
  misc_feature (203)..(203): n is a, c, g, or t
  misc_feature (226)..(226): n is a, c, g, or t
gaaatttgacgcacgaagaaatggatgtcacctcacagttcacccctgacatctgtgatagtgtatgtaatcactgacatgttctcattcaaactatgttataagagcaaggagaaagaagtaagaaaaatttcctatcatgtagaaaattctngggaacctcaaataactcactttatatttagcaggngtttatgcttcanagatcatctttccctgcaatagncattttatca

SEQ ID NO: 530653 - DNA, 472 bp, Homo sapiens
cagcagatatctgtatctttgtcacttgagagttcatgggaaatttagagacccaagagcctgaattccggtagttcagaagtgctcataagcaaggaaaggagagtaagatgatttggacaccaggaaaaatgaacacagagagtggcaggaaatggaaatattttcttcaagtcataagaaatggtgcctggcaatgtcaagaagcagcaattccacttaacttcacggtactgcaagctactgaaaatggtgtggaactggtataaactggtataatctacttggtgcgaaggcaatagtatatgcaacttaaatcaagaaaccaaatgctcagggaaatgcaacgtacaaagaagcaatggcaaatatatatgtgttgttctacttcatcaatttttcttagctgctagagcatttgaaattattctgttcacactaaatattcttaaaattatgtaaactctttaaa

SEQ ID NO: 530654 - DNA, 304 bp, Homo sapiens
  misc_feature (64)..(64): n is a, c, g, or t
  misc_feature (177)..(177): n is a, c, g, or t
  misc_feature (207)..(207): n is a, c, g, or t
  misc_feature (219)..(219): n is a, c, g, or t
  misc_feature (245)..(245): n is a, c, g, or t
  misc_feature (278)..(278): n is a, c, g, or t
  misc_feature (292)..(292): n is a, c, g, or t
cttgtctattgtctatgtctgtctatgtctatgtctatgtctatgtctatgtctatgtctatgntctagtctatgtctatgtctctagctctagctctagctctatctctacctctatctcctgttagttctgtccctctaagagaaccctgactaatacaggatctgaatttaggnatcgataacaaaaacaatttttgggaaacncataaatatgtngtaaagtaaataaaatagtcttaaanaaccaagggattaaagaagaaaaccaaaggagnaatttagaaaatanctttgagatgaa

SEQ ID NO: 530655 - DNA, 921 bp, Homo sapiens
  misc_feature (54)..(54): n is a, c, g, or t
  misc_feature (65)..(65): n is a, c, g, or t
  misc_feature (78)..(78): n is a, c, g, or t
  misc_feature (106)..(106): n is a, c, g, or t
  misc_feature (152)..(152): n is a, c, g, or t
  misc_feature (163)..(163): n is a, c, g, or t
  misc_feature (167)..(167): n is a, c, g, or t
  misc_feature (172)..(172): n is a, c, g, or t
  misc_feature (174)..(174): n is a, c, g, or t
  misc_feature (183)..(183): n is a, c, g, or t
  misc_feature (194)..(194): n is a, c, g, or t
  misc_feature (200)..(200): n is a, c, g, or t
  misc_feature (241)..(241): n is a, c, g, or t
  misc_feature (325)..(325): n is a, c, g, or t
  misc_feature (395)..(395): n is a, c, g, or t
  misc_feature (428)..(428): n is a, c, g, or t
  misc_feature (449)..(449): n is a, c, g, or t
  misc_feature (485)..(485): n is a, c, g, or t
  misc_feature (529)..(529): n is a, c, g, or t
  misc_feature (560)..(560): n is a, c, g, or t
  misc_feature (617)..(617): n is a, c, g, or t
  misc_feature (738)..(738): n is a, c, g, or t
  misc_feature (745)..(745): n is a, c, g, or t
  misc_feature (767)..(767): n is a, c, g, or t
  misc_feature (770)..(770): n is a, c, g, or t
  misc_feature (842)..(842): n is a, c, g, or t
  misc_feature (853)..(853): n is a, c, g, or t
  misc_feature (905)..(905): n is a, c, g, or t
ttatattttatttctaacaaaacgccaggcagacggagtaaaaaagaatccacngcacgaaaggnaaacaaagcagancctcagaaactcacctggcaaggatgtncccctccccagattggcccagtttcaccagcaactggtctaagcanagcctaatgcntatncactnanaccccccanccctccacatnctcgtnattaagaacaggaacttctcggctgattgtgtccgtgtgtntaagggaggggcacgctggaacctgggaacctactgggcacctctaaagcagaagagaaaaacttgagaatgtaaaagtagaanagtacccgctcccacccgaagtgaagagacgcgggaaattaaccagcagcacgcgggggatgaagtaacnaaggcaactatcctccccactgcccagggcganttcacgccccaggacctcctnccaggccccacacccacgaaaggagaaaggaagcancacacgcctgctccatgacgcaacgatgaccgcttatacaagtntgttagcggagggggaaggggagttcctggnattctccgaggttggaaacgcaaaaccaactcttgaaaaaccttgaaagggccagcncagcccacagtacaaaatgaagttcgaccctgaggagatctttaaaaacaaacaaacaaacaaaacaaaaaacacaacacccaagcctcccttctcccagttcagaaggagagcgaaaggntcacgtnccagttcactaagacagcaccngtnggcgcaggtctctgcggaaggcgcccgcgccccggctcagactcctcggtgccgtccctgcacactgaaggngatggctcccnggggacagagtcctcttcgggcctcttagcagcccgggcggcggcttctctncacggttttcgcgggc

SEQ ID NO: 530656 - DNA, 864 bp, Homo sapiens
tgaaaatgtacaaaatatctatcactactgataggaggttaatatttctgtgtaaaaatgaaaatgggttggttttagtatttagtgtaaatgtacacatcccagcaaatgttattggcaattatgtggtggatgcttggtgatataaatgtactttttcaatgtatacttacactttaaaaatgcctgtattggtgcttaacaataaatgatatgaaacctccttgtgtcggtcaagtgggatatgtgggtattaaaaggatacataatttcttagcaatgaataactcacgatacatataccacaaatatataagcttccccatgaaatatggagttttaaaacacgggcatgttattcccccccttgcagtatagcggtagatgggaggatcttttcccatttatggtatgggctcttacagcaacaagtaatcctgatatctacatttttttacctatctgttggataaaaaacctgcatgtgtgtccacttgaaacacaaaaaaaacaacaacagacaaacacaaacaaaacgtgggcgcggcgaagcaacaaagatacaccagcgggaggcgccccacgaagacgccctacgacccggaagttagtagacaacaacgggggtgccccacaatagactgaggctgataacaaaacaaggagccgagcgcagcgacgaatacaacacgctagaggtggaaaaaagctgctcagtgagacacgcttggtcgacaagacctacctagcggcggcgcaaagacaagtgggaacaacgaccccccgaaagttatacagcatcgggcacgaaaacaaacacagatctaggtgaaccaacacagacaagctggggagaaaaaacca

SEQ ID NO: 530657 - DNA, 196 bp, Homo sapiens
ctaatggtatcaaagcgggtttcaatgcaaatggacgaacaaaatacatgatgcaaccatacaaagtatggccggcgtcaggcctgccattccctcaaaccatattgtggggcacaggcatgctctttggcgggatcacccgtggcctcttgcaaggctcctggcctgattctataggcataggagtgcatttgag

SEQ ID NO: 530658 - DNA, 262 bp, Homo sapiens
cacaatacatggcattgattacgtccccctgctgggcgcaagatgatcggaaaatgacaataccatttgtgggcctgcatgggtcactgtgtccatgaagccagcccagtcttggaacagaccaacagagggagaatatagaatcgaccagtattgactagcaaatctctcccaagagaatctctctatccttttacagcactcctaggcattcaagccttcgtatatgatgggagtagttcactccaatggctgggggtca

SEQ ID NO: 530659 - DNA, 262 bp, Homo sapiens
gtctggctgcagccgttggcctgggtcccggccgcggggcgtgccgtgcgtgccatgcggcggccgtcggtggtgtggtacgggccggccgcttctccggtcgtcctcggtcccggtcctggggggccccctgtggtgcccgggccgctggcggttgcgtggcgggcaccggaaactcctgaccaattgacgtctggggagacacggccgccggggtacgggggtgctgacgccggtgcacggggactggctggtccccctg

SEQ ID NO: 530660 - DNA, 140 bp, Homo sapiens
gcgggaaaccgctttcacccttaatacggattccctggccggcggtttacagggagaaaccccttttaccccttatacggatttcggggccggccttttaaagggggaaaccccctttaccccccttaccgcttttgctt

SEQ ID NO: 530661 - DNA, 500 bp, Homo sapiens
caaccttgcttcctataccgggaaatgttgcagcctctgccctgggcccagtcatgctggaagtgagcgtgattgtaacctcaggtagtatcagtcaaaagaaggaaaagaaatggtgggaggtctaagagaagctcaggagacagcatctgtcatatcatattccccagaccatttgtacccctgaccctctagggtacatccagtcagagagcacaaatagtcagtgcaaaaggctcagatatccccatctcctgccaaggtgaacagagtattcatgggcataggtagaagtagggccataggaaaactgcacagttgtagcgtgtcatgcatttaacaactctccccttaatgtagatacgctgggtcttttataaccgcatcctaagaatcggtcacctgcttcaacatcctcttacaacgaaattgcgacttgaccttgttcaaatacctcaatgccacttgagagtctaatgtgaacataattgactctatgg

SEQ ID NO: 530662 - DNA, 377 bp, Homo sapiens
tggtctcccttttgtgacttcagtagcctctggttatctctttctgctaaggcatctgactgtgtttgcgtccctgttagcataatgtgaggtgtgtggattagaccatcccacccccgtgttctactgtgacccctgttcccgtgcttacctgtgtttcctccctagtcatctttcctgttccagagaggtggggctggatgtctccatctctgtctcaactttatgtgcactgagctgcaacttcttacttccctactgaaaatcagactctgatatatcatttgttttctccaatatttgctatgataggttgatggattaattcaatgattcaatacctggaatttgagagagcaaataaagacctgagcaag

SEQ ID NO: 530663 - DNA, 800 bp, Homo sapiens
gtgcttctaaaaatctgagctcaaagcaacgaaaaccaaaacaggaaagctagtatccattatgccatattacgatgaatcataaatggtcttctattaaagtatggcattcacgaaatatgatggaggccaggaagctatttgaaggcttagcatataacactattatgcatcctgtataaatacagaggaatggctgtagaaagtactttgaacaaatatctaattctcttactgtctaaggagaactctttctacttggtcgcaataatctgaaagattctagaaggtcaaaatatgtcacaggaaaatgatcatagacctaaaaatagttgttaaaggaaaccagctacacggggcaaccaaccatcttgctgtttgaagaaaacagttccaaaaaggctaaatcattggcataaaggaaacaaaaacccaaagtatgcgttgtaattcttgagccagtattactgacacagggataagcagttatcaaactctaacataggttaatgcacatgtctcttgcttagtgctaccaagtctaaaataatcctttgtcacaatgctttcagaaatgccagttttaattaccatccagatgtatatgagagatactgcttttatggaatgcaatccggaatcaatacttttcatctgaaatcttgagggctctcattaaatggcgagtccttacattcaaaatgaatccgctaccaacaattgacagtttcgtgaaacttcaatgaggaacatagcagtccggaatattaaattcaaaggggggacacaacatccaaaat

SEQ ID NO: 530664 - DNA, 141 bp, Homo sapiens
ggaggggcacagtggacccagagtgaatctaggacccttctagacatagctgctcggggtcctctcctcctagagtgaaatctagcacacctgcccagacagagcccatctgaggtcgatcactctccacaagcccaagag

SEQ ID NO: 530665 - DNA, 198 bp, Homo sapiens
caacgattggtcctcagctatggccctgtgctgagcactgggcacatcgcttgagagcaaaattgccacatcccggtccttaaggagcttccaggtttagtgggaagacagaactctgtcttgtgcatggactttgagctctcttccagcaccgcaagggcgtgtttattaaaagagctggtgctgttggatctcggc

SEQ ID NO: 530666 - DNA, 151 bp, Homo sapiens
tccgggggatcagacattcatttgactatggccctggctgagaagcgaaattaatggtaaatctatgtaacccttgctgtgcagaactaaagaggaagaaggaattaaagatgaactttcttgacttaatatatacaatctatgtaacagt

SEQ ID NO: 530667 - DNA, 763 bp, Homo sapiens
  misc_feature (62)..(62): n is a, c, g, or t
  misc_feature (70)..(70): n is a, c, g, or t
  misc_feature (75)..(75): n is a, c, g, or t
  misc_feature (79)..(79): n is a, c, g, or t
  misc_feature (83)..(83): n is a, c, g, or t
  misc_feature (86)..(86): n is a, c, g, or t
  misc_feature (88)..(88): n is a, c, g, or t
  misc_feature (98)..(98): n is a, c, g, or t
  misc_feature (104)..(104): n is a, c, g, or t
  misc_feature (115)..(115): n is a, c, g, or t
  misc_feature (122)..(122): n is a, c, g, or t
  misc_feature (134)..(134): n is a, c, g, or t
  misc_feature (139)..(139): n is a, c, g, or t
  misc_feature (148)..(149): n is a, c, g, or t
  misc_feature (162)..(162): n is a, c, g, or t
  misc_feature (169)..(170): n is a, c, g, or t
  misc_feature (174)..(174): n is a, c, g, or t
  misc_feature (615)..(615): n is a, c, g, or t
tcctcaatagtaatccagcttaaatggtagagcattaattcgccttacaaacaaattacagncactacgnttaancagnaagnacngnacgggtttgnggtttnctttgggcaancttggancaaatcagagangaaancataactanncatcatcatgtanaaaaagnnaagnaaatgaacctcaagtatctacctatgtgtcaagtgattcatcctgccagtaaaactaaaatctacacttacagcggagttttaaacatccttagtgcaagaaacataaccaattaatacagatcaacactaattacgttgattagtggaaaattttcctatacagaggtagaactccagggcacaggctaaaacagttatctcagtagttctaaacaagactggaggtcgggtttaagtggaactccacttttaaatttcaggtatcagacggtattgtccatacattacaataaatagactatacaatttttcaaaagataggctttaataaagctccacaaaattaatagcagagtgcttggaaattatttacataatccgatttccaaattctctcattcaaatacaaggggtctacacactaaattttctggccttnacggcagcagaacctctttcctggaagtggctggctaacaataagatacttccgtggagaggacctaatttatgtccaacgaggtctccatatccagctaagaaaatacaaccctttttcagctatatagatagggcactaacactgg

SEQ ID NO: 530668 - DNA, 1689 bp, Homo sapiens
  misc_feature (334)..(334): n is a, c, g, or t
  misc_feature (555)..(555): n is a, c, g, or t
  misc_feature (1590)..(1590): n is a, c, g, or t
gcactgctgtatcatggagagtatggtcgatcactttccagcgcaggccgatggacggacgagcaacgatacatgattccgcggcgctcgtgcgacctctgtgacggcggacgggtctgcgtgtctctgaggaatcgacggtactaaggtgagggtattgtgagttcgagtaaatgagccactagcagatcgaagcgacgagttggcgactaccaatcagggcatccaagcgacgcgaagcatcggatagtgtaggagcagatcgagaatctagtacgtgacaagtctcgatggacgaacccgttgagagcggacgctagcttgtggctacccnagcggccggatcgattccgctcgcgctcgctatggacgctcgcgtggatcgactgggacgtgcacgatgttcctctgtcgagtcccttccgagcgcccacggaatgcctatcacgcgccgcgggaacaaatgcttcaggtgttttcagtgggcttgaaaggtgaggtagtctgttcgcagagcgaaaccttgggggaccccaagggagcggcgtgtaacanacgcgaagacgtgctgctgggtaggccctcgggattgtgtaccatttcgtgctcgcttggcgcactggttgtgggtcgaacgcaggataggggaaggaagaccccgaaaggcaaagtggggctccaagtgtagccaatttgaaacggagctaaactggggggttggaacacgaaccatgacacatagagacgtggagttttgggacgtggaggcgttccattttggaactttcggcgaaaccgcatctggaatagaggctaattctggctgaacacctggcccggaggagaagagacttgagacggaaggcctcaacgagttgtggaacttcccacaaattagaaatccggaaggttagctagagcgtggcctgctttgagaccgaaaggggcgcatagagcccaaggaaattggacttccggcgctggtgtccagggcccgcaatcgaagagaaacgcccccaagtaaaacctcaatcccaaagcctttgaggaaggccccctgcaagtgaagagggtaggcattccaaaggttaagcaggcggacggtttccgtgtaccaaccgggggggccaagggcaaaggcttgaggttggggacactaaacagtgctgcgcgcaaaggacggtatggccaccaggaagggcacggttttaaccgacaggcaggccccaggggtccaggaggccccccggctggccaggcccaccccccagactgcgatacctagcccgggggtgctggggccttcggctggtggtttaaccttccggggggctcccagttgggcttgttgcccagtagacccccaagccttgttttccgcttgcacggcctgggcaatccgggccaggaagactgaaccaggtgggtttgccccaagctgaattaatacggggcgtggtccccttcttgcaaggggggacccccggggggggcataggatagaaaacacagcacaaggacgaccgagaaaagataatacaacacacagccacaggggacgactcacacacacgagtgtgaccacagagngagggagcaacttaatagtgagaacgaacatactggtgataaatgcagcaacgagcaatgagacagagcggacaaacataatgcgcgcacacacaagag

SEQ ID NO: 530669 - DNA, 252 bp, Homo sapiens
caagctgagcccagtgattccggtgaaaccaatgtgggaccatcccacccggagcatcagggaggtcctgaaacgctttgaggaggcagctttcacctgcgaatacaaacatgacgggcagagggcacagatccacgccctggaaggcggggaggtgaaaatcttaatcaggaattatgaagacaacactgtgaagcacccggacatcatcagccggatccacaagattaaactaccatcggtcacatactt

SEQ ID NO: 530670 - DNA, 176 bp, Homo sapiens
cagatataaaatatgtgggtaaacgtctcctttcttctacctaggctctaagttcttggtagacaagactatgtcctggttctctccgaatagctcacccatggtagttgcttcatatatacctgctgcatttgaaattcaaggtggaaaacgaagaattatggttcctttttttt

SEQ ID NO: 530671 - DNA, 240 bp, Homo sapiens
agtatccccgtatagccgatgtatgcggaatcggggcgtatgctgttctgaatcataagaacaggcaggttagaacgtagggtcgtgtgtgttacaaaatatgtcgtgtatagttcaggggagattgcgtcatatgttgttcctaggaagatcgtagtggtgactgtgattatcctaatgatgtgtgtgtattcggctatgaagaatagggcgaaggggcctgcggcgtattcgatgttg

SEQ ID NO: 530672 - DNA, 544 bp, Homo sapiens
tggcagcatctacaaccctgaagggctggatatcacagaggaaactctgcattctcgtttcctgaagggtgtccgcattgttgccagggcctgtctgcaaatgggttacccaactgtggcatcagtaccccattctatcataaacgggtccaaacgagtcctggccttgcctgtggagacggattacaccttccaacttgctgaaaaggtcagggccttcttggctgatccatctgcctttggggctgctgcccctgtggctgttgccaccacagttgctcctgctgctgctgcagccccagttaaggttgaagccaaggaaaagccgaaggagccggccaaggatatggaattgggcctctttgactaatcaccaaaaggcacccaacttagccagtttaattggcaaaccagggaaataaaggctaacttttccaaaaaaaaaaaattaaccacaaataaaaaaccatgtctggccgctttgggccaagtcagactttggactcggccaagtttaagcatgcggccgaaatttaggcttaat

SEQ ID NO: 530673 - DNA, 237 bp, Homo sapiens
gtgtactagaggatcgcgtcataatagtgttatgtcattacggagagaggaatgagaggtaggccgagggcgttattgatgtgtagtatgggtggaaggtgatttatcggaatgggaggtgattcctagggggttgttagactcccgtttcgtgcaagaataggaggtggagtgctggcttgggctgcattaatgaagggcaatgatgaagtgaaaggtaagagaatcgtgtgaggg

SEQ ID NO: 530674 - DNA, 132 bp, Homo sapiens
aatccctatgctattacgctgggaattacatcataaaagcctgattattccaggcttctaatcttgtcatataagaactgccttatgttgcgctgcgtttgttcaacgtgatgaggcccacggaaagcggag

SEQ ID NO: 530675 - DNA, 360 bp, Homo sapiens
tttttttttactagtttatgtaatttattgtactatttgtattattattttagactgtactccttctacttattaaaaaaaaaagtaactgtaaaacagcctcaggatagtccttcaggaggtatccagaagaaggcattgttttcataggcgatgacagctccatgcatatttttaatcctgaagacgacattccagttggacaagatatggcggtaaaagacagacatattgatactctagaccctgtgtaggcccaggctaaagtgtgtttgtgtttaacaagaaagtttagaaagtagcaaacatttttaacacaaaaaaatttttaaatagaaaaaagcctatagaataaggaca

SEQ ID NO: 530676 - DNA, 589 bp, Homo sapiens
gctctttccgccatctttccgcgccgccacaatggtgcgcatgaatgtcctggcagatgctctcaagagtatcaaatcaatgccgacataagagaggcaaacgccaggtgcttattaggccgtgctccaaagtcatcgtccggtttctcactgtgatgatgaagcatggttgacatgtggccgaatttgaaatacattgatgacccactagagctgggaagaagtcgttgtgaacctcagcaggcaggctgaaaacgaaggtgtggggtgatcagccccagattagaccgtgcaagtcagaagacctggaaaaatggccatgaatgaatctgcattggattcccgacgcgagattcgggtttacagttgtacatgagcaaacctgcaggcgtggcgagtcatggaccatgaagaagcaagaggaatatacacacaggagggaaaaatcgtgggatactttgtgtagggatgtaatacatatattgacaaataaaatgcctcatggaactctggtgcttccgaaaaagaaataaatctaaataaaaaaaaaaaagagcggcgggatggagatgttaaaaaagttataaaa

SEQ ID NO: 530677 - DNA, 374 bp, Homo sapiens
ccctagggggctttagaccccgtttgtttttttttgcaagagggtgatttccagtttgtcatcaacctctttatcttataatttaggatagagttgaacgttagtcttgaaagattttttaaagtagtctttccaactgttcctcagaggcctaggattttcccaaagtcccttaggacccttgtaggctccagtgggggtgtggcgataaagcaggaggcagggagacaggggtgcagggcctccccccttcccacagacaggctttgctgtatttgttgtacaaactgggattctgtaaaggccattatttggggggttgtatggatttttgggggttctgctttttttaaataaacttgaaaagctactga

SEQ ID NO: 530678 - DNA, 144 bp, Homo sapiens
gggaaccagagtaggaaccagaggggagagacagagcagcaagcagttggatttctccttgacgacgccagcattagcttccttcttcaccaccaccgttagcgttcttctttacttgcagttcagcttctaggtcagaccaga

SEQ ID NO: 530679 - DNA, 838 bp, Homo sapiens
  misc_feature (730)..(730): n is a, c, g, or t
ggggagaggcagcagccggatggacgtgtcctcatgatccggcgccaaagaccaccatcttcacggacgccaaggagtccagcacggggttcgatacctgaagcgcatcgtcgagggcatcctcaagcggccttcctgacggagcagcggttgtacaatggattgaccactttcttgggattgatgggcagagacacgtggggcgaggtgtggtgcttcacccagtcaaacagcactggccacgatggccccatgcccacatgtgggggcgttggcccttttcccggggcgatgtatgccacctttttgaggccccttgttgctatcggacccggttttttccaagccgtgccaaagagcttgcccctgatttgtgatttgaagggcccccagggactctcgggaaaggccaggtggccaattgaaacaaggcgggtgccaggttgagaaccccaaaggaggcccaatttcccccccaaataaagaggatgctttggccagaaaatatacaacagtacaatcaaacaacagaaaacattattgttgtgggggcgggccgtccgccctagagaaagagggtagtacaagcacccagtgctgtttggtggcgggcggcgcccagaatagttattgacaacatgtgacacatgggtgtttcccacaggacaactcgtgtgcacatcgcacgtttgtgcgtgggtcttccaccacaattaaagaaaggcgcggngggccaccggcgtttctgaaccaactccgatgtagcgtctgggccatgcgtgactcacacacagggcgccgggcagcctaataataggaccgcggcggagttgcgagc

SEQ ID NO: 530680 - DNA, 134 bp, Homo sapiens
cgctgggggttttctttaaagggggggacggattccccggaaacacccccccccgcgtgtgtagaaattttccccatatttgagcaggggctcccatttaaaagggcccacctgtatgggccctatttgaaaaa

SEQ ID NO: 530681 - DNA, 393 bp, Homo sapiens
tcttcatatgatggcaggaactttatatgttatagaagttagccccaagaatgaaatcgtgtcctttgccaaaacatggatggagctagaggcctttatcctaagtgagttaacgcaggaacagaaagccaaatagtgcatgttctcactgataagtgggagctaaactatgggttcataaaggcatgcagagtggtactgtggacattggagactcagaatgggggaggctaggagggaggtaagggatgaaaaagtacctgttgggtacaatgtacactacttgggtgacgatgggtccactaaaatcccagatttaaccactgtacaattcatccatgtaaccaaaacccacctgtaccccaatgctatgaaaataaataaaaccaaatt

SEQ ID NO: 530682 - DNA, 102 bp, Homo sapiens
tcgcaacctaattacgcccaagccaggatacaaccctgctgcagtgacaataccagatccttaacccactggcacactcctttcacaaatcttatctacagt

SEQ ID NO: 530683 - DNA, 430 bp, Homo sapiens
attccccccttttttgggtactccttccgaaattaaggggtggggttttttttggtttttaaaattccggccgggggggttgttttaagggggaggttttttccctccgtttttggtttaaattttccggttttccccgttttttttcccggttttttaattccttaaatttttggaaaggaactttttttggaaggcccaggattattacttttggttaaggtttgttgggccctccggccaaaatttttgtctttttttggcctttttccaaattttttccaatttttccttggtttaaatttccaccccttggtttaacttggttgttaacccggggaaaattattttgtttttttaaaatcctggcctttgtgggtttttaattccctttaccttttccctttttggattaaattttttgccttta

SEQ ID NO: 530684 - DNA, 1005 bp, Homo sapiens
tccgctggtttctccgggcgccactggtgttggcttggccctgttatcgtccctgggggtttgtatatttagtgtgtcgctcccacccgcctgcaaagctttttttggcgccttgggtctctgtccctggtgcgctccctctggttgcggcggtcatatttcgatttgttggtttttgaggaataggaaatatgtttatagagcagccccttggggaaacctgattctgaccccgacagtccctctcccatcccggtccccgaggggcccaactttacggggcttggggatatcgacccttggttaagtaggtcccgatggtagaggcacctgcttgaggacttgggagaagcttgtgccctgccccttccgagtggccatctagggccctggagagtattcccccgcctccctgggctcctcctaggctgcccctccgactgcaaaaggcgggtcaagcgccccaggtaccccttactcatgatccggacccctgagactccccttataggcccagaaaggtgcgcttttccgctgaaggtctcctgtccctttctcctggctttttgggcaagggcccggcccaggccgccctcccagggcccctgggacccagcgttgcttctgggattccagcccgctttctcgcaccgccgcatcacccacggccccggaggagctgaagcccctgcctcaccccctgctgcccgggcccagatccctgggcaccgcctcacgggaccccccttttgccccctcttccctgccctcaccccacgaccttgccttcctcctctgtccctttgtccccacgtccacgaccaccgcccttgaggcccaagctgtggccacacacccttcccgctcgttctgctgctgcaagcggctgccctggagacctccgtgggaggcgctggctgagacccactggtttgcctacacccttattaactatttattttttttaagtgtgggtttaaataaggaattaagccttttgatttg

SEQ ID NO: 530685 - DNA, 301 bp, Homo sapiens
gtcaggtattctctaattcctctataaaattatgcctaactacacttcctccttgagaatagaaatggactctctcatagtctggatgggcagcacaaatgaggtctgacgtgtcaggttctcctgagctcatctacatgatggagaccttccttgataggaaagatgagttttacctctggtacactgtcttggtaagcctggatgtgacagacacctcggctctccttgaataagaaagccagcagaactcttaaagccagttgtagtacggagttgtcagcactcactgaacctcact

SEQ ID NO: 530686 - DNA, 201 bp, Homo sapiens
tcatacggccagccatgagacgctggaacgcacaagtagcacgttgacttccacggatacaagtgaaccacgatttgaaaacacttccatgctaacggggtgtgttatgtttcaaactcaggatgtacgctagctgcccatggaccaggaactcggctccatctgctgctgccccagcccagggagcagcagggaaagaca

SEQ ID NO: 530687 - DNA, 571 bp, Homo sapiens
tcaagaggatccccagagatctttgagcatcagccttacccatctggataggggcaggcccttgcatcacctgaagtcatgaccaggcaaacattattagcttgtccttgctgcaggaatccgttctgtgtcatgctaggagaatgggttcagtatatggggccatcaggcatatataccctcttgaagtgtgtttcattgtggtatttgcttagagtaagctaagcaatgtgtatctttgtaatttatcttttaatccaaagaggaacccttggcttctgataacttggtagtgtggtatctgtagtggcctatagctgtcattacttcctgtagctgttgtacatgattggttacagacctggattaaggcttccaaagacagatggaccttggcacgtaaattggaccagccctgtgatcctgcacccgacaggagtaattcttcaggatttaccaggatggctgctataggggcatcatctgctgggtagtgagtttggttgggccaagagtcttgccaagactttaatctatgcctcttgtgctacatgaattctagggaattact

SEQ ID NO: 530688 - DNA, 165 bp, Homo sapiens
gtgtgtatatatatatagagagagagagagagagagagagagagaaacaggcaggcatggtgctgatgcctgtaaccctaacactttgggagtccaaggtgcgaagactttgagcccaggagtttgagaccagtttggacaacatagcaagacctcgttcctaaa

SEQ ID NO: 530689 - DNA, 1153 bp, Homo sapiens
  misc_feature (1138)..(1138): n is a, c, g, or t
agcgggcggacgccgagcggccagatcaggtacgcggggcgggccctgcgtccgcccctcccgccgaggctgagcctgagacccggggcggatcgactgacgccggggccgggatggcgacgcctcggccctgcgcggacgggccctgctgctcgcatcccagcgcggtgctcggcgtacagcagacgctggaggagatggacttcgagaggggaatctggtcggcagccctgaatggagacctgggccgagtgaagcatttaatccagaaggccgaggacccaagtcagcccgactcggccggctacactgcgctgcactatgccagccgcaatgggcactacgctgtgtgccagttcctgctggaaagcggagctaagtgtgatgcccagacccacgggggtgccactgctctgcaccgagccagctactgcgggcacactgaaatcgcgcggctcctgctatcacatgggtccaaccccagggtggtggatgacgacggcatgaccagtctgcataaggctgctgagaggggtcacggggacatctgctccctcctcctgcaacacagcccagccctgaaggccatccgggaccgaaaggcacggctagcatgtgacctgctgccttgcaacagtgacctgcgggacctgctatccagctgagccgccaccctatctccagctgcctttaaagggtacacagaccagttctccaagcccctgccttggtcagcatccatgctgctgggcagggaactgaggccagaccacccaggaagagccccagtctggtcactgtggaagcgagggagtagatttggtgtggctaaaagtgtttaagactggacagatgatcatattctaaattagttcatatgagacatctatttatttggaaaaaaataaagttatatccttacctcatcccacacccaaagataaattgcaagattaaagatctaaatataaaaacacaaaactatgtaagtattagaagaaagtagggactatgtgagaagctgctttctagctgaatgcccttggtaaaagtcactttagctgtctgcccctccatttcctcttctgtaatgagagtggttatcatagggcccgcctcagagtcattgtgggaggangtcagtgtgcactgg

SEQ ID NO: 530690 - DNA, 962 bp, Homo sapiens
agcgggcggacgccgagcggccagatcaggtacgcggggcgggccctgcgtccgcccctcccgccgaggctgagcctgagacccggggcggatcgactgacgccggggccgggatggcgacgcctcggccctgcgcggacgggccctgctgctcgcatcccagcgcggtgctcggcgtacagcagacgctggaggagatggacttcgagaggggaatctggtcggcagccctgaatggagacctgggccgagtgaagcatttaatccagaaggccgaggacccaagtcagcccgactcggccggctacactgcgctgcactatgccagccgcaatgggcactacgctgtgtgccagttcctgctggaaagcggagctaagtgtgatgcccagacccacgggggtgccactgctctgcaccgagccagctactgcgggcacactgaaatcgcgcggctcctgctatcacatgggtccaaccccagggtggtggatgacgacggcatgaccagtctgcataaggctgctgagaggggtcacggggacatctgctccctcctcctgcaacacagcccagccctgaaggccatccgggaccgaaaggcacggctagcatgtgacctgctgccttgcaacagtgacctgcgggacctgctatccagctgagccgccaccctatctccagctgcctttaaagggtacacagaccagttctccaagcccctgccttggtcagcatccatgctgctgggcagggaactgaggccagaccacccaggaagagccccagtctggtcactgtggaagcgagggagtagatttggtgtggctaaaagtgtttaagactggacagatgatcatattctaaattagttcatatgagacatctatttatttggaaaaaaataaagttatatccttacctcacaaaaggtaattgcaagttaaggctttatttaaagc

SEQ ID NO: 530691 - DNA, 509 bp, Homo sapiens
tgttattcttatgtataaccaccttttaaaaatattatgaataatgccacaactaactgcttaaaacaccctttttttcattcttaagaattatgttcttccacccagcaattataattagttcaaacgaaaccagtttaacataatagcctgttagccccataagggcaagtagcttattagataggcctttgtatctctgatgcccaacatgttgtagactataaataaatgatgaatgagtggatggaagaatggaggaaggatcgagtcagtcagtgtttgcctgatgaatcacagggtggaagcataggcggaaggatggattggtgaatgaatgaatgaatttcctttggttaagtctcttgaaagaaagactatggatctttgtatggatgttgaataatttcagtaagcttacagcattttacaatgttcagcaatgtatgaccacttaattaagatatggctagtttgtctctgttataaagtacttttgcattacttta

SEQ ID NO: 530692 - DNA, 187 bp, Homo sapiens
ttcgaccgagcagctaatacttttaacttgtttttatactgttcgttttccaaaatttcttgtttcactgtaacgtttggattttgtttttcaaattctttaataatatcattgacaatcatgttgtgttgcttcgagcttcccgctgtccaaagatgcataaacgtaatcgttacttttttgtctt

SEQ ID NO: 530693 - DNA, 391 bp, Homo sapiens
taactgtataatctctctcctgggcctgacagtttcagaatgctaaggcacgcaggagttgaatccagtgtcaagaggattacagagttctcatacattgctggtgggaatgtaaaatggtgccgctgttttggaaagcagtccagcagtttctcaaaatgctagacatagaattacacagtaactctaagatacatcccacttcaaggattgaaagagaattgaaagcatatgtctacacaaaaacgtgtacataaatgcccataggagcattattcataatagccaaaaagtggaaacaacctaaatgcccatcgatggacaaatggataaacaaaatgtggtatatgcatataatggaatattattcagcccaacattcaagccgtca

SEQ ID NO: 530694 - DNA, 1210 bp, Homo sapiens
agcgggcggacgccgagcggccagatcaggtacgcggggcgggccctgcgtccgcccctcccgccgaggctgagcctgagacccggggcggatcgactgacgccggggccgggatggcgacgcctcggccctgcgcggacgggccctgctgctcgcatcccagcgcggtgctcggcgtacagcagacgctggaggagatggacttcgaggcactatgccagccgcaatgggcactacgctgtgtgccagttcctgctggaaagcggagctaagtgtgatgcccagacccacgggggtgccactgctctgcaccgagccagctactgcgggcacactgaaatcgcgcggctcctgctatcacatgggtccaaccccagggtggtggatgacgacggcatgaccagtctgcataaggctgctgagaggggtcacggggacatctgctccctcctcctgcaacacagcccagccctgaaggccatccgggaccgaaaggcacggctagcatgtgacctgctgccttgcaacagtgacctgcgggacctgctatccagctgagccgccaccctatctccagctgcctttaaagggtacacagaccagttctccaagcccctgccttggtcagcatccatgctgctgggcagggaactgaggccagaccacccaggaagagccccagtctggtcactgtggaagcgagggagtagatttggtgtggctaaaagtgtttaagactggacagatgatcatattctaaattagttcatatgagacatctatttatttggaaaaaaataaagttatatccttacctcaaaaaaaaaaaaaaacagaaagaagaaggagaggaaagagaaagagagaaaagaagaagaaaaaaaagagaaagaaagagagggggggaaagaaagaaagccgcaaggagggggcccagaatagagagaagacacaggagattggaaaaaagagggcgccacaacaggaggacgcataataaaaaggaaacgcaccgcagccaggcacaaagaagacacagaaagggaggaaagcgagaagagacgactacgacgagccccacacatagctggggagaacacgctggagaacacaacccaagaagagaaggccagcggacagaaacgaaaggagcgcatggagaaacaagcgaatacagagggagagaaagcacgaacacaagacaatcccg

SEQ ID NO: 530695 - DNA, 1169 bp, Homo sapiens
gcccgtctctactaaaaatacaaaaattagcttgggctgtggtggtgggcgcctgtagtcccagctacttgggaggctgagtgcaggagaatcgcctgaacccaggaagcagatgttgtacctgagctgagatcatgccattaccactccatgcctgggacgacagaagcgagacgccatcaactaaataaatacactacaacgctaccaagtaaaacaaccctattacaattgacggctacgagctggagatgtaattcggttctgttgacgaaacattagtaataaagcttgccctctgacggctgtggaccgacaggccagtatttgtactgacttcgcacagttaagaactagatatgctcacgcaacggtgtgtctggtggaccgtcattagcgtactagagtgatcagtcatgtaccacataggttagaccgaacttagactccacatgccttacagaggtacaagacatgtactgtacctgtatccaaaagaagaccaaggcattcgtttaattggcgttaaagcgcagagtaatcgcaatgtgcagcgagttgaccacgctcactgggccttacgacgagctggcatcacctgagctccgctgaaagaccagactatgcagggcccgtgatcaaggagtagagtaggtgacttggtagcataccacgggcaataatcgagggttacgagtcggaaacccaggaggcgcacagggtcgcggcacggcaccgttggggcgcatcacaagcaagtaagcaacagcccgacgaaactgatggagcacacggggacaaaccaacaggatcaatcgcaagcggcagggaaaagcagaacggcacgtcaccacccaaagcggaaatagggagaggaaccctaaagcaggcacccacactggaacgtcagccaaggcgaagcgagcacacaaaagggagggagggacacacgggaagggacaagggtagacaggaagagagagagttagccccaagaaaagaggagacggcgccacaggaacaaacaaaacagcccagagccaacgccgctagatgggcgctgcaaacggaacacacacagagacacttggaacaatcggaacagaacgcacccacggagggcaaggcaacaggccaacgacagggccaagcggacggggagccgaaag

SEQ ID NO: 530696 - DNA, 734 bp, Homo sapiens
  misc_feature (64)..(64): n is a, c, g, or t
ggctcctcgcgctgtttccgcctctgccttcggacgccggatttgacgtgctctcgcgagattngggtctcttcctaagccggcgctcggcaagttctcccaggagaaagccatgttcagttcgagcgccaagatcgtgaagcccaatggcgagaagccggacgagttcgagtccggcatctcccaggctcttctggagctggagatgaactcggacctcaaggctcagctcagggagctgaatattacggcagctaaggaaattgaagttggtggtggtcggaaagctatcataatctttgttcccgttcctcaactgaaatctttccagaaaatccaagtccggctagtacgcgaattggagaaaaagttcagtgggaagcatgtcgtctttatcgctcagaggagaattctgcctaagccaactcgaaaaagccgtacaaaaaataagcaaaagcgtcccaggagccgtactctgacagctgtgcacgatgccatccttgaggacttggtcttcccaagcgaaattgtgggcaagagaatccgcgtcaaactagatggcagccggctcataaaggttcatttggacaaagcacagcagaacaatgtggaacacaaggttgaaactttttctggtgtctataagaagctcacgggcaaggatgttaattttgaattcccagagtttcaattgtaaacaaaaatgactaaataaaaagtatatattcacagta

SEQ ID NO: 530697 - DNA, 1005 bp, Homo sapiens
agcgggcggacgccgagcggccagatcaggtacgcggggcgggccctgcgtccgcccctcccgccgaggctgagcctgagacccggggcggatcgactgacgccggggccgggatggcgacgcctcggccctgcgcggacgggccctgctgctcgcatcccagcgcggtgctcggcgtacagcagacgctggaggagatggacttcgagaggctgctgagaggggtcacggggacagcaaacagcccagccctgcaaggcccatccggggcaccgcaataggctacggctcagctcatgtgcactgctgccttgcaacagtgacctgcgggacctgctatccagctgagccgccaccctatctccagctgcctttaaagggtaagtggagaaagagttgaagggaaagtgttgggatttggacatggagttcctgaccctggagcctggcctagtgactggaggaggggcccccaagaggctgtggcccgggagaagctgaaattggaccgaaggacgcaagcagaagaaaactagacccgatttacccacgttaccaagactttaaattctggacttacacctggaatgatctagagaaaaaaatcggagctacaacaaaaaggaaaacagcgacctgagcaaccaagtagttcaccaaacacaggcaacgatgcagcaacatgagaaaaagggcaggcagaaccacaccggcgagaagcaggacgcaagagaggacgggggcggatgtccatgaggaggagcacaaggagagaacaggaagcaacagacggacagacaaggccaagacgagaagggaaccaagacgaccaagacacgcagccacagccccgcaacggacggaacagatacagaaggacaacacaagccagaggcaacgaacgcggacagacggcaacaaaagcgcggaccactgcagggcaggctcaaggaaccgcacaacgagacacacagaaaaagaagcggaagcggaccagaaggcaga

SEQ ID NO: 530698 - DNA, 1174 bp, Homo sapiens
  misc_feature (64)..(64): n is a, c, g, or t
ggctcctcgcgctgtttccgcctctgccttcggacgccggatttgacgtgctctcgcgagattngggtctcttcctaagccggcgctcggcaagttctcccaggagaaagccatgttcagttcgagcgccaagatcgtgaagcccaatggcgagaagccggacgagttcgagtccggcatctcccaggctcttctggagctggagatgaactcggacctcaaggctcagctcagggagctgaatattacggcagctaaggaaattgaagttggtggtggtcggaaagctatcataatctttgttcccgttcctcaactgaaatctttccagaaaatccaagtccggctagtacgcgaattggagaaaaagttcagtgggaagcatgtcgtctttatcgctcagaggagaattctgcctaagccaactcgaaaaagccgtacaaaaaataagcaaaagcgtcccaggagccgtactctgacagctgtgcacgatgccatccttgaggacttggtcttcccaagcgaaattgtgggcaagagaatccgcgtcaaactagatggcagccggctcataaaggttcatttggacaaagcacagcagaacaatgtggaacacaaggttgaaactttttctggtgtctataagaagctcacgggcaaggatgttaattttgaattcccagagtttcaattgtaaacaaaaatgactaaataaaaagtatatattcacagtagacaaacatatagccaaagaaacaatagaaccttgggtggtgggcgagcggtgatatgacccctggagggggtgcgccctgaaaaccactgcccactgattgttcttggaaggaatagggggccccgtttgaaaggagtcttgaatccgaacccaatggtatgcggagcccgctcgccatcaaaggggcccggggggcaagcctggcatgctgaacaccccgggagagagcgacccacactcggcgggcgggaaggctcgaacggcggcgcgctgacctgcaatcaggagtaatgcggcctcagggagatactacacctcaagaggggaccgtgcgccaccaatgggaaatatcgccgcaaaaagttgtcagggcactggtaaagcagaacgaggggcaaaaggccaaagaaaaggcgtcggaagtcacagaggactccg

SEQ ID NO: 530699 - DNA, 1317 bp, Homo sapiens
agcgggcggacgccgagcggccagatcaggtacgcggggcgggccctgcgtccgcccctcccgccgaggctgagcctgagacccggggcggatcgactgacgccggggccgggatggcgacgcctcggccctgcgcggacgggccctgctgctcgcatcccagcgcggtgctcggcgtacagcagacgctggaggagatggacttcgagaggggaatctggtcggcagccctgaatggagacctgggccgagtgaagcatttaatccagaaggccgaggacccaagtcagcccgactcggccggctacactgcgctgcactatgccagccgcaatgggcactacgctgtgtgccagttcctgctggaaagcggagctaagtgtgatgcccagacccacgggggtgccactgctctgcaccgagccagctactgcgggcacactgaaatcgcgcggctcctgctatcacatgggtccaaccccagggtggtggatgacgacggcatgaccagtctgcataaggctgctgagaggggtcacggggacatctgctccctcctcctgcaacacagcccagccctgaaggccatccgggaccgaaaggcacggctagcatgtgacctgctgccttgcaacagtgacctgcgggacctgctatccagctgagccgccaccctatctccagctgcctttaaagggtacacagaccagttctccaagcccctgccttggtcagcatccatgctgctgggcagggaactgaggccagaccacccaggaagagccccagtctggtcactgtggaagcgagggagtagatttggtgtggctaaaagtgtttaagactggacagatgatcatattctaaattagttcatatgagacatctatttatttggaaaaaaataaagttatatccttacctcaaaaaaaaaaaaaaacagaaagaagaaggagaggaaagagaaagagagaaaagaagaagaaaaaaaagagaaagaaagagagggggggaaagaaagaaagccgcaaggagggggcccagaatagagagaagacacaggagattggaaaaaagagggcgccacaacaggaggacgcataataaaaaggaaacgcaccgcagccaggcacaaagaagacacagaaagggaggaaagcgagaagagacgactacgacgagccccacacatagctggggagaacacgctggagaacacaacccaagaagagaaggccagcggacagaaacgaaaggagcgcatggagaaacaagcgaatacagagggagagaaagcacgaacacaagacaatcccg

SEQ ID NO: 530700 - DNA, 209 bp, Homo sapiens
taactgtcgacaggtaggttacgaactacctgacctcaagtgcatctgccgctacggctcccaaagtgctgggataacaggtgtgagccaccgaacccagacagcataccctctatatagatgagcaagccacaggtcagacagtaccgtggctgtcccaagttcacacacacaactagtaagacatggcacaggaaattcaaacccag

SEQ ID NO: 530701 - DNA, 222 bp, Homo sapiens
ctcaaaaggaggcaaatttggctgcccaaaaaaaagctgccaaaaagtgaccccttgcccccccaaactcccagatttcaaaggaggtagttgcaaaaactgtgcccaaggggaggaagggggtcccccccaaaataatgatggttttcatgcctttgaaaaaaaaatttttggacatctagcggtatcgaggcaccaggcctgaataaacaccctttttta

SEQ ID NO: 530702 - DNA, 540 bp, Homo sapiens
  misc_feature (20)..(20): n is a, c, g, or t
  misc_feature (39)..(39): n is a, c, g, or t
cactaggggaccaaggctgngctccacgcggcgccgctntagactatggatccccggctgcaggaattccgccgcgtcgtggtggtcggaaagctatcataatctttgttcccgttcctcaactgaaatctttccagaaaatccaagtccggctagtacgcgaattggagaaaaagttcagtgggaagcatgtcgtctttatcgctcagaggagaattctgcctaagccaactcgaaaaagccgtacaaaaaataagcaaaagcgtcccaggagccgtactctgacagctgtgcacgatgccatccttgaggacttggtcttcccaagcgaaattgtgggcaagagaatccgcgtcaaactagatggcagccggctcataaaggttcatttggacaaagcacagcagaacaatgtggaacacaaggttgaaactttttctggtgtctataagaagctcacgggcaaggatgttaattttgaattcccagagtttcaattgtaaacaaaaatgactaaataaaaagtatatattcacagta

SEQ ID NO: 530703 - DNA, 1322 bp, Homo sapiens
agcgggcggacgccgagcggccagatcaggtacgcggggcgggccctgcgtccgcccctcccgccgaggctgagcctgagacccggggcggatcgactgacgccggggccgggatggcgacgcctcggccctgcgcggacgggccctgctgctcgcatcccagcgcggtgctcggcgtacagcagacgctggaggagatggacttcgagaggggaatctggtcggcagccctgaatggagacctgggccgagtgaagcatttaatccagaaggccgaggacccaagtcagcccgactcggccggctacactgcgctgcactatgccagccgcaatgggcactacgctgtgtgccagttcctgctggaaagcggagctaagtgtgatgcccagacccacgggggtgccactgctctgcaccgagccagctactgcgggcacactgaaatcgcgcggctcctgctatcacatgggtccaaccccagggtggtggatgacgacggcatgaccagtctgcataaggctgctgagaggggtcacggggacatctgctccctcctcctgcaacacagcccagccctgaaggccatccgggaccgaaaggcacggctagcatgtgacctgctgccttgcaacagtgacctgcgggacctgctatccagctgagccgccaccctatctccagctgcctttaaagggtaagtggagaaagagttgaagggaaagtgttgggatttggacatggagttcctgaccctggagcctggcctagtgactggaggaggggcccccaagaggctgtggcccgggagaagctgaaattggaccgaaggacgcaagcagaagaaaactagacccgatttacccacgttaccaagactttaaattctggacttacacctggaatgatctagagaaaaaaatcggagctacaacaaaaaggaaaacagcgacctgagcaaccaagtagttcaccaaacacaggcaacgatgcagcaacatgagaaaaagggcaggcagaaccacaccggcgagaagcaggacgcaagagaggacgggggcggatgtccatgaggaggagcacaaggagagaacaggaagcaacagacggacagacaaggccaagacgagaagggaaccaagacgaccaagacacgcagccacagccccgcaacggacggaacagatacagaaggacaacacaagccagaggcaacgaacgcggacagacggcaacaaaagcgcggaccactgcagggcaggctcaaggaaccgcacaacgagacacacagaaaaagaagcggaagcggaccagaaggcaga

SEQ ID NO: 530704 - DNA, 714 bp, Homo sapiens
ggcccggggtgctcggacgcgcgctcagggtcggtcctgctgttcgttgcttcttaggctcttctggagctggagatgaactcggacctcaaggctcagctcagggagctgaatattacggcagctaaggaaattgaagttggtaagctggcgctccctcggctgggagggaggttgcggcgcgtctccccgcgcagtgcctgagagggttggacctgggttacggttgatgatgacttgccgcctggccgcctaacctgaactcaggttcggccgtgttgtttgggagtgataccgcccaggtgcggggagtggggttgcaggtaccctgcggcttaagctgtccacatgcgggcggtggagaaacgtggagtagggagggcctgggcccatttcggaccttatttgcccttacttagttatagatacggcaaagagctgtggggagctcaggatgagattctctctacccttagcccggagttgccgcaagtgggggtgcagaagtggtagtgattggcctcctggcctgaacagtctcccttcctggaataaggaaatgtgaaggttggagagagatgagaacatttccgaaggatgcatttatgattaacacaaaactagtattagtttgtagtgcagctacggtgttagtgataaggtcttcttatcctctaattgaccacacgttactgtctgaagcagtaacactat

SEQ ID NO: 530705 - DNA, 1126 bp, Homo sapiens
  misc_feature (1111)..(1111): n is a, c, g, or t
agcgggcggacgccgagcggccagatcaggtacgcggggcgggccctgcgtccgcccctcccgccgaggctgagcctgagacccggggcggatcgactgacgccggggccgggatggcgacgcctcggccctgcgcggacgggccctgctgctcgcatcccagcgcggtgctcggcgtacagcagacgctggaggagatggacttcgagaggggaatctggtcggcagccctgaatggagacctgggccgagtgaagcatttaatccagaaggccgaggacccaagtcagcccgactcggccggctacactgcgctgcactatgccagccgcaatgggcactacgctgtgtgccagttcctgctggaaagcggagctaagtgtgatgcccagacccacgggggtgccactgctctgcaccgagccagctactgcgggcacactgaaatcgcgcggctcctgctatcacatgggtccaaccccagggtggtggatgacgacggcatgaccagtctgcatatctgctccctcctcctgcaacacagcccagccctgaaggccatccgggaccgaaaggcacggctagcatgtgacctgctgccttgcaacagtgacctgcgggacctgctatccagctgagccgccaccctatctccagctgcctttaaagggtacacagaccagttctccaagcccctgccttggtcagcatccatgctgctgggcagggaactgaggccagaccacccaggaagagccccagtctggtcactgtggaagcgagggagtagatttggtgtggctaaaagtgtttaagactggacagatgatcatattctaaattagttcatatgagacatctatttatttggaaaaaaataaagttatatccttacctcatcccacacccaaagataaattgcaagattaaagatctaaatataaaaacacaaaactatgtaagtattagaagaaagtagggactatgtgagaagctgctttctagctgaatgcccttggtaaaagtcactttagctgtctgcccctccatttcctcttctgtaatgagagtggttatcatagggcccgcctcagagtcattgtgggaggangtcagtgtgcactgg

SEQ ID NO: 530706 - DNA, 1166 bp, Homo sapiens
  misc_feature (237)..(237): n is a, c, g, or t
agcgggtcacgtgaggggcgcgcgcgtccccgggagtggcgggtctccgaggccagagagaaaagattgcgaggcggaccgaaagaatgtggcctggtaccagcacgattagaatgaatccatccatgtcggaatgcgtaacatgacctgttaaagcatggacatgtactgctgtgtgacagaataaggtgctttattgatcttagctagtgcaggcgagtcgtgctggcgtactcntcgtcacactcataacactggcgagtacttcatgtagttcataggtcgatgtccctcctcttggtgctctatagtagagttggtgagcccggtgattgacagacatctcacgttgacttacaaagagcaaccttattctctgtccattgtcatcaccactggacgtcttctgctacacctcttgactatagcacggaatggtcttggcctgctggatgaaaggtgactccattacaaataaggcactggctccctctgaaacaaaggctagcgtagaatgactgataacgaagatctcttgttgcctaaagtgacttggcgtccaatctcatttataatacattgattcccatcggatatagttggcccactctcccgttacttgggcaagagaccattagatggttgtcaatccacaagctccgagggggcatgacacccacgataaagcgagaccggtcttgtacatggcgttattcttatctgatgttaaacagggggaagcggcctattcggacccttgggaccactgccgggttgttgcctccggtttgtgtcgcacctatgcattacattccctcagtatgggaattttccctaaggaattaaacgaccaagaccgtcgatttggatcgcgccacagaaaaggaatcggccaaagtggcaagtgcaagaatagaaagggaggattggtggacagtattgtcgttgggtatttcactggaaaggcgaagaagaatgggagtgagtggcaaggtggcagattgacgcggcactaagtggggatgaagggtgtgaaaaactggctggttgtgcactgcggtcaccaattgacactacttgcaaattgttaagtcggccgggttatacgggggtgtccgggagatccttggagagtagattggtgccaatatggagggggaacagga

SEQ ID NO: 530707 - DNA, 675 bp, Homo sapiens
  misc_feature (64)..(64): n is a, c, g, or t
ggctcctcgcgctgtttccgcctctgccttcggacgccggatttgacgtgctctcgcgagattngggtctcttcctaagccggcgctcggcaagttctcccaggagaaagccatgttcagttcgagcgccaagatcgtgaagcccaatggcgagaagccggacgagttcgagtccggcatctcccaggctcttctggagctggagatgaactcggacctcaaggctcagctcagggagctgaatattacggcagctaaggaaattgaagttggtggtggtcggaaagctatcataatctttgttcccgttcctcaactgaaatctttccagaaaatccaagtccggctagtacgcgaattggagaaaaagttcagtgggaagcatgtcgtctttatcgctcagaggagaagtctgcctaagtcatctcgatgagcacgatgtcatgcttgaggacttggacatccaggctaaagtgcctgcaggagacaccgcgtcagactagatggcacacgtatcatacaggtgcattacgacagagcgcagcagaacactgtggcacacacggttgcaactctctctgagtgctatgagacgctcacggtcaacgatgcaaagtttgaattcgcagactttcaactgctgacatgcacgactcactgggtatattctcagtc

SEQ ID NO: 530708 - DNA, 975 bp, Homo sapiens
  misc_feature (960)..(960): n is a, c, g, or t
gagtgtaatggcatgatctactcactgcaacctccgcctcccgggttcaagcgatactcctgtctcagcctcctgagtagctgggatcacaggcacgtgccaccacacttggctaatttttgtatttttagtagagatggggtttcaccatgtcaggctggtcttgaactcttgaccttgtgatccgcctgccttggcctcccaaagtgctgagattacaggcgtgagccactgcgcccagagaggcctcttttttagaaggaagaaccactgaaagtggaacaagagagagcagagcccagtgggggggtatgccctttgattccagcctttctctccacaggctgctgagaggggtcacggggacatctgctccctcctcctgcaacacagcccagccctgaaggccatccgggaccgaaaggcacggctagcatgtgacctgctgccttgcaacagtgacctgcgggacctgctatccagctgagccgccaccctatctccagctgcctttaaagggtacacagaccagttctccaagcccctgccttggtcagcatccatgctgctgggcagggaactgaggccagaccacccaggaagagccccagtctggtcactgtggaagcgagggagtagatttggtgtggctaaaagtgtttaagactggacagatgatcatattctaaattagttcatatgagacatctatttatttggaaaaaaataaagttatatccttacctcatcccacacccaaagataaattgcaagattaaagatctaaatataaaaacacaaaactatgtaagtattagaagaaagtagggactatgtgagaagctgctttctagctgaatgcccttggtaaaagtcactttagctgtctgcccctccatttcctcttctgtaatgagagtggttatcatagggcccgcctcagagtcattgtgggaggangtcagtgtgcactgg

SEQ ID NO: 530709 - DNA, 464 bp, Homo sapiens
acagactgaaaaacagcagagtcgaactgcagcaggagactgcagattcctttccattccctaaatagagactctcatgaaaaaagcaaagaagtgagcccctcatggcataatttaacggcaagggtccccaaacccctggccgaggaccagtactggtcagtggcctgttaggaagtgggccgcacagcagaaggtgaatggcggcaagcaagcattaccacctgagctccgcctcctgtcaaatccgtggtggcattatattctcatgggagcaggaaccctattgtgaactgcacatgtggtggtctggttgcatgctacttatgagaatctaatgcctgatgatctgaggtggaacagttttatcttgaaaccatccccatccatccatggaaaaattgtcttcaatgaaactggtccgtggtgccaaaaaatttggggagcactgatttaagcgatac

SEQ ID NO: 530710 - DNA, 650 bp, Homo sapiens
  misc_feature (35)..(35): n is a, c, g, or t
attcgcggccgcgtcgaccgtatctgggagatttngtccactggcgtattagtagaggctgtggattctgaatgatttattcaagaatcaggaagtaactccatagaagggtttgctcagtcaattgttcgtctaagttgtttagccttctcgaactttgaacttaccctgccattcttcttgcttttaaagcagtatggcagttacagctttttgtcaatttaaagtcttttttcattttgttacatgataatttttaccttacagaggagaattctgcctaagccaactcgaaaaagccgtacaaaaaataagcaaaagcgtcccaggaggtgagtattttagtagtttcagaaatgtgtgtacccctcttattaacaactcttaatttgtttaagttgtagtttatgaaaacagatgttcaagtgggaatttttgagtagcagcatttggtttcctgtatagttgcacatgatacgttttagaattctagatgtaaaacatacatgtattcatgtagccattgtttgcctactaggtcagtgctgtcacaagatgagatgatttcctccgattatttgtgcacaggataggaatgataagaaggaaatcattactttaattctgtgatatagcatgctagccacgac

SEQ ID NO: 530711 - DNA, 1004 bp, Homo sapiens
  misc_feature (989)..(989): n is a, c, g, or t
agcgggcggacgccgagcggccagatcaggtacgcggggcgggccctgcgtccgcccctcccgccgaggctgagcctgagacccggggcggatcgactgacgccggggccgggatggcgacgcctcggccctgcgcggacgggccctgctgctcgcatcccagcgcggtgctcggcgtacagcagacgctggaggagatggacttcgagaggggaatctggtcggcagccctgaatggagacctgggccgagtgaagcatttaatccagaaggccgaggacccaagtcagcccgactcggccggctacactgcgctgcactatgccagccgcaatgggcactacgctgtgtgccagttcctgctggaaagcggagctaagtgtgatgcccagacccacgggggtgccactgctctgcaccgagccagctactgcgggcacactgaaatcgcgcggctcctgctatcacatgggtccaaccccagggtggtggatgacgacggcatgaccagtctgcataaggctgctgagaggggtcacggggacatctgctccctcctcctgcaacacagccctgccttggtcagcatccatgctgctgggcagggaactgaggccagaccacccaggaagagccccagtctggtcactgtggaagcgagggagtagatttggtgtggctaaaagtgtttaagactggacagatgatcatattctaaattagttcatatgagacatctatttatttggaaaaaaataaagttatatccttacctcatcccacacccaaagataaattgcaagattaaagatctaaatataaaaacacaaaactatgtaagtattagaagaaagtagggactatgtgagaagctgctttctagctgaatgcccttggtaaaagtcactttagctgtctgcccctccatttcctcttctgtaatgagagtggttatcatagggcccgcctcagagtcattgtgggaggangtcagtgtgcactgg

SEQ ID NO: 530712 - DNA, 181 bp, Homo sapiens
  misc_feature (51)..(51): n is a, c, g, or t
  misc_feature (54)..(54): n is a, c, g, or t
  misc_feature (124)..(124): n is a, c, g, or t
  misc_feature (131)..(131): n is a, c, g, or t
tcttatacaaccagatattccatgaacgaatagggtaagaactcactcatnatnacaaggagggcaccaacccattcataagagatctgctgccatgacccaaacactatccactacaccccanctctcanattgaggatcacacttcaacatgagatttggaggggacaaacatccaaac

SEQ ID NO: 530713 - DNA, 1211 bp, Homo sapiens
  misc_feature (64)..(64): n is a, c, g, or t
  misc_feature (746)..(746): n is a, c, g, or t
ggctcctcgcgctgtttccgcctctgccttcggacgccggatttgacgtgctctcgcgagattngggtctcttcctaagccggcgctcggcaagttctcccaggagaaagccatgttcagttcgagcgccaagatcgtgaagcccaatggcgagaagccggacgagttcgagtccggcatctcccaggctcttctggagctggagatgaactcggacctcaaggctcagctcagggagctgaatattacggcagctaaggaaattgaagttggtggtggtcggaaagctatcataatctttgttcccgttcctcaactgaaatctttccagaaaatccaagtccggctagtacgcgaattggagaaaaagttcagtgggaagcatgtcgtctttatcgctcagaggagaattctgcctaagccaactcgaaaaagccgtacaaaaaataagcaaaagcgtcccaggagccgtactctgacagctgtgcacgatgccatccttgaggacttggtcttcccaagcgaaattgtgggcaagagaatccgcgtcaaactagatggcagccggctcataaaggttcatttggacaaagcacagcagaacaatgtggaacacaaggttgaaactttttctggtgtctatccaacgctgatggggtcggatgataatttttattctccacatttacaactagcaacagagatgaataatggagaagatttctttattaaccactcctcacatntaacatttgttttcaaagcgaaaattcttctacacacactacgtgaacccctatccatacctgttgatcactacctggctctcgtaattaccttcgctcctccacaccccccaccccccttgaacaccactccttgcgtcccctcgaacgctattatatactatcaactagaccgctcaccgcggccgaaatagcaaatcgtcctcccaccgctgcgtccctctccgtgtctcatcctttattctcacccctcttccttctcccctccctcctgccctgctcataatctaccccgcacactccacccgtttcatcagtacccgcacttcccgccaccagcttagcgtctctcaagcttgcgagaccacgaacctatctcaattacccctatactttttccgccatccacgtacttcacacagtgtatcacgcccgagatcccgtgtcgcccacacacacacaaag

SEQ ID NO: 530714 - DNA, 1076 bp, Homo sapiens
  misc_feature (1061)..(1061): n is a, c, g, or t
agcgggcggacgccgagcggccagatcaggtacgcggggcgggccctgcgtccgcccctcccgccgaggctgagcctgagacccggggcggatcgactgacgccggggccgggatggcgacgcctcggccctgcgcggacgggccctgctgctcgcatcccagcgcggtgctcggcgtacagcagacgctggaggagatggacttcgagaggggaatctggtcggcagccctgaatggagacctgggccgagtgaagcatttaatccagaaggccgaggacccaagtcagcccgactcggccggctacactgcgctgcactatgccagccgcaatgggcactacgctgtgtgccagttcctgctggaaagcggagctaagtgtgatgcccagacccacgggggtgccactgctctgcaccgagccagctactgcgggcacactgaaatcgcgcggctcctgctatcacatgggtccaaccccagggtggtggatgacgacggcatgaccagtctgcataaggctgctgagaggggtcacggggacatctgctccctcctcctgcaacacagcccagccctgaaggccatccgggaccgaaaggcacggctagcatgtgacctgcacagaccagttctccaagcccctgccttggtcagcatccatgctgctgggcagggaactgaggccagaccacccaggaagagccccagtctggtcactgtggaagcgagggagtagatttggtgtggctaaaagtgtttaagactggacagatgatcatattctaaattagttcatatgagacatctatttatttggaaaaaaataaagttatatccttacctcatcccacacccaaagataaattgcaagattaaagatctaaatataaaaacacaaaactatgtaagtattagaagaaagtagggactatgtgagaagctgctttctagctgaatgcccttggtaaaagtcactttagctgtctgcccctccatttcctcttctgtaatgagagtggttatcatagggcccgcctcagagtcattgtgggaggangtcagtgtgcactgg

SEQ ID NO: 530715 - DNA, 722 bp, Homo sapiens
  misc_feature (48)..(48): n is a, c, g, or t
ggtggagcttgcagtgagccgagatcccgccactgaacttcagcctgngcgacagagcgagactccatctcaaaaaaagaagaaacctgttacagttcggatgggggattggtgcaaactgaagtctatggggaatgaagtgccaggattgatctggaattccactggcgtattagtagaggctgtggattctgaatgatttattcaagaatcaggaagtaactccatagaagggtttgctcagtcaattgttcgtctaagttgtttagccttctcgaactttgaacttaccctgccattcttcttgcttttaaagcagtatggcagttacagctttttgtcaatttaaagtcttttttcattttgttacatgataatttttaccttacagaggagaattctgcctaagccaactcgaaaaagccgtacaaaaaataagcaaaagcgtcccaggagccgtactctgacagctgtgcacgatgccatccttgaggacttggtcttcccaagcgaaattgtgggcaagagaatccgcgtcaaactagatggcagccggctcataaaggttcatttggacaaagcacagcagaacaatgtggaacacaaggttgaaactttttctggtgtctataagaagctcacgggcaaggatgttaattttgaattcccagagtttcaattgtaaacaaaaatgactaaataaaaagtatatattcacagta

SEQ ID NO: 530716 - DNA, 598 bp, Homo sapiens
  misc_feature (35)..(35): n is a, c, g, or t
attcgcggccgcgtcgaccgtatctgggagatttngtccactggcgtattagtagaggctgtggattctgaatgatttattcaagaatcaggaagtaactccatagaagggtttgctcagtcaattgttcgtctaagttgtttagccttctcgaactttgaacttaccctgccattcttcttgcttttaaagcagtatggcagttacagctttttgtcaatttaaagtcttttttcattttgttacatgataatttttaccttacagaggagaattctgcctaagccaactcgaaaaagccgtacaaaaaataagcaaaagcgtcccaggagccgtactctgacagctgtgcacgatgccatccttgaggacttggtcttcccaagcgaaattgtgggcaagagaatccgcgtcaaactagatggcagccggctcataaaggttcatttggacaaagcacagcagaacaatgtggaacacaaggttgaaactttttctggtgtctataagaagctcacgggcaaggatgttaattttgaattcccagagtttcaattgtaaacaaaaatgactaaataaaaagtatatattcacagta

SEQ ID NO: 530717 - DNA, 1192 bp, Homo sapiens
  misc_feature (2)..(2): n is a, c, g, or t
  misc_feature (84)..(84): n is a, c, g, or t
  misc_feature (88)..(88): n is a, c, g, or t
  misc_feature (101)..(101): n is a, c, g, or t
  misc_feature (111)..(111): n is a, c, g, or t
  misc_feature (114)..(114): n is a, c, g, or t
  misc_feature (116)..(116): n is a, c, g, or t
  misc_feature (120)..(120): n is a, c, g, or t
  misc_feature (157)..(157): n is a, c, g, or t
  misc_feature (198)..(198): n is a, c, g, or t
  misc_feature (212)..(212): n is a, c, g, or t
  misc_feature (219)..(219): n is a, c, g, or t
  misc_feature (229)..(229): n is a, c, g, or t
  misc_feature (242)..(242): n is a, c, g, or t
  misc_feature (248)..(248): n is a, c, g, or t
  misc_feature (327)..(327): n is a, c, g, or t
  misc_feature (351)..(351): n is a, c, g, or t
  misc_feature (356)..(357): n is a, c, g, or t
  misc_feature (361)..(361): n is a, c, g, or t
  misc_feature (370)..(370): n is a, c, g, or t
  misc_feature (374)..(374): n is a, c, g, or t
  misc_feature (381)..(381): n is a, c, g, or t
  misc_feature (385)..(385): n is a, c, g, or t
  misc_feature (389)..(389): n is a, c, g, or t
  misc_feature (391)..(391): n is a, c, g, or t
  misc_feature (396)..(396): n is a, c, g, or t
  misc_feature (400)..(400): n is a, c, g, or t
  misc_feature (420)..(420): n is a, c, g, or t
  misc_feature (427)..(427): n is a, c, g, or t
  misc_feature (429)..(429): n is a, c, g, or t
  misc_feature (433)..(433): n is a, c, g, or t
  misc_feature (438)..(438): n is a, c, g, or t
  misc_feature (441)..(441): n is a, c, g, or t
  misc_feature (449)..(449): n is a, c, g, or t
  misc_feature (452)..(452): n is a, c, g, or t
  misc_feature (468)..(468): n is a, c, g, or t
  misc_feature (471)..(471): n is a, c, g, or t
  misc_feature (474)..(474): n is a, c, g, or t
  misc_feature (484)..(484): n is a, c, g, or t
  misc_feature (498)..(498): n is a, c, g, or t
  misc_feature (520)..(520): n is a, c, g, or t
  misc_feature (526)..(526): n is a, c, g, or t
  misc_feature (546)..(546): n is a, c, g, or t
  misc_feature (552)..(552): n is a, c, g, or t
  misc_feature (559)..(559): n is a, c, g, or t
  misc_feature (565)..(565): n is a, c, g, or t
  misc_feature (583)..(583): n is a, c, g, or t
  misc_feature (585)..(585): n is a, c, g, or t
  misc_feature (602)..(602): n is a, c, g, or t
  misc_feature (608)..(608): n is a, c, g, or t
  misc_feature (611)..(612): n is a, c, g, or t
  misc_feature (617)..(619): n is a, c, g, or t
  misc_feature (627)..(627): n is a, c, g, or t
  misc_feature (641)..(641): n is a, c, g, or t
  misc_feature (654)..(654): n is a, c, g, or t
  misc_feature (677)..(677): n is a, c, g, or t
anaactagctaaaattatcatgctaggatattgaaacacagaaattttacatacatttatgaagggtcaatttagtttggacantgangtatttgtcttantggaaaaaangananttantctgatcaaatcgtgaagtaatacagtgaacttgcangtgcacaaaataagagggccacatctatatggtgcagtctngaattctgtttaantttgtangtacctcttngacttctgaattnatccanttgtcatccaccacagacatctcacatcagatacagttccaagattgacaacagagaacaacctgctggaaagacctgngcagaaatggagacgctgcggganccatnntacnttttcatcnaaanagaaatncacntctntnagctnaaanttctttgtgtttaattgtanaatgtantnaatnggttntgnaaaattcntgnttttatttctttgtgnaancangtttaagaantaggggatatatantcataactatttagggtgggangggctntttaagtaattttaagtggntggggntatttanaatgtnagaataatattatgtatnanatatcgctataagtggncaagcntanntactnnnaacccttnaccctataattgcnatccttaaagatntcaaataaactcggagggaactncaagggagaccactttatttagagcgaattggacatggataaaaaccccagtgggagaaagttcaaaggtgattagattaataatttaatagaggatgagtgacctctgataaattactgctagaatgaacttgtcaatgatggatggtaaattttcatggaagttataaaagtgataaataaaaacccttgcttttacccctgtcagtagccctcctcctaccactgaaccccattgcccctacccctccttctaactttattgctgtattctcttcactctatatttctctctatttgctaatattgcattgctgttacaataaaaattcaataaagatttagtggttaagtgcaaaaaaaaaaaaaaaaaaaaaaaaaaaaaaggggggggggtttttagggggggaaaaaaaattgttttgaaaaaaaggggggccggggaaaacccttaagaaacccccttgggggaaaaggaatttttggtcccccccccaatttccttttgtggaagt

SEQ ID NO: 530718 - DNA, 301 bp, Homo sapiens
  misc_feature (64)..(64): n is a, c, g, or t
ggctcctcgcgctgtttccgcctctgccttcggacgccggatttgacgtgctctcgcgagattngggtctcttcctaagccggcgctcggcaagttctcccaggagaaagccatgttcagttcgagcgccaagatcgtgaagcccaatggcgagaagccggacgagttcgagtccggcatctcccaggctcttctggagctggagatgaactcggacctcaaggctcagctcagggagctgaatattacggcagctaaggaaattgaagttggaggtgatcttctgaaggtgatcttctgc

SEQ ID NO: 530719 - DNA, 126 bp, Homo sapiens
gaggtgacttagaggatccgatagagctctagaacttgtgtgtgagagtgtgtgtagatgccatgtgtgagaaccaagacacgggtatgtgatactctgtgctatattctgagctctgtgtgagca

SEQ ID NO: 530720 - DNA, 831 bp, Homo sapiens
  misc_feature (72)..(72): n is a, c, g, or t
  misc_feature (88)..(88): n is a, c, g, or t
  misc_feature (129)..(129): n is a, c, g, or t
  misc_feature (173)..(173): n is a, c, g, or t
  misc_feature (235)..(235): n is a, c, g, or t
  misc_feature (237)..(237): n is a, c, g, or t
  misc_feature (275)..(275): n is a, c, g, or t
  misc_feature (309)..(309): n is a, c, g, or t
  misc_feature (362)..(362): n is a, c, g, or t
  misc_feature (372)..(372): n is a, c, g, or t
  misc_feature (384)..(385): n is a, c, g, or t
  misc_feature (431)..(431): n is a, c, g, or t
  misc_feature (533)..(533): n is a, c, g, or t
  misc_feature (639)..(639): n is a, c, g, or t
  misc_feature (669)..(669): n is a, c, g, or t
  misc_feature (675)..(675): n is a, c, g, or t
  misc_feature (690)..(690): n is a, c, g, or t
  misc_feature (701)..(701): n is a, c, g, or t
  misc_feature (707)..(707): n is a, c, g, or t
  misc_feature (746)..(746): n is a, c, g, or t
  misc_feature (753)..(753): n is a, c, g, or t
  misc_feature (757)..(757): n is a, c, g, or t
  misc_feature (759)..(759): n is a, c, g, or t
  misc_feature (801)..(801): n is a, c, g, or t
tgccaggctgcgggcggctgcagacctgggagcggagaccggcccgccgcccccgacgccgccgagcacgtnagcggcgcgcaccggnggctcggagaccgacgggcagaacgacgggcggcgactgcngcgaccgcgggacggcgagaggcacgcggcgggaggggaccggnaatccgcagctccggccgcgccatggacggcaacgacaacgtgacccttctcttcgcccctntnctgcgggacaactacaccctggcgcccaatgccatctncctgggccccggcacgacctcgccctcgcccctncctccagcgccggccccggccctgggctcagcctcgggccgggtccgagcttnggcttcagcnccggccccactnnaccccggagcccacgaccagcggcctcgcgggcggcgcggcgagcnacggcccttccccgttccctcggccctgggcgccccaagcgctcccgttctgggacacgccgctgaaccacgggctgaacgtgttcgtgggcgccgcctgtncatcaccatgctgggcctgggctgcacggtggacgtgaactacttcggggcgcacgttcgttggcccgtgggcgcgctgctggcagccttctgccagttcggcctnctgccgctgctggcctttctgctgggcctngccttnaagctggacgaggtngccgccgtggnggtgcntcctgtttggctcctgtcccggcggcaatttctccaatnttatgtncctncnggttgacggcgacatgaacctcagcatcatcatgaccaactnctccacgcttctggccctcgtcttgatgcc

SEQ ID NO: 530721 - DNA, 273 bp, Homo sapiens
aggctgatctagaggtccctcacgccatgtccacaatggagaaaagcaacacgacaaagacatgaaccaactgtggggagataacatgactctattcttaaaaaaaaaaattatccttgggaaaccaagaaactcaaattgggggggggggtgaaaggttccatgagagatgccgcagtaggttggaggggagaaactcagtacatggcagggtctttcaaagtaaagcatggtgggatgaccgagggtgggttagctggggatgggtgctgg

SEQ ID NO: 530722 - DNA, 781 bp, Homo sapiens
aaaaaaaaaaaaaacaaattgtgctcggcgcgcgcgcctctgggccctcggaaaaacgtttctcttaaacacacaatccggttgggcgcgcgcgcggggcgcccagagtgagaggaaagagggaacaagtgtggccaataaggtggtttccctagagagagaacacccggggcctcagagagacacaagaggggcgtgggaattctcccacacacaaaatcaacaaacagcccccgggggggcaacacgggagagagtgtgttcgtgtgaaacaaattctccagagagagtggagagttctctgagagagagtgtctatatatagagagggactctctctatatcacacagaggaggagagtctcccaagagcgagagagcctctcggagtatatctacaaattatatacacgcgcgcccccgcgggggcgccggcgggggagacgccacacacaccaacccgacgcgacgaccaacaaaacacgagagatcaagcggacaacctcacacctactatacaaacaacggcaacattattctcttgtggccgccgaggaccacccgaggtgacgacggagacaccacaccacaccaaacgaccaacaaaagggaaaggtgggactccaataggcatgcgctgcaccaccgaaccagcagtagtatcagcctgactcggccgcaaaagcggaggctggacgaaccacaacccaccgagaagaaaacactctgatgagggctgcagcacctcgactcatgagggaacaatcactaaaataatcat

SEQ ID NO: 530723 - DNA, 411 bp, Homo sapiens
  misc_feature (303)..(303): n is a, c, g, or t
  misc_feature (321)..(321): n is a, c, g, or t
  misc_feature (332)..(332): n is a, c, g, or t
  misc_feature (407)..(407): n is a, c, g, or t
ggccactgtgcctggcctaaattatcctttttaattatgtatcttaaattctttatagtcacaaattcatatctgaaaaagaaatttaaaatgaagtgaatgaagatgatagtcaaactaatgttttaaaaatctacatcattttctctgtatttacacggataaataagagacattaaattaattaaaaagtcaaacttcagttctttgttacttcttaatttattacttgatcaaatacttgatatctgcagataaaataatgggtatcgagacaggcaagaattttactaagctttaagnttaatttaataatttaancacaaaataanatggcttaaactcaactctaggacttcttttattctctaaaaatgtatgggaacatatcattagagttatttganttaa

SEQ ID NO: 530724 - DNA, 1168 bp, Homo sapiens
gtttgccgccagaacacaggtgtcgtgacaaactacccctaaaagccaaatatgggacaatggaagaagactcatatcaacattgtcgtcattggacacgctagattcgggcaagtccaccacatactggaccactctgatctataaatgcggtggcatcgacgaacaagaaccattgaaaaatattgagaaggaggctgctgagtatgcggcaacacgggctcccttcaccgctactgcctggcgctctctgcgactaacactgcaacagctgcagccgtctgcacacccgctgcgcctcatcagcccattctgcattatcttccctttgcatgacgaacactccagcacgcacccacgccaaagctaccctactgcttgcacctactccacattgcactgggccccccaagttggaaccacccaggccagcaaccatctataactccaaaacacaaaacacttgcacctctaaccaatgggccacaaacatccatcaacggccctgcacacctgcctgccattaggactaccccactgccacctctggactctgggcccttaggccctagagcctgtcctaccgcgcatccgcatacctactcaggcaaacacgcccatttgctggctaacctcctttcccacacaccccacaccgctggcgcgtacacaccaaaatcaccccagccaccccaaccttcctcactttgacccccccactaattcccccttgccgcccaataatcacacccaaccccaaaccactatggtgccacaattagtcattccgccaacacaacaaccaaacacacccctcataaaccttactcggtcatacccaacaagccgagcctttatatacacgccacaaacaatacacaaccttgtccgcaccccttataacacccacacccctatttcccacgcacccccccaaaaccacccccaccttatacccccacactcccccccacaaccctacacattactaacactcacctttaaacattaccccaacgccgcccaaccaaccacctactctcaggcccataacaccaaccacgctgaccacaaaatgactttcctaaacactctcacaactcctctacattaaaccccataaattactctaaccacccgtccactctctaccatcttttctggccta

SEQ ID NO: 530725 - DNA, 411 bp, Homo sapiens
atcagcggtcccatgctgtcttcagatggtaaaagaacaaactctcacacgaattcacagaggagagctcatttactgtctcattaccttggggactgcactccagcctgggcgacagagtgagactccttctcaaaattaaaaaaaaaaaaagaaaaaaaattcagttcgtggtgtaattctgaaacaaaatggaaaacagcccctttccctaagagctaaggtccagtctgccttcacaggactcacaaattagctacaaaattagaaattacagtttagggctcctgcaggagtatgtcactgttgtaaaactaagatcgacgcttgagatgttttgcagagcctgcatctggcggatcggctgacaccacctagactggccatctggcaaaaccagctctgccatcc

SEQ ID NO: 530726 - DNA, 918 bp, Homo sapiens
  misc_feature (222)..(222): n is a, c, g, or t
  misc_feature (239)..(239): n is a, c, g, or t
  misc_feature (245)..(245): n is a, c, g, or t
  misc_feature (690)..(690): n is a, c, g, or t
gaaccaacaaatttacaaaacagaatagcaactaaaagacaaaattaaacaactagaaagtccctccaagtacgggctaaaacgctcaaacctaaggataacagaacagatatacaatagctatacaaataaatatgcacatatatacacatttcttttagacaccaaatttcaaataagccttattagatacaacgcagcacactctgacacaaacgtccnatataaagggtagctgnttgcangcggacaaagcaaagccccccccccaagagcccggtaggctcctaaatttctgcttctatacaatctattacctaaacttattgcttgcactttatactgttcaccaaaattagaaaacacaatgggaatgcatcggattccaaaactttttaacctatggcagcctattaagaaactaaaggaggctggacgcagtggctcacgcctgtaatcccaacactttggaaggctgaggcaggctgatcatgaggtcaggagatcgagaccatcctggctagcacagtgaaaccctgtctctactaaaaatgcgaaagttagccgggcgtggtggtgggcgctgttagtcccggctacttgggaagcttgaggcaggagaatggctgcagcttggggagggcagagttggcagtgagtccgagatcgcgccatggctccagccctggncaacagaatgagatcccgttccaaaaaaaaaaaaaggaattaggcgggaattttttacctttccggtaaatggactctgaaatgtgaaccccggcgttttcaaatccttgcgggtaaaaacggtctggatcccgaattttgaaggggtcaaatctgggcgcgaacgactatctaaaacagcgctcgagacacggcgggatatacgtaagagaaaaagcgggcgaggca

SEQ ID NO: 530727 - DNA, 1033 bp, Homo sapiens
tctctggtgccgctgaagccggaaagatggttgagctcatgttcccgctgttgctcctcctttctgcccttcctatcttgtatatggtctgcgcccaaaatccaggaaaatgctgtccagtggggtgtgtacattcaatgtgtacagcttcctgggacaagctagtggtggtcacaggagctactacagggtatcggggaaggaagcacagccaaaagaagctgtgcatcagacagcgggacgcccagaggatcatataatagcttgagccgggacattgctgcacccacgggggccaattgggggggcccaactgaggatccaaagaccaagggaccacgggaacccagcaacggtgttgtggcggcgcaacaactggcaccatgttctggattaacaaaaggcataactcacgagagcttttgcgccaaggggcctccttcagctgaaggaacaagcaccctcacaggtttggatcaccactggaaggacgttgatgcatggcggtccggaactcgaacacaagacaatgggttggagcatgcaccatcgggagtccaccattggcggtccacttcttcttaaaccatttggtgtaagacgaaataaaaggaattaggccaaaaagggtatgaaattgtgttccctccgcattcaccttgggaggcatccccttcataacctggagggagagcaattaacaacggagcacgcatcgtgaaagcagttggacaaactttttaccaggatggggcctgcggaacaaggtcgctggcacaaattttgagccacgcgagacacggtacccttcgggaggggagagaaaattaccagagacaactagctagctcatcgttttttcttctttctgcttcttccttcctccttcctccccgtctctcgtctatcttacacacaccacccggggtaacgagagtagaacagaccacgaaatgaagagcaacaaaacctagagataaaggaacacgaggaaagatacaaaacaaacagcaaatagcaatacacagaccaa

SEQ ID NO: 530728 - DNA, 132 bp, Homo sapiens
taccagctattgtcgctgtttcatagggaacagtcaagcttagccacatgcagtgtcgcagcccaggaagaggaaggagacgtagcaagcagtgtacaccaggttgacgagcattgccatccggattgcccc

SEQ ID NO: 530729 - DNA, 654 bp, Homo sapiens
  misc_feature (498)..(498): n is a, c, g, or t
  misc_feature (654)..(654): n is a, c, g, or t
accctgcgtggcaatccctgacggcaccggcgtgatgtcccagagaagacagggacgagctgggagtccaactacttccttaagatcatccatgtgatggatgattatccgaaatgtttcattgtgggagcatgacaattgtgggctcctaaggacacgatgcatgtcagtatccgcatgtcccttcgcgagttgaaggctgttgtgtgctgatagggcaagaacaccatgatgcgcaaggccatccgagggcacctggaaaacaacccagctctggagaaactgctgcctcatatccggggcgcaatgtgggctatcagtgttcaccaaggaggacctcactggagatcagaggacatgtttgctgggcaataaggtggccagcttgctagcccgtggctggtggccattgccccatgtgaaggtcactgtgccgagcccagaacacttggtctcggtggcccggagaaagaaccgtccttttttcacaaggggctntataagagctaggtcaacccaggctgtagaaaactccttctccaagggggggtcaatccaagtttggaagacaagtcctttgaaggtggatttgtggcaatgcctgagtcaattgaccttggatgacaacagttgggatgccaggagagcaatgcn

SEQ ID NO: 530730 - DNA, 1713 bp, Homo sapiens
  misc_feature (379)..(379): n is a, c, g, or t
  misc_feature (412)..(412): n is a, c, g, or t
ttcttttgcaggtcacaatcatcgacagcctctaagtctcgcacatgtattctattcactctgactaaagcctagtaaattaaacatagactaatcctttatataacgcgaggattactaatccataattaagtaaacccatctgttaccactaggacagctgccaatcacaggtattaccttcacagcatgacaatcggacattcccatatattccttgcgtagagtagtcctagtgcgctcttctccaagcaatgtatttactcatccgagtatcaaatggagagcgcgagtgaacctcaaatcactatgccaaatctgagatagtgtgcgactcgagtatacactagagtcgagtatatgtgcgccgtatatatgnacaacctacacacagcgtacgtgtatattatgncctccactgtgtgtcaatgatctcttgtagggtgtcgcccagtgagagaatgtacccacgaaaggggccatcctccctcctggacccactcccagagaaccctggtcctatccgtgttcatccaaccaattgcaactacacagagaacctaaatctcacactctaatacatgacaaaatatctagttacttaggcgcgaaccaatacttcttatcccacttcctagtgtaaaacatcggtatagagtgtcgctattacttctcttccaatcgtcatccctacgaatgtgcgtataaatacctactcccattagtataaggggctacggtttggacgtgctggcggagtttgaaaaacccaaaagagcgcccaaagctttatccggcaatatatatggtctttgaggggccaattaaccggtccccttatccaaaaattattaatctctccaatccaagtgagggtgcgaatttgggaagaggtacaccctcactggtccaaggaggggcgctaactccctggtttcacccaatatcggcggcgtgaaaaagtgatgttataagggcgagatagtttccgtttttcgatggttgtcgtcacacccgttgaggtgctgttattctatcctccgagtttccccgttgagaaggcgttacccgataagcgccggcgcgagtttctcctttaaaccgttaagcttttcacagcgttgatgaaagggaggttccctcggagcaccatctccaatcggtgagtcccccctcttagggttaacccttacgtttccttcgggtcccccccgtggttaaggaagcatgatgtcgcctaacaaccagtttgggaacgtaaaataccaaggggcccgttggtgaaagtgttgtctccagattcctcaaagtctcctttctccgttaacaataccccctttatgggggaaagaggccgctgtgttctcaccacgggacttatatatgcggcggagaagtaggcggggcgggcccgccagggggaacaaaccaagccagtggaggcggggagcagggggcgggcgcgctggtagacaagaaataatcactcccacccgaagagggggcgccgcacgctgaagccgcggaaacaccgcagcgcgagacgatggtgcgccacccaaagcggggtggggccccccaaaaagaaggcagcgcggccgacccccacaaagagatagcgccagaacacgcgcagcgaacaaaaaacactggtggaccgcgggcgcagcagaggggccccacatggtgggaccaccctcgccagaggaggcc

SEQ ID NO: 530731 - DNA, 409 bp, Homo sapiens
ctagagtatcccaagcttcgactgtatttaaaaagaaggaagattgtggccaggcgcggtggtttacgccgtgtaatccccatcacttttaagaggccgaggtgggtggatcacctgaggtcaggagtttgagaccagcctcaccaacatagtgaaatcccatctctactaaaaatacaaaaaatttgccaggcgtggtggcagttgcctctagtcctagctacttgggaggctgaggcaggagaatggtgtgaacctgcaacaactatatcctatattcatttgttcatttgtttattcatcaaatgtttctttttaacagctttttgggatacaattcacataccatacacttcactcatttaaagtataaaattcaatggcttttaatatatttccagagttgtgc

SEQ ID NO: 530732 - DNA, 360 bp, Homo sapiens
acccactgatcatggcatgcttcattgaacaatatcagcgtattatacgtgcgttacaaattaagcatttgtgtcatgagctatgccccttagagatggtcagcttttcgtcaataaatgtcctgtatgaccatctggcagcctttccctatttctcgtctctctcatcaggcctcgctgttacctgaggcattacaagcttgaaattaggccaatgatggcacgtacgatggcatctaagtgttcagctaacaggcatagtccccatctctcactcttctttaaatcgagagccagacatgattagcctcagcgagatagtcatgttggaggccacgagagcctgaaatctgggcaggc

SEQ ID NO: 530733 - DNA, 1013 bp, Homo sapiens
  misc_feature (756)..(756): n is a, c, g, or t
ggccaactctcgcaactctgttcttccgacgctccgaccgtcgcgttgctctgccggtcgcaatggaagaagagatcgccgagctggtcatggacaatggctccggcatgtgcaaagctggttgtgctggggacgacgtcctccccgagactcggagtttcctgtccatcgtgcgggcgccccgataacaccagggcgtcgatggtgggcatgggccagcaagggactcctacgtgggcgacgcaggcccagagcgaacgcgtggcatcctgacgccctgaagataccccattgagctatgggcatcgtccgccaacgtgggacgagatggagaagatcggtggctaccacaccttcgtacaactgagctgcgcgtggccgcggaggagcacccggagtgcgtgctgaccgaggccccccctgaaccccaaggccgagcaagagagaagatgactcacgatcttatgtcttgacgaccgtttcgaatggaaccaggtccatgtacagtgtggtcatccaggacgtggctgtaccctctacgacctctgggtcgcacgcaatggacgattgtcatggattctggagaaaggtgtcacccacacggtggcccatctacgagggttatgctcttccccatgcaatactgcgtctggagctggtggcgggactgaccgagtactcgtgaaagattctcactgttcgaggtgccgtttcaccaccaggggtgaggcgggagatcgtgcgcgacgtctaggnagaagctgtggtacgtggcctggtcttcgagcaggagatggccacgcgatctctctgcttggagagactgccagtgccgatgcctgttttgcatgggaaggacgtccggtccgggcgcggcactcttcggtgaactggcggccgaaccctcacccgagggggggaccgaacttccaccggtttggggcccttcccgtttcgagagagacccggccaaaaatcacccaggttgggcccccccaaaaaccctcattttg

SEQ ID NO: 530734 - DNA, 214 bp, Homo sapiens
tagctgggattacaggcacccaccgctacacctggctaatttattgtattttcggtggagacggggtttcaccatgttggccgggctggtcttgaactcttgacgttgtgattcacccacctcggcctcccaaagtgctgggattgcaggcatgggccaccgcgcccggccggagcactgcttttctactgtgaagtttttatttcccattcag

SEQ ID NO: 530735 - DNA, 131 bp, Homo sapiens
ggtttctaatagtcaagtgtggttttaaaccgggtggtcggcccctccaaatggtttttaaaaacccctccaaccaccctgggctttccgaatttgttggtcacccgaaaaaattttcctgaagcttgtaa

SEQ ID NO: 530736 - DNA, 452 bp, Homo sapiens
tttaagtattaccattttacaagtaaatactcactaaatgtgtgtatcatcccacaactagtggaaggtgggattccaaaccacatttgtaacttaggaaacgtgccctttccacctacaataccacaaataaattgctattgtgaataaagaatggaaccagtcatcctaagctcctggctgtaacaatagtgttatgctgaggaaaggctgtttctttttttttttgagaccggagtttcactcgtcggcccaggctggaagtgcagtggcacaatcttcggctcaatgcaacctctgcctcccggggatcaagctattcccctgcctcagcctccccgagtaagccgggatttacaggcacccggccaccaacgcccgggccaatttttaatggtttttagtagagacgtggtttcaccagtttggccaggctggtctcaacctcatga

SEQ ID NO: 530737 - DNA, 248 bp, Homo sapiens
  misc_feature (1)..(1): n is a, c, g, or t
  misc_feature (174)..(174): n is a, c, g, or t
  misc_feature (225)..(225): n is a, c, g, or t
  misc_feature (227)..(227): n is a, c, g, or t
nctgcaggaattcggcacgagaatctgtaaccttagccccaaccctgtgcttgcaaaaacatgtgctgtgttgactcaaggtttaatggatttagggctgtgcaggatgtgctttgttaaaaatgtgtttgcaggcagtatgcttggtaaaaggcatcgccatgctccattctnggttacccagggacacagtgcactgtggaaggccgcagaccctctgcccangnaagcccgggtattgtccaagg

SEQ ID NO: 530738 - DNA, 506 bp, Homo sapiens
acacacggttttgtaaaaaattaaaaaacatataaagagcatagaaaaaaaataaaaaaaaaaaaaaaaaaaaaaaaaaaaaaaaaaaaaaaaaaaaaaaaaaaaaaaaaaaaaaaaaaaaaaaaaaaaaaaaaaaataaataaataaaaaaaaaaataaatagagacaatatacaaatatatcaaaaagaaaatcaacaatcaagttatcttgtttataatatcctaggagtaaaataacctcagatggcagctgaattcaaatttatttaattatgttgacttattattctatttcgcctcaaatcgatatacataatgaaatattggctctaccgatctttgaaattaaattgtggcattgatcaattgatataatcgtgtgaaataagttagttaagtcaattcttttctcattaatgttattcactaattcgatcatatatattaaattgatctactttattatgacttcctataatttttgcacctgaaggatctcttat

SEQ ID NO: 530739 - DNA, 965 bp, Homo sapiens
gcctttgaagtaaagcagacattggtggtcgctatggggattgctggctcagatgtgtccaagcaagctgctgagcatgattcttctggatgacaacttggcctcaattgtgacttggagtgagagcgaaggtcgtctgatcgtttgataacttgaagaaatcctattgcttataccgttaaccagtaacatgcccgaggatcaccccagttccgtgatatttcattgattgcaaacattccactaccatctggggactgtcaccatcctctgcattgacttgggcactgtacatggttcctagccgatcatcccgtggcttatgagcaggctgagagtgacatcatgaagagacaggccagaaatcccaaaacagacacaactcgtgaatgagcggctgatcagcatggcctatgggcagatcggaatgatccaggccctgtggaggcttcgtatacttacttcgtgattctggctgagaacggcttcctcccaattcacctgatagggcctccgagatggactgggatgaccgctggatcaaccgatgtggaagcacagctacgggcagacccgtggcacctatgagcagagcgacaatcgtggagttcacctgccacacagccttcttccgtcagtatcgtggtgcgtgcagctgagccgacttgcgacatctgtaagaccaggaggaactccggacgtaccagccacgcgatgacgaacaagatcttgatatcgggcatctcgaacgagacaccctgactaatttcctttcctactgccctggaatgggacgttagctcctaaggatgtatccccttaaaaacttacatgtggtacatgtgctttccctaatctatctcaatctcggatactaccggaatcagaaaacccatcatcagcagaccctggacagctagatcgaacaacgaacctactaaagcccccgactagacgcaggagcc

SEQ ID NO: 530740 - DNA, 1301 bp, Homo sapiens
gggcggatacgccgtgcagcgtgggtgggccctggggtgccctggtggccctgggatggggaacctgcggtgtgcttcctgcggaggtttcggcagtggcatcctggggccggtggtcagcggcctgtggacggtggcctggaggcctgaggccgctggagcatcgcgggagtgcaaggccgagggataagtgagtggatgcccagtcatccaatgttggtgccggcttgtgtcaagggacagtgaacgatcaaggtccctgtgatggagatcttagtcgtctatcatcacctggcccagttagcgcgacacttcaggaggatcagttgatatgtcatatccttgggcggtgccctcttcttcagagggattgacgcgctctctcgcgacacgaatttattggcacaggatgccacgcaaatgtcatgagcccccgggttgcccgtagtacccaaggtccgatccagcccagagggctttccagaggagccgagctacagagaatagtggcagttaaattacggatgagaatccttaagccactatttgggccccaacccgcttcctcgtgaacaccttgcgggactcgattagaacgcttgtacttcccgagaacggggaaacgggggattcggggtcacgagccgccgtggagcagcaagacgttaccacaggggattgcgagcgagagatcagccagagttccgagattaccacctttagtaaactccgaaagagggaccttcacgttacgccagattactcgggattctcgaccaccggggcttgagcttgcgcagctgcatgtggcgcgtcataaagccctatggtagcgcactctcgaaataatcgctagaggtgcgaacttcaccgtcagtgcacaagaagtgtgctccacaccacgctgcactggcattgggcaatgcccccccttatcgtgcgccaaacaggtggtggtatgggccgaccataggtcttggactcgtcccgcgctttctgcgtgtgtgcgctaccattccctttgtcgatttcggcctcgtttgtgcactcattataaccgcctgacccccaccgtttaccgacatgctttcaccgctccgtattgtggtcgcctgacgtcgcgccccacaaaagtgtgggcgtggtgtcggccccaacaccacttgttgtgcacgatcgcacaggactatccgggcgtgttcgcgaattcaccatcggtagcccagatcccgcgctgttggactctgcgcgtcgcgctttaacgcgcgctcgaactgacgcgggaccccttagcgcccgta

SEQ ID NO: 530741 - DNA, 107 bp, Homo sapiens
  misc_feature (47)..(47): n is a, c, g, or t
tcctgaagtccgaaatcataatggaagtccgtaaagaaggtatcttnactataaaagctattgtgtaagctagtcatattaagtagtagtctcagtcttacctgtaa

SEQ ID NO: 530742 - DNA, 337 bp, Homo sapiens
tacagtggcagtcggataaaggcacagccagtagtaacatcatggcatggatatgaagtgtccgagctggatgcgcgcgtaaagcgagggacccaatcatatgcggggtgtgctagtgtaagagacatcctatctgagtgaggggaagggagctcaggctttggacctagggccagggctgggatcagacatgtatgggatgcggtctgtgctgtccttcgaggcttggggctgagggtcagaggagagcagagctcacatctttggaatctcacttcctttgggtactagacggcttgctttgatcttgcttgcatgatcttattattcatgtcct

SEQ ID NO: 530743 - DNA, 131 bp, Homo sapiens
aattcccgtgttacgctgccctccggctccaagactggttctttcctcagccaacagagctgtggttggtgtggtggctggaggtgtccgacattgacacatccatcttagaggctggccgtccgccccga

SEQ ID NO: 530744 - DNA, 128 bp, Homo sapiens
  misc_feature (10)..(10): n is a, c, g, or t
ctagaggacntctccccggttctgggtagctggggctacagttgcacatcaccataccctgctaatttttattttatttttgtaaaaatgagggttttgctatgttgcccaggctgctctcatactcc

SEQ ID NO: 530745 - DNA, 183 bp, Homo sapiens
  misc_feature (98)..(98): n is a, c, g, or t
  misc_feature (125)..(125): n is a, c, g, or t
  misc_feature (150)..(150): n is a, c, g, or t
  misc_feature (158)..(158): n is a, c, g, or t
aacttgaatttgggtttttaacttaggtttgggtggcggacggggtgagtaacgcgtaaagaacttgcttcacagctagggacaacatttggaaacgnaatgctaatactctaatattatgatanatagggcattcctataattatgaanagctatanagcgctggtgagacagcattataca

SEQ ID NO: 530746 - DNA, 793 bp, Homo sapiens
ggcgggacgacgtcgtcagacgggggtggcccgtgggagctgagcacggagaagactccctctctcggaagcggatccgagccggcaggatggatcaccaccagccgcgactgggcgctaccaggtgcttcttactgaagaggatactcagaatcatcggctatagagcagcacctattcaaacccagcaccgagatggtgcagggctgcgtcttcaagcacaagcattgaaatggatcttcccctccaccatatagtagtatttacttgtggaagtacctaacaatttcagatccagaagttacggggagtttatccggtgccacctccttataagcgtggttacctctctttcctaatacggatgaagctgagaaggggctaaaagtgctgcaatggcagttgcaggagagaaaaatctcaaagaatcaggagggaagagtggtcaccaagagatgactttcagtgatgcagaccagtcaagaggtgggaaatgaatggcatttcaatgctggcattttttcagtgcatttaattttcacaacgttgctggggattgggtgtaaatccgttcttgttatcaccaattacccataagttggaagggtatggctggctattctgcgggagttgtggacctttccgttgattcaaagtggattcttattgtaaggggtgcgtgattattttacgggactatttccaatggagcaagattggcgcttggggggagattccttgtaatttgggccgcgcctttcctgcagaggagttgtgcaatatttacaaagcg

SEQ ID NO: 530747 - DNA, 286 bp, Homo sapiens
gggtcccaccttgtttttatttcttaaacaatttttgtttgccaaagttaaaaaaaattggttgttccatttaatttttttaaggagttccggtttttcccagggccttattttaggtttttttcttttggaatttccttttaaatttttgttttccctccccttttaccctttgttaaggaagttaaattccttaaaaggaaattcttttggggttttttgcctttttttaatttttttctttgggattaccttccaaaattaaaatccggattttttcctttta

SEQ ID NO: 530748 - DNA, 390 bp, Homo sapiens
tcactgacactttttgtatcatctaactaagatagacacgtgtgtaatgcgattccgtcaacatctctgggactactattattcggtataagatatttaccattagcgataaaatcccagaaatggaattgcaaggtataaaagattattaacatttttcaaggctttaagatgcctttacggtgtatctgttacatcctgcttccacacaaattcttctgtatagccagtacccaagctgcagctctcagcacaggtgaagacagccaggatgccccagtcaatgctcttgcccagtctgtcagccttcaggtagtttaggagctgaggcatgacctggaattccaatattctcttggcaccacaggggcaatctggaatatccttttc

SEQ ID NO: 530749 - DNA, 503 bp, Homo sapiens
  misc_feature (415)..(415): n is a, c, g, or t
ctctatggagacggctgggaaagggattccatgtggggaggatcccagcagtgtggagcccagagagctagcgagggagggacttgttgtcatgagaagcagcacttgtctgttattcaaaaaccaaaagaaaatttctggcccagatgttgtggtatcagcttgtggaagcccctggaaactttgctcaggatccacccaccttctctttagagacagtccctttccttcacagagttcactgatgaggtgagtgtggctggcccggaatctctagagctgtctctgcctgcctctgcccctgcccctgcccctgcccctgcccctgcccctgcagcactggctttgtggggtgtgccaccacacctactttgtttttttttttcccatgggtgctaaggtcaaacttggagcncctagttgcgcacctatacttttagcaatcacataggtgctgggcatcaagcaggagttactcagtgaggcttttgtctcagaacaaa

SEQ ID NO: 530750 - DNA, 259 bp, Homo sapiens
gctgatcgcttagaggcgcaaagaaaagaatctcaagtgaaaggacccgttcgaatgcctacccagactttgagaatcactaccagaaaaactccttggtggtgaaggttctaagacgtgggatcgtttcccagatgagaattccaccagcgactccttgacttggcccgtccttctgagattgttaagccgattacttccctcagttattgagcccggagttgaggtggaaggtccacccattgccagatgcttaagc

SEQ ID NO: 530751 - DNA, 160 bp, Homo sapiens
gtgatgggacttcagcccagtacaggagcatcccctgcaggtttctctgctttgatgcttctttgctttatgcttcagttcttcttttcaccttctactatttctcttgctgccttggctttccccaaaggccttttcactgtgtgtgtgtgtgtgtgtg

SEQ ID NO: 530752 - DNA, 199 bp, Homo sapiens
ctgaactttatttgtgcatcatttgtttacttagacactgccagatctctgtgagatctggaatcttctccctccatccctgctgtatcgtactgccccgtgccctagaataagggctcaggactacttgtaaaagaaagcaaggaaggaaagaagagaggagggtgtttgttgagcacctactatgctgtaaaagctt

SEQ ID NO: 530753 - DNA, 92 bp, Homo sapiens
actaaacccaagatcaactccccctgcaagttgaagtcctggcattgaagtttaaaaaaattacagcccccaataaaatttttaaagggtta

SEQ ID NO: 530754 - DNA, 197 bp, Homo sapiens
ccaagtacttccagattggaaccatttttgacaatccagctgatttctaccattaacgaattcccaagaggcaaagaaaaagatctattgtggaggacctctctgtctgattctgaattcagaggatacacccgaggagggtactcagagatcatggctaaaagcagcaattcagcaggaaaaagtccgaagaggag

SEQ ID NO: 530755 - DNA, 497 bp, Homo sapiens
  misc_feature (497)..(497): n is a, c, g, or t
gcttcagtgagctgggcagcaggaacgccaaggagctggccttccgggacagctgggtgtttgtcaggggccaagggtgtgcagtaacaagagcccctttgagcagcacgtgtaagaactagtaagcacgagcaacagaggtacgaagggctggcccgaggcgctggagcatggacaggctggtatcccggcggcagaagtcacggccagctagcacggccagtgccatggaccgggccgagggagtgccatgaccaagggaggcacgctgcgtctgccggagcggacagaggctgaggctcacaccccagaacccgggcaggagcgctccctgtggcccaacacatcggggctccgaggcagtgaccagaacgtggtctcaaggtggctggagggctatagaggggcttgcaaagaaggtaaccacagaacgcagcttacgacaacgggaagcaccagagatacccagaattcctattcgtaacactgatcccccn

SEQ ID NO: 530756 - DNA, 423 bp, Homo sapiens
agtctggacctggctgcagtgggcatattaccgtatggatatctttttctttctttttttaaagtgaggagattcttcagggggtcaggctgagaatgtaataagcctgacattggaacagatttctcccgtgtggtctagctggaccctccgcatggccacactccctgccagtcctgacattgacttcctgaatgtgattaggtggtaatgagcaggaatgtcctaggatgttgagacatcgggatccaggcccccagtgaaatggtgctgaatatggtgagtgtgtgtactccgctcactgtgccagggtgctttcctctaaccgaaatggtacgtgtagccgttgcgaatggtgcaactctcaagtcggagtgggcgccacggtttgagtgaaatggctgtgaaaaccttagagaaggg

SEQ ID NO: 530757 - DNA, 649 bp, Homo sapiens
ggcacacacacacacactgccaggagcgggggagctttcgggccacactcccagacgcctccctgagccctggaaccctggactcgttgctcctggccttccataccccctgggcagatcatcctgcgtgtcccaccccagatcccacgtctcgtccatcgtctcattcctgattgtgacaccgcgtggtcaacgacatggattagaggagaagggatcatgaaggtgttgggagagagaggagggatataaagtccttgtagtatattgtctgagattcaggggatatgtgagtcgaaagggaatgcatgatgtatacgtagatacgtacagcgtatcgtagggatggcataggcagagtgagataaggatcaaatgaagcgtttgtgaacatagtggtaatgcaaacatggtactggagaagtagatcgcggactcaatgcttgccgcttgcgtccatcgcccgccacgggccacaaggcgaccacacgtaacggtagaacccctacgtatggatcactcccgctgccgcaccacagccgccccccaatccgccaacaacgcgtccaaacgcccgacaaccgccgccgacggacagcgcgcacggcggaccacccttggcgaaccgggcgccccgacggggccacac

SEQ ID NO: 530758 - DNA, 337 bp, Homo sapiens
ttttttttattatgtatgtttgtacactttttacattactgaatatcaattacaatgtgccatgttattatttttttcttgtagtatgaaacatccatcttgcacatactctactgttgcaaagcttccttataagggggctcttttatctgggatcttaaccagatggttgctgtctgggtagcactactacaagtttagaactcgcagtgtctttcggaatttacaaaataaactgtatacttataggctgcggtttctgtttcgttatggggttttgtttagtctggttttacacttttagttactgatgccttacgaggtgatgtttgagata

SEQ ID NO: 530759 - DNA, 240 bp, Homo sapiens
  misc_feature (212)..(212): n is a, c, g, or t
aagcagagcatgtgtgctccaatccagaacagtgtctcagctcagaggacaggtctgctgtgtgtgtgggactctcctatggatcctgcatgtctgtgtgtcctgagaggacatgggaatcagggccacctctcctcgaatgcggggcagagagagagccttgacaccaccagcctctcctccctgtgccccaggagttcatcctttgctgnctggcccgggaccctgcccggcggttct

SEQ ID NO: 530760 - DNA, 568 bp, Homo sapiens
  misc_feature (6)..(6): n is a, c, g, or t
gcaaancaagtacaacctcacttgaaataattaagaaccattttactttacctgtccctaaggccagcaaatctccattcagctcatggcttttagggtaacggactggggaaaagagaagcatggaatgtaagtccaacattctgacttttctgagggccacccaagggatgggtttctgtcttgcctggagcactaatggaaacagcacaggttagatttctgggtgccaacaaaagcaaaagagaacagaaacagattgctatggcaccagagggccagcagtaccaaagacagagactgggatgactcagcaccattgggaaaagacatccaacttgtttcttcgtcagaagtgagagagaagagtgaagtacatgcttcaaatattccagcattttggagaggtgccagagggaatgatatctctcacctgctaaatggtgctgatgaggaagctggcatatattgaaaaaagctggttggtgaaggactttccccataagaagccagtccataaagactaggaaaggcagctgttttttaaaattgcataaaaactcagcca

SEQ ID NO: 530761 - DNA, 248 bp, Homo sapiens
ccttttttcctttccttttttcccccctttttctttcgggccttttaaaaacaccctccctttttttacatttttatttacccattgtttcagggggggggggggtgacctttttccgggggggggggcttggtcccccccgggttcccaggggtccgtcccttgggaagtttagcccgaatttttgttttgccccccccagccccgccttggcccctttttttcccttaaggaaggtccccctttta

SEQ ID NO: 530762 - DNA, 439 bp, Homo sapiens
  misc_feature (34)..(34): n is a, c, g, or t
  misc_feature (309)..(309): n is a, c, g, or t
aggaacatgaggccgcctggttttcaactccgcncgggagggcgttgcgccctggcgcgcgtttttggaaaactggcggtgcacggcgcaaagcacggcgtggaggacttttccgtgagccaaacgatgctggaggaggtatttttgtacttttccaaggaccaggggaaggacgaggacccccaaaagcaaaaggaggcaggagtgggagtggaccccgggccaggcctgcagcaccccaaaagggtcagccagttccttgatgaccctagcactgccgagaatgtgtttttagcctccctcccctgnggggccgcggggaggccctgggaatggcaagggcaaggtaaagtgcctaggagccctggactcaggctggcaaagggggtggtgccctggagaaaataaaaaaaaggctggaaagaacccgtgttggtta

SEQ ID NO: 530763 - DNA, 220 bp, Homo sapiens
  misc_feature (129)..(129): n is a, c, g, or t
gtatgatgcatggcacataggagcgaatcattggggcgcatgaaagccataggcagcctggaagagggatgaaggtggtgaagcaggaagccaagtgcaggaagtgtcttcctgcctgcctaggcatgntcattatgatgttgggcagtgttcagaagcccacagaagattctagaagcccagatgccacgagagagaagagaggccaagatctctctta

SEQ ID NO: 530764 - DNA, 738 bp, Homo sapiens
cggggggggtattttccgccgcttttgtgcggtcttttgggggttggtgtcgggggtgtttccgggtgtcgcgtatccgcttactgctctccggggtttgtttgtgttttgagtctttttatgtatggggggcgcgggggtgttctccccacggtgtggtcctccggcggggtgtgttgaagctcctttggccctcacaggttgagttgtggtttgcccggtggcccctcctccagaagtgcttgggggttattaggggcggtggggcgcaccacgcgggtcacagcggctataagctgcacacacctgtttaaagtatagttatagagtgggcaacctatgccacatattttgttgggtattgtttatccacacacaattgtgtaaaaaaaaaaaaaggaaggccacggcaccacgtggctcaacgcctgtaaaccccacgcacgtttgggaaggctcgaggcacaggcaagagtcacacctcgagggtacaaagaagttgagagagaccacagcctgagccacaacactggaggaaacccgtttttattataaaacacccaaattatgccggggaatggtggcacacacacgcctgtaattctcagctaacttcgaagaaggctgaggcacaggagagaaatcgcttgaaacctgggaggcggaggttgcagtaagctgagatcaagcccttgtaactccagcctgggcaaacaaagagcgaaaactcaatttcca

SEQ ID NO: 530765 - DNA, 270 bp, Homo sapiens
  misc_feature (126)..(126): n is a, c, g, or t
ggctgtaatggagctacagctgcggctatgctacagccacagcaacttgggatctgagctgcatctgcaacccacaccacagctcatggcaacgcccgatcctcaacccactgagcacggccaggnatcaaacccgagacctcacagatactagttgggttcgttacagctgggccattacaggaactccacaccaaagatttaagttgcaatgggaatctcattgctgcaagccagcctctctgattaagttgtagcagccacatgtgg

SEQ ID NO: 530766 - DNA, 239 bp, Homo sapiens
acgacatactagtatgaaaataatgatagattgcgattctagacacgctcccgtggataattataccacgcgtattccgaagattgttttatagttaaggtgactcaaaagcattgtcatacacagccgcagaaacaggcttctcgctgactggggtggagtcaactgctctgcactcagcgttggtggtcactttgtgagacacagggcagcacatccacagtgagtgagcgaggcag

SEQ ID NO: 530767 - DNA, 218 bp, Homo sapiens
acccaaactatatcgagatatgtctgtagcagactaaattattctctcttcttttcttttctgcctaaaaaaagaagggtcttactctgtcacccagggctggagtgcagtggtgtgatcatggctcactgcagactcgacctccccagcacaagcaatcctcctgtcccagcctcctgagtaaatgggactatagacatgcaccacggtggttccgc

SEQ ID NO: 530768 - DNA, 196 bp, Homo sapiens
  misc_feature (159)..(159): n is a, c, g, or t
gcggaccatgcttatggatatacaacattcagatgactctcccgaaaattacaccatagctaatcaatttcctcttaataagctcactgaacttctccgacatgacatagcagccgcttggcttcactgaagcacttacctttgccctgtgctcccaangaagatattgctgataaactaggtgtggatatctctg

SEQ ID NO: 530769 - DNA, 208 bp, Homo sapiens
  misc_feature (98)..(98): n is a, c, g, or t
tgggatttttggaaaggaaatggggaaaaaaattggggccccctttgttttttggcaattggggggtccggtccttttttaaagcccttccccataangggggttttccggtttttttttagggaggaccccccaaaccctccctaacgggagggatgtttttgtttcggtttggattcctaaataaaaggtaaccccgcccccttta

SEQ ID NO: 530770 - DNA, 356 bp, Homo sapiens
ttcttttttttagttcgtccatacagggcggctcaatagggggaaacttagagtgtggtcttcgccaggcatggtggcttatgctggaatcccagcactttgggaggccgaggcaggtggctcacttggggtcaggagttcgagaccagcctgactgacatggtgaaacttgtctctactaaaaatacaaaaattagccaggtgtggtggtgggcgcctgtaatcccagctactggagaggttgaggcaggagaatcacttgaacccgggaggtggagactgcagtgagccgagctcacgccactgcactccagcctgggctacaaagcaagaccctgtccgggcctggtggcgca

SEQ ID NO: 530771 - DNA, 388 bp, Homo sapiens
ttagattatactagcgagggtagcttgctattcttcgccgatccaggacaacacttgtgtgtgggaattcttgcagagcttcatgattggatactttatagaaaacgtaacagcgacctttaaggaaggaactttcatccccgttcttctatgtgaggaaagcaatgaccagagcacggctgccttgtattcaactcccaggtgaaaggaggcagcttgctgcatttaaacgtgggtctgcttccaagcccagcaatgatcaagccggctatagtgggcgcagcagagtggcagcatgaatctgagattggtcgcagtgtcttgtgcctactgaggagcaggggccatgttcctccccctacaactagcactgagccacactgagcac

SEQ ID NO: 530772 - DNA, 151 bp, Homo sapiens
caggcagggcggtggccacacccataatcccagcatgtgggaggcagagggtgggcagatcaccgtgaggtcaggaatccgaggccagcctagggagcacggcgaaacgtcatcgccaccaagaagtacaaaaattagctgcggtgtggta

SEQ ID NO: 530773 - DNA, 222 bp, Homo sapiens
gacttgtaatgtgaagtattgtctcacttgtagttagtttgcattttcctaataacaatgatgtttaacttttttgtgtgtgcttattagctgtttcacatgcccttatacttattccattttttacttggctgtttccatacaatcactggcatgtataattcagatgctcctcatctctgtctcacatttctctctttgcttgtattccgctggtcatgt

SEQ ID NO: 530774 - DNA, 475 bp, Homo sapiens
ggtcacccagttcctgatcctgatgttaaattgttaatggatgctgcggatgttgatggaagcggcactctaaactgtgaggagtttgtcacgatgtccattcacatgaaaaggattagcagtgaggagcatctcactcaagcttttggttacttcgacaaggacaaaagcgggtatattgaatttgaagagttgagagaagccttgctagatgagaaccttggtcccaacaatgagcaggtgatccaagatatcatatttgatgctgacttggataaggacggtcgaatctgctttgaagagtttcaagcaatgatgaaaagtggcatcgattggaagatggcttctcgccaatactctagagcaatgcttaatgcactcagcctcaaattgttcaaagacaaatctatgtaatggagaaaccaagttttcttcagcggtaatccgatccaaaataagtgctatattataaatt

SEQ ID NO: 530775 - DNA, 831 bp, Homo sapiens
ccaggcgtggtggcatgtgcctatagccccgtctctaccaaaaataaaaataaaaattatccaggcgtggtggcatgtgcctatagccccagctactcaggaagctaaagcacgagaattatgtgcatcctggaggtgaaggttgcagtgagccaagatcacaccactccactccagctctggacaacagagtgagaccctgtgtcaaaaaaaaaaaaaaaaaaagaaagaaagaaaaaatgctttaatggcccagtgtgcaggtggctcacacctattaattcctagcacttgggaaggctaaggcggaggatggctgtgaggccaagagttctcaagacaagcccgtgggcaacattgtgcaagaccccaacttctacaaaaaaccgaaaaattagccgggagcggatgagtgtgtgcctgtagtccccagctactcaggagactgaggtgggagaactcactttgagcctgggaggtaagaggctcgcagtagagctgtagtttatacccattggcatctcccagcctgcctgaggagtaacagagcaaagactcccatctcaaaaacgacaaggaaacaaaatgcattggcctaccaataatgagggccagggacaaaaagaaagcaagagtcccgtgtgtgacactctctgtgaggcggaacttttggcaacagcgtgctacgggccatgggtcccaggtgttaaacagaggtgtgccacccgtgcaatatctataaacgggaatataatgacaccgcatttcaatattggtacccatcggacaccccggagaggcatggggtccttagcacaataacatgcccgg

SEQ ID NO: 530776 - DNA, 478 bp, Homo sapiens
  misc_feature (18)..(18): n is a, c, g, or t
  misc_feature (23)..(23): n is a, c, g, or t
  misc_feature (25)..(25): n is a, c, g, or t
gggcagtcgagagctcancggangngccttcgcgctcttcctttccaacttggacgctgcagaatggctcccgcaaagaagggtggcgagaagaaaaagggccgttctgccatcaacgaagtggtaacccgagaatacaccatcaacattcacaagcgcatccatggagtgggcttcaagaagcgtgcacctcgggcactcaaagagattcggaaatttgccatgaaggagatgggaactccagatgtgcgcattgacaccaggctcaacaaagctgtctgggccaaaggaataaggaatgtgccataccgaatccgtgtgcggctgtccagaaaacgtaatgaggatgaagattcaccaaataagctatatactttggttacctatgtacctgttaccactttcaaaaatctacagacagtcaatgtggatgagaactaatcgctgatcgtcagatcaaataaagttataaaattgc

SEQ ID NO: 530777 - DNA, 241 bp, Homo sapiens
  misc_feature (20)..(21): n is a, c, g, or t
  misc_feature (27)..(27): n is a, c, g, or t
  misc_feature (46)..(46): n is a, c, g, or t
  misc_feature (50)..(50): n is a, c, g, or t
  misc_feature (54)..(55): n is a, c, g, or t
  misc_feature (84)..(84): n is a, c, g, or t
  misc_feature (86)..(86): n is a, c, g, or t
  misc_feature (121)..(125): n is a, c, g, or t
  misc_feature (165)..(166): n is a, c, g, or t
  misc_feature (168)..(169): n is a, c, g, or t
  misc_feature (188)..(188): n is a, c, g, or t
  misc_feature (197)..(197): n is a, c, g, or t
caaccctcctgtattattgnngcaganaaactgtgctgttaacgcnagcngcgnnacaagatgcctttggaaacttaatagtancncaatgctgtttatggaatattctgaactcctaggnnnnncctgttctatattttaaagcattatttggttttcattagnngnnaacataattagctcaggcntatcaggcnctcagatgagtcatattttttcttggatacacctgaggacatat

SEQ ID NO: 530778 - DNA, 457 bp, Homo sapiens
  misc_feature (25)..(25): n is a, c, g, or t
gcggccgactactactactaaattngcggccgcgtcggcagaatggctcccgcaaagaagggtggcgagaagaaaaagggccgttctgccatcaacgaagtggtaacccgagaatacaccatcaacattcacaagcgcatccatggagtgggcttcaagaagcgtgcacctcgggcactcaaagagattcggaaatttgccatgaaggagatgggaactccagatgtgcgcattgacaccaggctcaacaaagctgtctgggccaaaggaataaggaatgtgccataccgaatccgtgtgcggctgtccagaaaacgtaatgaggatgaagattcaccaaataagctatatactttggttacctatgtacctgttaccactttcaaaaatctacagacagtcaatgtggatgagaactaatcgctgatcgtcagatcaaataaagttataaaattgc

SEQ ID NO: 530779 - DNA, 620 bp, Homo sapiens
acgtcggcatgacaccatgaactcccattggatctgttagcctctggcataagaacaaagcaagcttggtagtccacggacagtatctgcattctcccaggaccagggctaatcccagcaaacatggatggtcccttaaaggtggagtccttatttcacagatgggagattgaggcccctcgtgccgaattcggcacgaggcagaatggctcccgcaaagaagggtggcgagaagaaaaagggccgttctgccatcaacgaagtggtaacccgagaatacaccatcaacattcacaagcgcatccatggagtgggcttcaagaagcgtgcacctcgggcactcaaagagattcggaaatttgccatgaaggagatgggaactccagatgtgcgcattgacaccaggctcaacaaagctgtctgggccaaaggaataaggaatgtgccataccgaatccgtgtgcggctgtccagaaaacgtaatgaggatgaagattcaccaaataagctatatactttggttacctatgtacctgttaccactttcaaaaatctacagacagtcaatgtggatgagaactaatcgctgatcgtcagatcaaataaagttataaaattgc

SEQ ID NO: 530780 - DNA, 302 bp, Homo sapiens
ggccttctaagcagcttactttcttttgtaaaatcaatcaccaggaaagggaaaaaaaaaaaaaggagctccaagggaccaaaccaaaaacttttaacacctttgacacaggggctcagcccctttatttgagccccaggggcccaggctgggccacggttggagggcctttctttacgggaagggcctttgctcccaagggcaggaggagggctaaagagaaccctgccctttaacagggctgaggcacacagacctgctgatgtctgaggcccagaggttatgtgggcatggcccaccct

SEQ ID NO: 530781 - DNA, 467 bp, Homo sapiens
cccgaaaattcggccattatggtcggggcctttccaacttggacgctgcagaatggctcccgcaaagaagggtggcgagaagaaaaagggccgttctgccatcaacgaagtggtaacccgagaatacaccatcaacattcacaagcgcatccatggagtgggcttcaagaagcgtgcacctcgggcactcaaagagattcggaaatttgccatgaaggagatgggaactccagatgtgcgcattgacaccaggctcaacaaagctgtctgggccaaaggaataaggaatgtgccataccgaatccgtgtgcggctgtccagaaaacgtaatgaggatgaagattcaccaaataagctatatactttggttacctatgtacctgttaccactttcaaaaatctacagacagtcaatgtggatgagaactaatcgctgatcgtcagatcaaataaagttataaaattgc

SEQ ID NO: 530782 - DNA, 191 bp, Homo sapiens
attaacgggttggtggtaggttacgacacagatctgtcctgtccccacatatgtgccctaacctaccaccagacccgtttattagcagagtactgagctatgggctcagcatattccagctaaacagtgtgaagaaaacgtccgtggcctaggacaagaatgatcaaataagtgtttaaagggatgcaggc

SEQ ID NO: 530783 - DNA, 704 bp, Homo sapiens
  misc_feature (18)..(18): n is a, c, g, or t
  misc_feature (23)..(23): n is a, c, g, or t
  misc_feature (25)..(25): n is a, c, g, or t
  misc_feature (525)..(525): n is a, c, g, or t
  misc_feature (527)..(527): n is a, c, g, or t
  misc_feature (532)..(532): n is a, c, g, or t
  misc_feature (534)..(534): n is a, c, g, or t
gggcagtcgagagctcancggangngccttcgcgctcttcctttccaacttggacgctgcagaatggctcccgcaaagaagggtggcgagaagaaaaagggccgttctgccatcaacgaagtggtaacccgagaatacaccatcaacattcacaagcgcatccatggagtgggcttcaagaagcgtgcacctcgggcactcaaagagattcggaaatttgccatgaaggagatgggaactccagatgtgcgcattgacaccaggctcaacaaagctgtctgggccaaaggaataaggaatgtgccataccgaatccgtgtgcggctgtccagaaaacgtaatgaggatgaagattcaccaaataagctatatactttggttacctatgtacctgttaccactttcaaaaatctacagacagtcaatgtggatgagaactaatcgctgatcgtcagatcaaataaagttataaaattgcaaaaaaaaaaaaaaaaaaaaaaaaaaaaaaaaaaaaaaccggggggncnatatngngggggggggaaaaaggggcagaaaggggcaaggggccaaaggggagtcctggagacacagattttttgtgcaaaggggggaaaagatggcgggaggcacccataaaggggaggcgaattgaaatttcagaaaaccggggattacccgggttaaaaatataaaaaatcagc

SEQ ID NO: 530784 - DNA, 112 bp, Homo sapiens
cagcctgtcagcaggagcggttctaccattaagttgagatagttgaatcgttcgggccagactctaatcatctgttacggataaactgcgtggggggtgcgcggtctggaga

SEQ ID NO: 530785 - DNA, 696 bp, Homo sapiens
  misc_feature (18)..(18): n is a, c, g, or t
  misc_feature (23)..(23): n is a, c, g, or t
  misc_feature (25)..(25): n is a, c, g, or t
  misc_feature (507)..(507): n is a, c, g, or t
gggcagtcgagagctcancggangngccttcgcgctcttcctttccaacttggacgctgcagaatggctcccgcaaagaagggtggcgagaagaaaaagggccgttctgccatcaacgaagtggtaacccgagaatacaccatcaacattcacaagcgcatccatggagtgggcttcaagaagcgtgcacctcgggcactcaaagagattcggaaatttgccatgaaggagatgggaactccagatgtgcgcattgacaccaggctcaacaaagctgtctgggccaaaggaataaggaatgtgccataccgaatccgtgtgcggctgtccagaaaacgtaatgaggatgaagattcaccaaataagctatatactttggttacctatgtacctgttaccactttcaaaaatctacagacagtcaatgtggatgagaactaatcgctgatcgtcagatcaaataaagttataaaattgcaaaaaaaaaaaaaaaaaaaaaaaaaaatngccccgtttatttttgatttagacaggtttatgattgcggcccaatttggggttttttggcaatttccccttagggaggggttttaaaataacgtgggcggggtttaacacggggggatgggccgggggtacacacaataaatcgtgtggaagcaatcccttttgcaagggggattagcggcccccccc

SEQ ID NO: 530786 - DNA, 407 bp, Homo sapiens
catattatttacatataatattccatatggaggaataatattcaattttttgtgtacaccacatcttgtttatccattcatctggtgaaaaataatttgggcctaggcacagtagctcacgtctctaatcccagcacattgggaagctgaggtgggtggattgcctgagcccagaagatcaggaccagcctgggcaacatggcgagaccccatgtctataaaaaatttaaaaattagttgggcgtggtggtgtgcgcctgtggttctagctactcaggaggctgagatgagaggatcacctgagcttgggagatggaggttgcagtgagctgagattgcaccatgcactccaacccgggcaacagagaccctgtctcaaaaaaagttgatgaacgcatacatattaa

SEQ ID NO: 530787 - DNA, 2398 bp, Homo sapiens
gagacggtgttttgctcttcttgcccaggctggagtgccacggcgcgatcttggctctacacaacctccacctcccaggttcaagtgattctcctgcctcagccttccaagtagctgggactacaggcatgcgccaacacaccccgttaattttgtagttttagtagagacggggtttctccatattggtcaggctggtctcgaactccaggtcaggaagatctcaggtgatcttcccgtctcggcctcccaaagtgctgggattacaggcatgagccactgcgcctgtccattccttattcttaatcagataagagttgctggttttcacaactaattactccacctcaaaccaagatgccaccacacgcttaaagctcaaaatttctctaaatatgcatccattttattgtgtttttctactatctcaaaggaagagagatctgatttcctattttattctctcctttctcctttattgggagaaatactataactatttctttcatgtaaacttcaaatctttcccggtttccttcaaatctttcctcattgattccttcgtgtttcaacagagactgggtcatagagccctagaaattcttcctaaaactagagcagtctctaaccttatttaacttactttactactgctaccaccatgatatactgaacattgtttccattttctcatttgacacttacggttttcacccctaccatgtgattaaaaccatacatgaatcatctctttttttcatctatatccttcttccattagcaatattatgtgattctttctgaagaagtcctggtgaagtatctgaaaactacaactatttttgtgtggcccatgagctaagaatagtttctatatttcaaaaagtttttttcaagataaaaaaaaacagtattctgtgacacatgaaaattatataaaattcatatttgagtgatcataaagttcaccagcagaaggtgatgttgccgcactagataaagaaaagcctctggtggccacagcaatgaccacttcttctctactgtccaacaggtagcttgctctgcagagaaaaggcgtgaaaaaaattattctaccagttgacagaaaaaaaccagctgagaaataaaacctgattgttcacttttaaaaatcacacccccaacgtgggcccactagaatggctcccacaaagaaaaagggccgttctgccatcaacgaagtggtaacccgagaatacaccatcaacattcacaagcgcatccatggagtgggcttcaagaagcgtgcacctcgggcactcaaagagattcggaaatttgccatgaaggagatgggaactccagatgtgcgcattgacaccaggctcaacaaagctgtctgggccaaaggaataaggaatgtgccataccgaatccgtgtgcggctgtccagaaaacgtaatgaggatgaagattcaccaaataagctatatactttggttacctatgtacctgttaccactttcaaaaatctacagacagtcaatgtggatgagaactaatcgctgatcgtcagatcaaataaagttataaaattgccaaaaaaaaacataaaaaaataagaaatcacacctcatcctcagaaagaaaactgactccttcaacttccacaaacacatacacacttcttttcaacttatttatacactttataaatgtgaataaagtgatacttcctgctgttgcaaacagggtatatgtgctgttctccaaatagttcaaatggttttattatcacaacctgagaaatatttcaagaagcaatggatcctgttgtctaactagtaagagaaggaaaagctcatcatcaaatatatccaaattcaaaattttttggcagctattttctagtttacacaaggtaaataccaaacaaagtcagttcagcagggcaattcctggaggaacatatttttacccaattccttctgctaggcccaataggacatgatattatttcaactcaactattgtgaagaattcagtcaccttagaattgatatggacaactggtggcactttccacattttcctgttacagggatccctgccatcttgcgtggcatgaaattctagggtatcaacagagtacttactcaggaacgtagactgtttcttgaaaaatattttgcctctgcctagagataccgctatagtcacacccatggaagaacacatcccagtaagaatataagtcagtattttggtatgtcatgatgaaatgctactgccttgacataaccgttttactagctaaaatatgaatcagctctattagtaaaaatttagtgagcttctgctatgtgcctagatgaaatgcacagcctctgctttcaaagaaaaaaatatttagata

SEQ ID NO: 530788 - DNA, 264 bp, Homo sapiens
tgaggctcaagacggagaatgcttgaacccaggaggcgaaggttgcattgagccatgatcacaccagttgcactccagctgggtgacaagagcaagaccctgtctcaaaaaaaaaaaaagaaaaagaaaagttaaaaaggaaagtcaccgttcgtggatgaaaccaaacttaggggagagtagtctcggtttgagaccctcattgaaaagtggtctatgttcctggtagaggtacctgcattgttgtaaccagggccggcaatt

SEQ ID NO: 530789 - DNA, 766 bp, Homo sapiens
  misc_feature (18)..(18): n is a, c, g, or t
  misc_feature (23)..(23): n is a, c, g, or t
  misc_feature (25)..(25): n is a, c, g, or t
  misc_feature (566)..(566): n is a, c, g, or t
  misc_feature (568)..(568): n is a, c, g, or t
  misc_feature (573)..(573): n is a, c, g, or t
  misc_feature (580)..(580): n is a, c, g, or t
  misc_feature (583)..(584): n is a, c, g, or t
  misc_feature (594)..(594): n is a, c, g, or t
  misc_feature (596)..(596): n is a, c, g, or t
  misc_feature (602)..(602): n is a, c, g, or t
  misc_feature (604)..(604): n is a, c, g, or t
  misc_feature (606)..(606): n is a, c, g, or t
  misc_feature (609)..(609): n is a, c, g, or t
  misc_feature (611)..(611): n is a, c, g, or t
  misc_feature (629)..(629): n is a, c, g, or t
  misc_feature (632)..(632): n is a, c, g, or t
  misc_feature (637)..(637): n is a, c, g, or t
  misc_feature (641)..(641): n is a, c, g, or t
  misc_feature (648)..(648): n is a, c, g, or t
  misc_feature (652)..(652): n is a, c, g, or t
  misc_feature (656)..(656): n is a, c, g, or t
  misc_feature (658)..(658): n is a, c, g, or t
  misc_feature (661)..(662): n is a, c, g, or t
  misc_feature (673)..(673): n is a, c, g, or t
  misc_feature (676)..(676): n is a, c, g, or t
  misc_feature (680)..(680): n is a, c, g, or t
  misc_feature (688)..(688): n is a, c, g, or t
gggcagtcgagagctcancggangngccttcgcgctcttcctttccaacttggacgctgcagaatggctcccgcaaagaagggtggcgagaagaaaaagggccgttctgccatcaacgaagtggtaacccgagaatacaccatcaacattcacaagcgcatccatggagtgggcttcaagaagcgtgcacctcgggcactcaaagagattcggaaatttgccatgaaggagatgggaactccagatgtgcgcattgacaccaggctcaacaaagctgtctgggccaaaggaataaggaatgtgccataccgaatccgtgtgcggctgtccagaaaacgtaatgaggatgaagattcaccaaataagctatatactttggttacctatgtacctgttaccactttcaaaaatctacagacagtcaatgtggatgagaactaatcgctgatcgtcagatcaaataaagttataaaattgcaacaacaacaattattctacaatttccatttcaacaaaaaacctaaatcactaccatataattcattatttttgttaatttccttgtngnccgcntgggccnagnngattttagantngggcangntnatncntgcggccgaatttcgggntanttggnccanttggccntatngggngnggnnttacaattaantgnccgnggttttanacgggggggtttggaaaaacctgggcgttaccacatttaaacgccttgagaaaaatcccccttttggcaggtgggggt

SEQ ID NO: 530790 - DNA, 1158 bp, Homo sapiens
  misc_feature (1)..(1): n is a, c, g, or t
  misc_feature (1102)..(1102): n is a, c, g, or t
ntactcgtcctcgcactagcttcttgactagtcggtggtctgtctcgctcttgtgtaccccgccgttgtcgcgtcctgcgtgttgctctctcgcagtcgctttgtttcgtgacgcgcctgtgtgctcttgtgtcgctgtgtttatccagtgttcggccgaccccctttgggaggaggggaacgtgttttttctgcacggtatggcgcccctgtggcccgcccttttttttatcccgccccccgggtctggagtccgccagttgccgagccattttaataaccgggccgcccctgtgtttttgcccactccagtgctttttacccgggcgcatccgtggttccacggttcccctccaaccatgtgccggcgaacaccgcccctgttcagctttcccgtcgtttttcagctgtgtaacacaactgcgcctagggcaccagatcccattagagcagaggatttagaattggtgtttggatacaccatcctgtcaagaatccatgctgtgtcaccggaaaagtctttaaaccaatttgggttcagattaccccttagatgctgaaggtaaagtaacagagaccagatgttacccccacttttgtaggtttttaattttaaggaatgtaagccaatgccgagtccatctcttgaccgctttaggctgtgtgtaatggctgcacccggcagaatggctcccgcaaagaagggtggcgagaagaaaaagggccgttctgccatcaacgaagtggtaacccgagaatacaccatcaacattcacaagcgcatccatggagtgggcttcaagaagcgtgcacctcgggcactcaaagagattcggaaatttgccatgaaggagatgggaactccagatgtgcgcattgacaccaggctcaacaaagctgtctgggccaaaggaataaggaatgtgccataccgaatccgtgtgcggctgtccagaaaacgtaatgaggatgaagattcaccaaataagctatatactttggttacctatgtacctgttaccactttcaaaaatctacagacagtcaatgtggatgagaactaatcgctgatcgtcagatcaaataaagttataaaattgcnaaaaaaaacaattgaagcaccaattcctttaaggaattcaagcacaagacatcttg

SEQ ID NO: 530791 - DNA, 536 bp, Homo sapiens
cccgaaaattcggccattatggtcggggcctttccaacttggacgctgcagaatggctcccgcaaagaagggtggcgagaagaaaaagggccgttctgccatcaacgaagtggtaacccgagaatacaccatcaacattcacaagcgcatccatggagtgggcttcaagaagcgtgcacctcgggcactcaaagagattcggaaatttgccatgaaggagatgggaactccagatgtgcgcattgacaccaggctcaacaaagctgtctgggccaaaggaataaggaatgtgccataccgaatccgtgtgcggctgtccagaaaacgtaatgaggatgaagattcaccaaataagctatatactttggttacctatgtacctgttaccactttcaaaaatctacagacagtcaatgtggatgagaactaatcgctgatcgtcagatcaaataaagttataaaattgcaaaaaaacatacaaattacattagattatataattaatgccctaatcaaggacttcaacttctctttta

SEQ ID NO: 530792 - DNA, 279 bp, Homo sapiens
tggggggacagggtctgactctgttcccaggctagagtgcagtggctcatccctataatcccagtacttttggacgctggggcgggcagactgcttgagctcaagagtttgagaccagcctgtgcaacgtggcaaaaccctgtctctacaaaaaaaatacaaaaattggccaggtgtggtggcatgcacctgtagtcccagctactcaggaggctgaggtgggaggatggcttgatcccaggctggggggtgttgaggctgcagtaagccgagatcgtg

SEQ ID NO: 530793 - DNA, 780 bp, Homo sapiens
  misc_feature (11)..(11): n is a, c, g, or t
  misc_feature (63)..(63): n is a, c, g, or t
  misc_feature (121)..(121): n is a, c, g, or t
  misc_feature (161)..(161): n is a, c, g, or t
  misc_feature (167)..(167): n is a, c, g, or t
  misc_feature (169)..(169): n is a, c, g, or t
  misc_feature (267)..(267): n is a, c, g, or t
  misc_feature (285)..(285): n is a, c, g, or t
  misc_feature (291)..(291): n is a, c, g, or t
  misc_feature (298)..(298): n is a, c, g, or t
  misc_feature (327)..(327): n is a, c, g, or t
  misc_feature (477)..(477): n is a, c, g, or t
  misc_feature (555)..(555): n is a, c, g, or t
  misc_feature (574)..(574): n is a, c, g, or t
  misc_feature (578)..(578): n is a, c, g, or t
  misc_feature (605)..(605): n is a, c, g, or t
  misc_feature (659)..(659): n is a, c, g, or t
  misc_feature (677)..(677): n is a, c, g, or t
tggcgcgggcngtgacgctggcccggagggacgacgacccctctctaaggcacgcgtggcgcngctgcagtttggtggccccggcgagcagcaggtggccttcccgctgagccacaacctnacggccatccacgaggcgctggagaccacacaatacctgnactccntntcgaacgtgggggaaggcgtggtgcacgccataaatgccatcgtgcgcagccgcgtggcggggcccgaaggcacgaagggctgtccttcgtgtacctnacggacggcgtaacgggnaacaanagtctgnacgagtcgggaactccatgcgcaagcagnacgtggtacccaccgggctggccttgggcagcgacgtggacatggacgtgctcaccacgctcagcctgggtgaccgcgccgccgtgttccacgagaaggactatgacagcctggcgcaacccggcttcttcgaccgcttcatccgctggntctgtagcgccgccgcccgggccccgcagtcgagggtcgtgagcccaccccgtccatggtgctaagcgggcccgggtnccacacggccagcaccgcngctnactcggacgacgccctgggcctgcacntctccagctcctcccacggggtccccgtagccccggcccccgcccagccccagntctccccaggccctccgnaggctgccgggcctccctccccctgcagcccctccaaaggctcctgacctacctggcccttgagttctggagcacggccctgacccattaaaggctttgaacc

SEQ ID NO: 530794 - DNA, 934 bp, Homo sapiens
cgagcggcggcggcggcgacagcgtgcgagccctggtcgctctggagaaccccgcaggtgcggcccgcaggcggcggagggcgccccggtcgggcggcggctggtgccccttcccagctgcctgccgtgccctaaccagctctccaggtgaagagacgtctcggccttcgcaggacggtagatacatgccagcttcatcaacacatggcagctgcggaagctcagaacctctgtgcccaatggccatatggtggcgcgaagagcctccagcgtcctggagaacatcccagtacctcctgaccctgctggagacagacgggggcccgcctggccttggaggattggggacttggtaccccctgtcatctaccatggtcatctttgccgaggcctgcaacaacgccacactatgtggaggcctggaagcgactttcatgaatccgctccggtggaggagcacggagcgggttcttcgctagcctggaggatgagggcaggagcaaggcgcggaggaggggccctggccgtggggaggaccggaggagagaggaccccgcctatacaaccccgcgagtgcttccagcgcatcagccggcgtctggcgagccgtcctcaagcgcagtcgtatccccattggaaacgctggagacctgggaggagcggctgcttcggttcttctccgtgtccgcccaggccgtgtacacagcaatgctaagacaacagcttcgagaggcttctgctgcacgctgtctgccagtacattgacctcaatctcgtgccagtgctgaacctggagggggtaagcggccgattgaagggtcaggtaatcggcagcttggatttcctgtctgccgggctgctcctggccggctacctggagcagcaccggtgatgtgggcccggcgtaacccggtgcaccttgccagctcagcct

SEQ ID NO: 530795 - DNA, 245 bp, Homo sapiens
  misc_feature (8)..(8): n is a, c, g, or t
ccaagccngacgcagtgcagcctgacagcctcccctacccccagtacctgggggtcatcaaagcccaaatttcctgtgccaaggacattcaccccgccctgttggattgtgccaacaaggtcacgggcaaaacacccgccccccctgttggccctgggggccctttttaaagtgggggacagggagtggggcagccagtggttggtgggtggtgtgcaaacggaataaaaagcgtcctgggccta

SEQ ID NO: 530796 - DNA, 113 bp, Homo sapiens
aaatccgctctctactaaaaatacaaaaattagctgggcatggtggagggatgccgtgtaactcccagcgtactcaggagtctgtagacagtgaggaatcgtcttgatacctc

SEQ ID NO: 530797 - DNA, 793 bp, Homo sapiens
cggcaccccgtgggcccccgctcgacttccttgagtcgttgttcccgccagcaccttcttctgggcacgtgacgtgcccttctggtcgcttcagctgctgccttccagggtcttctgctgctgtagaccgccaccgaccatctgtacccacaggggagtgagggatcaggcctccaggtgggagccccaggagcagaggaagaggtggaagacttcctcatcgcactgcaagatgccaccaagccaggcagcaggtaccacccctggtccagaccctaaggcctatcagcttctatcagtcccgcagtgcctgcctgctgggcctgttggccgcacacaacgcgctgaccaatggcgtgctgcctgcccgtgcagcagctttttccgtgcttaccctacgggcgtctggcctaccacctggctgtgtgtgcttgggcaggtgctgccaatccccttggcctgctttcctgggccatggttgtgctgtgcaggtccttggccaagggctgggggggctcgtctctgctgggcgtgtctgtgggggctacctgatggcgctggcggtcctgaggcccctgcccgccctggtgtgcacctcggggggggttggcctcggggtgctgtcggtggggtgctgtgatcttggggtgttctccctacgtgaaggtggcagcagtcctgctgcatggggggggccggccggcattgctgggcagccgggtggccttcagggtggctcctggcggcgcctgtggtttttccccccgacaggattattcacgtgttcccagcg

SEQ ID NO: 530798 - DNA, 146 bp, Homo sapiens
cacagctcatttgaacgctgggtaaaaatccacagctgtattcttcaggatcactttgcagagtcttcaagactcagcatacaggggaagcttcaattcaaacctttccagaaaaagattcccagctcgcatgattctcatcaacc

SEQ ID NO: 530799 - DNA, 120 bp, Homo sapiens
  misc_feature (117)..(117): n is a, c, g, or t
cagggtctagctgttcaatggaatgccctttgaaagggaacagctagaccctgatgagttagaaaccatcacaatgcataaaatcctggagaccaccaccttcttccaaagagcggngtg

SEQ ID NO: 530800 - DNA, 1689 bp, Homo sapiens
aattaccagcactggtctctgctgagcctctgctcgttcctggcaaatcctgcaggacccgagtgtcagccagccagcagcatggctacaaaatgcacaaagtgtggtccaggttactccacccctctggaggccatgaaaggaccccgagaggagattgtctacttgccctgcatttaccggaacacaggcaccgaagccccggattatttggccactgtggatgtagaccctaagtctccccagtatagccaggtcatccacaggttgcccatgccctacctgaaggacgagctgcaccactcaggatggaacacctgcagcagctgctttggggacagcacgaagtcacgcaacaagctgatactgcctggtctcatctcctcccgcatctacgtggtggatgtgggctctgagcctcgtgccccgaagttgcacaaggtcattgaagccagtgaaatccaagccaagtgcaacgtgagcagtttgcacaccagccactgcctggccagtggagaagtcatggtcagcaccttgggggatctccagggtaatggcaaagggagttttgtgctgctggatggggagaccttcgaggtgaaagggacatgggagaagcctggggatgcagctccaatgggctacgacttctggtaccagcctcgacacaatgtcatggtcagcactgaatgggcagctcctaatgtcttcaaagatggcttcaacccggctgatgtggaggctgggctgtacgggagccgcatatttgtgtgggactggcagcgccatgagattatccagaccctgcaaatgacagatgggctgatacccctggagatccgattcctgcacgacccaagtgccacccagggttttgtaggctgtgccctcagctccaacatccagcgcttctacaagaatgcggaaggcacttggtcagtggagaaggtgatccaagtgccctccaagaaagtgaagggctggatgttgccagaaatgcctggtttgatcaccgacatcctgctgtccctggatgaccgcttcctttacttcagcaactggctgcatggggacattcggcagtatgacatctctaacccacagaagccccgcctcgctgggcagatcttccttgggggcagcattgttagaggaggctctgtgcaagtgctggaggaccaagagttaacctgtcagccggagcccctagtggtcaagggaaaacgaattcctggaggccctcagatgatccagctcagcttagatggcaagcgtctttacgccactacatcactatacagcgcctgggacaagcagttttaccctgacctcattagggaaggctccatgatgcttcaaattgatgtagacacagtaaatggagggctgaagttgaaccccaactttctggtggactttgggaaggagccccttgggccagcactggctcacgagcttcgttacccaggaggtgactgcagttctgacatctggatctgaaggctcgcactaggggcccccctccacattctgagcctgcctggcttcactctgctctcagccccaactctccaaggccactctgagaccagcgagatctgtagagcagcatctctgtaccgttgcttgttgtttgtgcttttcttaagtgagctcctggaagcaccaagaaataaaatgctgaaactt

SEQ ID NO: 530801 - DNA, 786 bp, Homo sapiens
taaagaaaagaacacttcacagataaagaagaggttctcttttaacctgtccctgattctgttccttttccttctttcaccctcttcttcttctcagaggcagttgggtctctaggccatgccttgatgatttaacggggtatatatatatatataattagtatgtggcttagttggtgtttcaaatttcacgtaaatttaatttataatattaaaaataactggtatggtacatatttggcaacttatttctcagtttggtttctgcgtgttattccacatagatcgggattattcatttcaagggtaatatccttttattggaatatatggtaccttatttatcctatggatagacatttttattcttttacaaacaataccaaatgtctccaggttctctaactaggaagtatacgtaaagggaggaatgctagggcatgggatgggcataattcacccttttctagatttggccaatcgttgcccacagtgcacatacttttccaccagtcacttgtgagagggcagattttccaaatgctcatcaccatttggcactgtgttggactataattggcccagttaggaaatggactctcatggtgtcatctaaattgggtaagcttgatcactcatggaaacctggtgaaggtggagaacctttgttaaagcttatgtgagcatcaagttcctcttttatgaatggtggcatgttattggcacctttattataagatgggttttttttaccggggcttgatagactcacatttatcaatataa

SEQ ID NO: 530802 - DNA, 281 bp, Homo sapiens
agatttccggagtttcttctttttcttttttcttgagacagggccttgttctttcacccaggctggagtgcagtggggcgaatcacggctcactgcagtctcaacctcccaggctcaagtaatcctttcacctcagccacccaagtagctgagacatgccaccaggcctggctaactttttttttttttatttctttttcttttaaaaaaaaaaaggccccgggggttttgcccccattaaaagttttttggggggggggcggtttaaataaaatttcccg

SEQ ID NO: 530803 - DNA, 700 bp, Homo sapiens
tagaggtgtgagccgtgcaccctgccccagtacaatctttttggaactcaaattttggccgacatctgagtgcacacaccacagtgtaaattatgccttatcagaatctaaatgaaaatagcgaacatttaaaagctatcaccatgtgtagtagaatcatccttcttttttgaaattttgaagcatcccaggcttaaaatctgtgtgtttcagaaagacagtttataccatgactgcttaattatccccccaaaagaccttctgattgaagtcatgtacagttcagtggcctaaattctctgccttttaaactgtgcttggaaagcctaactctgaaaataagtattcagtcaagttattctcaaagatgtcccagttgcctagaacggatcaaatggaacatttgacacacatactcaaaaaaatgtacctgatataaacattaaacctaatcatctgtatcaaatttctaaaaatcaaatctcaggatggtcccacttttcgaggattcctactgtaaaaggtttatattaaatctataactgtgtcaaaaataagcacctaatctatgcctttaaaaaattgcatttaatatctaagcataaaaatgtgttaattttataacacacacgaataatcatacataggaggaggagatttcgggaatgttgcaaggtatttttccgattaaattatttcc

SEQ ID NO: 530804 - DNA, 7432 bp, Homo sapiens
atggaggaggtggtgattgccggcatgttcgggaagctgccagagtcggagaacttgcaggagttctgggacaacctcatcggcggtgtggacatggtcacggacgatgaccgtcgctggaaggctgggctctacggcctgccccggcggtccggcaagctgaaggacctgtctaggtttgatgcctccttcttcggagtccaccccaagcaggcacacacgatggaccctcagctgcggctgctgctggaagctacctatgaagccatcgtggacggaggcatcaacccagattcactccgaggaacacacactggcgtctgggtgggcgtgagcggctctgagacctcggaggccctgagccgagaccccgagacactcgtgggctacagcatggtgggctgccagcgagcgatgatggccaaccggctctccttcttcttcgacttcagagggcccagcatcgcactggacacagcctgctcctccagcctgatggccctgcagaacgcctaccaggccatccacagcgggcagtgccctgccgccatcgtggggggcatcaacgtcctgctgaagcccaacacctccgtgcagttcttgaggctggggatgctcagccccgagggcacctgcaaggccttcgacacagcggggaatgggtactgccgctcggagggtgtggtggctgtcctgctgaccaagaagtccctggcccggaaggtctacaccaccatcctgaacaaaggcaccaatacagatggcttcaaggagcaaggcgtgaccttccctcaggatatccaggagcagcctatccgctcgttgtaccagtcggccggagtggcccctgagtcatttgaatacatcgaagcccacggaccaggcaccaaggtgggcgacccccaggagcgtaatggcatcacccgagccctgtgcgccacccgccaggagccgctgctcatcggctccaccaagtccaacatggggcacccggagccagcctcggggctcgacgccctggccaaggtgctgctgtccctggagcacgggctctgggcccccaacctgcacttccatagccccaaccctgagatcccagcgctgttggatgggcggctgcaggtggtggaccagcccctgcccgtccgtggcggcaacgtgggcatcaactcctttggcttcgggggctccaacatgcacatcatcctgaggcccaacacgcagtccgcccccgcacccgccccacatgccaccctgccccgtctgctgcgggccagcggacgcacccctgaggccgtgcagaagctgctggagcagggcctccggcacagccagggcctggctttcctgagcatgctgaacgacatcgcggctgtccccgccaccgccatgcccttccgtggctacgctgtgctgggtggtgagacgcggtggcccagagtgcagcaggtgcccgctggcgagcgcccgctctggttcatctgctctgggatgggcacacagtggcgtggaatggggctgagccttatgcgcctggaccgcttccgagattccatcctacgctccgatgaggctgtgaaccgattcggcctgaaggtgtcacagctgctgctgagcacagacgagagcacctttgatgacatcgtccattcgtttgtgagcctgactgccatccagataggcctcatagacctgctgagctgcatgggacctgaggcagatggcatcgtcggccactccctgggggagtggctgtcggtacgcgacggctgcctgtcccaggaggaggccgtcctcgctgcctactggaggggacagtgcatcaaagaagccccacttcccgccggcgccatggcagccgtgggcttgtcctgggaggagtgtaaacagcgctgcccccctgcggtggtgcccgcctgccacaactccaaggacacagtcaccatctcgggacctcaggccccggtgtttgagttcgtggagcagctgaggaaggagggtgtgtttgccaaggaggtgcggaccggcggtatggccttccactcctacttcatggaggccatcgcacccccactgctgcaggagctcaagaaggtgatccgggagccgaagccacgttcagcccgctggctcagcacctctatccccgaggcccagtggcacagcagcctggcacgcacgtcttccgccgagtacaatgtcaacaacctggtgagccctgtgctgttccaggaggccctgtggcacgtgcctgagcacgcggtggtgctggagatcgccccgaccccgtgccctcaggctgtcctgaagcgggtccgtaagccgagctgcaccatcatcccccgtatgaagaaggatcacagggacaacctggagttcttcctggccggcatcggcaggctgcacctctcaggcatcgacgccaaccccaatgccttgttcccacctgtggagtccccagctccccgaggaactcccctcatctccccactcatcaagtgggaccacagcctggcctgggacgcgccggccgccgaggacttccccaacggttcaggttccccctcagccaccatctacacatgcacaccaagctccgagtctcctgaccgctacctggtggaccacaccatcgacggtcgcgtcctcttccccgccactggctacctgagcatagtgtggaagacgctggcccgcgcctgggctgggctcgagcagctgcctgtggtgtttgaggatgtggtgcagcaccaggccaccatcctgcccaagactgggacagtgtccttggaggtacggctcctggaggccaccggtgccttcgaggtgtcagagaacggcaacctggtagtgagtgggaaggtgtaccagtgggatgaccctgaccccaggctcttcgaccacccggaaagtccccaccccaattccccacggagtcccctcttcctggcccaggcagaagtttacaaggagctgcgtctgcgtggctacgactacggccctcatttccagggcatcctggaggccagcctggaaggtgactcggggaggctgctgtggaaggataactgggtgagcttcatggacaccatgctgcagatgtccatcctgggctcggccaagcacggcctgtacctacccacccgtgtcaccgccatccacatcgaccctgccacccacaggcagaagctgtacacactgcaggacaaggcccaagtggctgacgtggtggtgagcaggtggccgagggtcacagtggcgggaggcgtccacatctccgggctccacactgagtcggccccgcggcggcagcaggagcagcaggtgcccatcctggagaagttttgcttcactccccacacggaggaggggtgcctgtctgagcgcgctgccctgcaggaggagctgcaactgtgcaaggggctggtgcaggcactgcagaccaaggtgacccagcaggggctgaagatggtggtgcccggactggatggggcccagatcccccgggacccctcacagcaggaactgccccggctgttgtcggctgcctgcaggcttcagctcaacgggaacctgcagctggagctggcgcaggtgctggcccaggagaggcccaagctgccagaggaccctctgctcagcggcctcctggactccccggcactcaaggcctgcctggacactgccgtggagaacatgcccagcctgaagatgaaggtggtggaggtgctggctggccacggtcacctgtattcccgcatcccaggcctgctcagcccccatcccctgctgcagctgagctacacggccaccgaccgccacccccaggccctggaggctgccaggccgagctgcagcagcacgacgttgcccagggccagtgggatcccgcagaccctgcccccagcgccctgggcagcgccgacctcctggtgtgcaactgtgctgtggctgccctcggggacccggcctcagctctcagcaacatggtggctgccctgagagaagggggctttctgctcctgcacacactgctccgggggcaccccctcggggacatcgtggccttcctcacctccactgagccgcagtatggccagggcatcctgagccaggacgcgtgggagagcctcttctccagggtgtcgctgcgcctggtgggcctgaagaagtccttctacggctccacgctcttcctgtgccgccggcccaccccgcaggacagccccatcttcctgccggtggacgataccagcttccgctgggtggagtctctgaagggcatcctggctgacgaagactcttcccggcctgtgtggctgaaggccatcaactgtgccacctcgggcgtggtgggcttggtgaactgtctccgccgagagcccggcgggaaccgcctccggtgtgtgctgctctccaacctcagcagcacctcccacgtcccggaggtggacccgggctccgcagaactgcagaaggtgttgcagggagacctggtgatgaacgtctaccgcgacggggcctggggggctttccgccacttcctgctggaggaggacaagcctgaggagccgacggcacatgcctttgtgagcaccctcacccggggggacctgtcctccatccgctgggtctgctcctcgctgcgccatgcccagcccacctgccctggcgcccagctctgcacggtctactacgcctccctcaacttccgcgacatcatgctggccactggcaagctgtcccctgatgccatcccagggaagtggacctcccaggacagcctgctaggtatggagttctcgggccgagacgccagcggcaagcgtgtgatgggactggtgcctgccaagggcctggccacctctgtcctgctgtcaccggacttcctctgggatgtgccttccaactggacgctggaggaggcggcctcggtgcctgtcgtctacagcacggcctactacgcgctggtggtgcgtgggcgggtgcgccccggggagacgctgctcatccactcgggctcgggcggcgtgggccaggccgccatcgccatcgccctcagtctgggctgccgcgtcttcaccaccgtggggtcggctgagaagcgggcgtacctccaggccaggttcccccagctcgacagcaccagcttcgccaactcccgggacacatccttcgagcagcatgtgctgtggcacacgggcgggaagggcgttgacctggtcttgaactccttggcggaagagaagctgcaggccagcgtgaggtgcttggctacgcacggtcgcttcctggaaattggcaaattcgacctttctcagaaccacccgctcggcatggctatcttcctgaagaacgtgacattccacggggtcctactggatgcgttcttcaacgagagcagtgctgactggcgggaggtgtgggcgcttgtgcaggccggcatccgggatggggtggtacggcccctcaagtgcacggtgttccatggggcccaggtggaggacgccttccgctacatggcccaagggaaggcctcccaggcctggccgtgcagtggggcgccatcggcgacgtgggcattttggtggagacgatgagcaccaacgacacgatcgtcagtggcacgctgccccagcgcatggcgtcctgcctggaggtgctggacctcttcctgaaccagccccacatggtcctgagcagctttgtgctggctgagaaggctgcggcctatagggacagggacagccagcgggacctggtggaggccgtggcacacatcctgggcatccgcgacttggctgctgtcaacctggacagctcactggcggacctgggcctggactcgctcatgagcgtggaggtgcgccagacgctggagcgtgagctcaacctggtgctgtccgtgcgcgaggtgcggcaactcacgctccggaaactgcaggagctgtcctcaaaggcggatgaggccagcgagctggcatgccccacgcccaaggaggatggtctggcccagcagcagactcagctgaacctgcgctccctgctggtgaacccggagggccccaccctgatgcggctcaactccgtgcagagctcggagcggcccctgttcctggtgcacccaatcgagggctccaccaccgtgttccacagcctggcctcccggctcagcatccccacctatggcctgcagtgcacccgagctgcgccccttgacagcatccacagcctggctgcctactacatcgactgcatcaggcaggtgcagcccgagggcccctaccgcgtggccggctactcctacggggcctgcgtggcctttgaaatgtgctcccagctgcaggcccagcagagcccagcccccacccacaacagcctcttcctgttcgacggctcgcccacctacgtactggcctacacccagagctaccgggcaaagctgaccccaggctgtgaggctgaggctgagacggaggccatatgcttcttcgtgcagcagttcacggacatggagcacaacagggtgctggaggcgctgctgccgctgaagggcctagaggagcgtgtggcagccgccgtggacctgatcatcaagagccaccagggcctggaccgccaggagctgagctttgcggcccggtccttctactacaagctgcgtgccgctgagcagtacacacccaaggccaagtaccatggcaacgtgatgctactgcgcgccaagacgggtggcgcctacggcgaggacctgggcgcggactacaacctctcccaggtatgcgacgggaaagtatccgtccacgtcatcgagggtgaccaccgcacgctgctggagggcagcggcctggagtccatcatcagcatcatccacagctccctggctgagccacgcgtgagcgtgcgggagggctaggcccgtgcccccgcctgccaccggaggtcactccaccatccccaccccaccccaccccacccccgccatgcaacgggattgaagggtcctgccggtgggaccctgtccggcccagtgccactgccccccgaggctgctagatgtaggtgttaggcatgtcccacccacccgccgcctcccacggcacctcggggacaccagagctgccgacttggagactcctggtctgtgaagagccggtggtgcccgtgcccgcaggaactgggctgggcctcgtgcgcccgtggggtctgcgcttggtctttctgtgcttggatttgcatatttattgcattgctggtagagacccccaggcctgtccaccctgccaagactcctcaggcagcgtgtgggtcccgcactctgcccccatttccccatttccccgtggggtgctgcccttatgcccggcgccgggcaccaactccatgtttggtgtttgtctgtgtttgtttttcaagaaatgattcaaattgc

SEQ ID NO: 530805 - DNA, 203 bp, Homo sapiens
  misc_feature (87)..(87): n is a, c, g, or t
tagaggatcccttaggcggttgaaggtagcagtgacggtgtagattagttcctgtgaactctgcgttggtgaaagtcacggtggccncttcataatccagagggatagccactctccgggggcgcagtgctgggaaaagctcaagctcggggctaggtgttgggccacgatgccgtgagagagggtacccgaggctccgaaat

SEQ ID NO: 530806 - DNA, 4041 bp, Homo sapiens
atggaggaggtggtgattgccggcatgttcgggaagctgccagagtcggagaacttgcaggagttctgggacaacctcatcggcggtgtggacatggtcacggacgatgaccgtcgctggaaggctgggctctacggcctgccccggcggtccggcaagctgaaggacctgtctaggtttgatgcctccttcttcggagtccaccccaagcaggcacacacgatggaccctcagctgcggctgctgctggaagctacctatgaagccatcgtggacggaggcatcaacccagattcactccgaggaacacacactggcgtctgggtgggcgtgagcggctctgagacctcggaggccctgagccgagaccccgagacactcgtgggctacagcatggtgggctgccagcgagcgatgatggccaaccggctctccttcttcttcgacttcagagggcccagcatcgcactggacacagcctgctcctccagcctgatggccctgcagaacgcctaccaggccatccacagcgggcagtgccctgccgccatcgtggggggcatcaacgtcctgctgaagcccaacacctccgtgcagttcttgaggctggggatgctcagccccgagggcacctgcaaggccttcgacacagcggggaatgggtactgccgctcggagggtgtggtggctgtcctgctgaccaagaagtccctggcccggaaggtctacaccaccatcctgaacaaaggcaccaatacagatggcttcaaggagcaaggcgtgaccttccctcaggatatccaggagcagcctatccgctcgttgtaccagtcggccggagtggcccctgagtcatttgaatacatcgaagcccacggaccaggcaccaaggtgggcgacccccaggagcgtaatggcatcacccgagccctgtgcgccacccgccaggagccgctgctcatcggctccaccaagtccaacatggggcacccggagccagcctcggggctcgacgccctggccaaggtgctgctgtccctggagcacgggctctgggcccccaacctgcacttccatagccccaaccctgagatcccagcgctgttggatgggcggctgcaggtggtggaccagcccctgcccgtccgtggcggcaacgtgggcatcaactcctttggcttcgggggctccaacatgcacatcatcctgaggcccaacacgcagtccgcccccgcacccgccccacatgccaccctgccccgtctgctgcgggccagcggacgcacccctgaggccgtgcagaagctgctggagcagggcctccggcacagccagggcctggctttcctgagcatgctgaacgacatcgcggctgtccccgccaccgccatgcccttccgtggctacgctgtgctgggtggtgagacgcggtggcccagagtgcagcaggtgcccgctggcgagcgcccgctctggttcatctgctctgggatgggcacacagtggcgtggaatggggctgagccttatgcgcctggaccgcttccgagattccatcctacgctccgatgaggctgtgaaccgattcggcctgaaggtgtcacagctgctgctgagcacagacgagagcacctttgatgacatcgtccattcgtttgtgagcctgactgccatccagataggcctcatagacctgctgagctgcatgggacctgaggcagatggcatcgtcggccactccctgggggagtggctgtcggtacgcgacggctgcctgtcccaggaggaggccgtcctcgctgcctactggaggggacagtgcatcaaagaagccccacttcccgccggcgccatggcagccgtgggcttgtcctgggaggagtgtaaacagcgctgcccccctgcggtggtgcccgcctgccacaactccaaggacacagtcaccatctcgggacctcaggccccggtgtttgagttcgtggagcagctgaggaaggagggtgtgtttgccaaggaggtgcggaccggcggtatggccttccactcctacttcatggaggccatcgcacccccactgctgcaggagctcaagaaggtgatccgggagccgaagccacgttcagcccgctggctcagcacctctatccccgaggcccagtggcacagcagcctggcacgcacgtcttccgccgagtacaatgtcaacaacctggtgagccctgtgctgttccaggaggccctgtggcacgtgcctgagcacgcggtggtgctggagatcgccccgaccccgtgccctcaggctgtcctgaagcgggtccgtaagccgagctgcaccatcatcccccgtatgaagaaggatcacagggacaacctggagttcttcctggccggcatcggcaggctgcacctctcaggcatcgacgccaaccccaatgccttgttcccacctgtggagtccccagctccccgaggaactcccctcatctccccactcatcaagtgggaccacagcctggcctgggacgcgccggccgccgaggacttccccaacggttcaggttccccctcagccaccatctacacatgcacaccaagctccgagtctcctgaccgctacctggtggaccacaccatcgacggtcgcgtcctcttccccgccactggctacctgagcatagtgtggaagacgctggcccgcgcctgggctgggctcgagcagctgcctgtggtgtttgaggatgtggtgcagcaccaggccaccatcctgcccaagactgggacagtgtccttggaggtacggctcctggaggccaccggtgccttcgaggtgtcagagaacggcaacctggtagtgagtgggaaggtgtaccagtgggatgaccctgaccccaggctcttcgaccacccggaaagtccccaccccaattccccacggagtcccctcttcctggcccaggcagaagtttacaaggagctgcgtctgcgtggctacgactacggccctcatttccagggcatcctggaggccagcctggaaggtgactcggggaggctgctgtggaaggataactgggtgagcttcatggacaccatgctgcagatgtccatcctgggctcggccaagcacggcctgtacctacccacccgtgtcaccgccatccacatcgaccctgccacccacaggcagaagctgtacacactgcaggacaaggcccaagtggctgacgtggtggtgagcaggtggccgagggtcacagtggcgggaggcgtccacatctccgggctccacactgagtcggccccgcggcggcagcaggagcagcaggtgcccatcctggagaagttttgcttcactccccacacggaggaggggtgcctgtctgagcgcgctgccctgcaggaggagctgcaactgtgcaaggggctggtgcaggcactgcagaccaaggtgacccagcaggggctgaagatggtggtgcccggactggatggggcccagatcccccgggacccctcacagcaggaactgccccggctgttgtcggctgcctgcaggcttcagctcaacgggaacctgcagctggagctggcgcaggtgctggcccaggagaggcccaagctgccagaggaccctctgctcagcggcctcctggactccccggcactcaaggcctgcctggacactgccgtggagaacatgcccagcctgaagatgaaggtggtggaggtgctggctggccacggtcacctgtattcccgcatcccaggcctgctcagcccccatcccctgctgcagctgagctacacggccaccgaccgccacccccaggccctggaggctgccaggccgagctgcagcagcacgacgttgcccagggccagtgggatcccgcagaccctgcccccagcgccctgggcagcgccgacctcctggtgtgcaactgtgctgtggtgcctcgggaccggctcaattcaaacatgtggtgctgaagacgggttctgtctgaacatgtcagggggcccctccggattgtgctttact

SEQ ID NO: 530807 - DNA, 190 bp, Homo sapiens
  misc_feature (100)..(100): n is a, c, g, or t
tcattgcagccctgagttcctgggctcaagtgatcctccacctcagccgtgagtagctgggcttacaggcacaagccactacacccatccagtgcctctngtgtgacccaagagaaatgagaccaagtaatgttgcaaaacaagttttgagagtttgagtgatgactgtgtgcctgtattttgatgtttg

SEQ ID NO: 530808 - DNA, 822 bp, Homo sapiens
  misc_feature (136)..(136): n is a, c, g, or t
  misc_feature (139)..(139): n is a, c, g, or t
  misc_feature (144)..(144): n is a, c, g, or t
  misc_feature (147)..(147): n is a, c, g, or t
  misc_feature (157)..(158): n is a, c, g, or t
  misc_feature (162)..(162): n is a, c, g, or t
ggcactcacctatagttccacctactcgggaggagaatcgcttgaaccgggtaggtggaggttgcggagggaggagaatcgcttgaaccgggtaggtggaggttgcggtgagctgagatcgccccactccatctanccngggtnacnaaaatgaaanncgtntcaaaaaaaaaaagcccacccgcagtgtagcacagggcaggccggtgctgtgggtgctgccagcacctgctcagagcccgaccccacacggacatggagcacaacagggtgctggaggcgctgctgccgctgaagggcctagaggagcgtgtggcagccgccgtggacctgatcatcaagagccaccagggcctggaccgccaggagctgagctttgcggcccggtccttctactacaagctgcgtgccgctgagcagtacacacccaaggccaagtaccatggcaacgtgatgctactgcgcgccaagacgggtggcgcctacggcgaggacctgggcgcggactacaacctctcccaggtatgcgacgggaaagtatccgtccacgtcatcgagggtgaccaccgcacgctgctggagggcagcggcctggagtccatcatcagcatcatccacagctccctggctgagccacgcgtgagcgtgcgggagggctaggtccattctacgagcgatgccaccgagtgagggtcactccaatcgcatcctcgactccacctaccctctatctccctcataccgacactcacgactatcactcaccctatcacccatcgaggaccatctcttaggttcacaaccaaactctcacttgcacac

SEQ ID NO: 530809 - DNA, 323 bp, Homo sapiens
  misc_feature (4)..(4): n is a, c, g, or t
gtantgagatacgaaaggagcacagaagtcaaaggcatgcctctcacaaagtttcatccccagaggacgaagaggtcatgaaccttgcagaaagttggtcaggttcatagctggacggtgggtaccgaggtggaaaccattgccctccagaacaaccgtgagaaccatgcattcagcttactgtatgagcccaatagccaatgggtacaagtactaccgacagaagctggaggagtttcggaaagccaaggccagctccacaggcagcttcacagcacctgatcccggactgaagcgcaagtcccctcctgaggccctgtcag

SEQ ID NO: 530810 - DNA, 689 bp, Homo sapiens
ctcacagatgctgaccacggagagcccacggaccaaccatcagagagagctcgtggctgatctgaacggggtcgagccatcgtactgtaaccgggcgcgtactctacatagtgtaccggtacataattaaggcgagagctgtgagggtgaggatggagacgaaggccatatgtcttcttcgggcagcacggttcacggacatggagcacaacagggtgctggaggcgctgctgccgctgaagggcctagaggagcgtgtggcagccgccgtggacctgatcatcaagagccaccagggcctggaccgccaggagctgagctttgcggcccggtccttctactacaagctgcgtgccgctgagcagtacacacccaaggccaagtaccatggcaacgtgatgctactgcgcgccaagacgggtggcgcctacggcgaggacctgggcgcggactacaacctctcccaggtatgcgacgggaaagtatccgtccacgtcatcgagggtgaccaccgcacgctgctggagggcagcggcctggagtccatcatcagcatcatccacagctccctggctgagccacgcgtgagcgtgcgggagggctaggcaccgagtgagcacagacaggacaacaggagggtcaagtcgaaccaatagacaaaaaaaaacacagaagagaggagaaaagag

SEQ ID NO: 530811 - DNA, 744 bp, Homo sapiens
  misc_feature (107)..(107): n is a, c, g, or t
  misc_feature (113)..(113): n is a, c, g, or t
  misc_feature (177)..(178): n is a, c, g, or t
  misc_feature (325)..(325): n is a, c, g, or t
  misc_feature (626)..(626): n is a, c, g, or t
  misc_feature (672)..(672): n is a, c, g, or t
  misc_feature (677)..(677): n is a, c, g, or t
  misc_feature (695)..(696): n is a, c, g, or t
  misc_feature (699)..(699): n is a, c, g, or t
  misc_feature (701)..(701): n is a, c, g, or t
  misc_feature (712)..(712): n is a, c, g, or t
  misc_feature (716)..(716): n is a, c, g, or t
  misc_feature (740)..(740): n is a, c, g, or t
gtcgaggtctgggcttgggaatgggtcagcgggaggcctgaggtgcgccgggcgctgcggcaggcgggcccggggtccagccgagaggctcccctgggacctgtggncgccgnccacagaccatgctcctggggcgcctgacttcccagctgttgagggccgttccttgggcaggcnngcgtccgccttggcccgtctctggagtgctgggcagccgggtctgcgggcccctttacagcacatcgccggccggcccaggtagggcggctctctccctcgcaagggggcccagctggagctggaggagatgctggtccccaggaangatgtccgtcagccccctggagagctggctcacggcccgctgcttcctgcccagactggataccgggaccgcagggactgtggctccaccgcaatcctaccagtgtccgcccagccagataggggaaggggccgagcagggggatgaaggcgtcgcggatgcgcctcaaattcagtgcaaaaacgtgctgaagatccgccggcggaagatgaatccaccacaagtaccggaagctggtgaagaagacgcggttcctgcggaggaaggtccaggagggacgcctgagacgcaagcagatcangttcgagaaagacctgaggcgcatctggctggaaggcggggctaanggaangcccccgaaggctggcannacncncaagatctacntggngggcaaactgagtccttggcgccngccc

SEQ ID NO: 530812 - DNA, 8045 bp, Homo sapiens
atggaggaggtggtgattgccggcatgttcgggaagctgccagagtcggagaacttgcaggagttctgggacaacctcatcggcggtgtggacatggtcacggacgatgaccgtcgctggaaggctgggctctacggcctgccccggcggtccggcaagctgaaggacctgtctaggtttgatgcctccttcttcggagtccaccccaagcaggcacacacgatggaccctcagctgcggctgctgctggaagctacctatgaagccatcgtggacggaggcatcaacccagattcactccgaggaacacacactggcgtctgggtgggcgtgagcggctctgagacctcggaggccctgagccgagaccccgagacactcgtgggctacagcatggtgggctgccagcgagcgatgatggccaaccggctctccttcttcttcgacttcagagggcccagcatcgcactggacacagcctgctcctccagcctgatggccctgcagaacgcctaccaggccatccacagcgggcagtgccctgccgccatcgtggggggcatcaacgtcctgctgaagcccaacacctccgtgcagttcttgaggctggggatgctcagccccgagggcacctgcaaggccttcgacacagcggggaatgggtactgccgctcggagggtgtggtggctgtcctgctgaccaagaagtccctggcccggaaggtctacaccaccatcctgaacaaaggcaccaatacagatggcttcaaggagcaaggcgtgaccttccctcaggatatccaggagcagcctatccgctcgttgtaccagtcggccggagtggcccctgagtcatttgaatacatcgaagcccacggaccaggcaccaaggtgggcgacccccaggagcgtaatggcatcacccgagccctgtgcgccacccgccaggagccgctgctcatcggctccaccaagtccaacatggggcacccggagccagcctcggggctcgacgccctggccaaggtgctgctgtccctggagcacgggctctgggcccccaacctgcacttccatagccccaaccctgagatcccagcgctgttggatgggcggctgcaggtggtggaccagcccctgcccgtccgtggcggcaacgtgggcatcaactcctttggcttcgggggctccaacatgcacatcatcctgaggcccaacacgcagtccgcccccgcacccgccccacatgccaccctgccccgtctgctgcgggccagcggacgcacccctgaggccgtgcagaagctgctggagcagggcctccggcacagccagggcctggctttcctgagcatgctgaacgacatcgcggctgtccccgccaccgccatgcccttccgtggctacgctgtgctgggtggtgagacgcggtggcccagagtgcagcaggtgcccgctggcgagcgcccgctctggttcatctgctctgggatgggcacacagtggcgtggaatggggctgagccttatgcgcctggaccgcttccgagattccatcctacgctccgatgaggctgtgaaccgattcggcctgaaggtgtcacagctgctgctgagcacagacgagagcacctttgatgacatcgtccattcgtttgtgagcctgactgccatccagataggcctcatagacctgctgagctgcatgggacctgaggcagatggcatcgtcggccactccctgggggagtggctgtcggtacgcgacggctgcctgtcccaggaggaggccgtcctcgctgcctactggaggggacagtgcatcaaagaagccccacttcccgccggcgccatggcagccgtgggcttgtcctgggaggagtgtaaacagcgctgcccccctgcggtggtgcccgcctgccacaactccaaggacacagtcaccatctcgggacctcaggccccggtgtttgagttcgtggagcagctgaggaaggagggtgtgtttgccaaggaggtgcggaccggcggtatggccttccactcctacttcatggaggccatcgcacccccactgctgcaggagctcaagaaggtgatccgggagccgaagccacgttcagcccgctggctcagcacctctatccccgaggcccagtggcacagcagcctggcacgcacgtcttccgccgagtacaatgtcaacaacctggtgagccctgtgctgttccaggaggccctgtggcacgtgcctgagcacgcggtggtgctggagatcgccccgaccccgtgccctcaggctgtcctgaagcgggtccgtaagccgagctgcaccatcatcccccgtatgaagaaggatcacagggacaacctggagttcttcctggccggcatcggcaggctgcacctctcaggcatcgacgccaaccccaatgccttgttcccacctgtggagtccccagctccccgaggaactcccctcatctccccactcatcaagtgggaccacagcctggcctgggacgcgccggccgccgaggacttccccaacggttcaggttccccctcagccaccatctacacatgcacaccaagctccgagtctcctgaccgctacctggtggaccacaccatcgacggtcgcgtcctcttccccgccactggctacctgagcatagtgtggaagacgctggcccgcgcctgggctgggctcgagcagctgcctgtggtgtttgaggatgtggtgcagcaccaggccaccatcctgcccaagactgggacagtgtccttggaggtacggctcctggaggccaccggtgccttcgaggtgtcagagaacggcaacctggtagtgagtgggaaggtgtaccagtgggatgaccctgaccccaggctcttcgaccacccggaaagtccccaccccaattccccacggagtcccctcttcctggcccaggcagaagtttacaaggagctgcgtctgcgtggctacgactacggccctcatttccagggcatcctggaggccagcctggaaggtgactcggggaggctgctgtggaaggataactgggtgagcttcatggacaccatgctgcagatgtccatcctgggctcggccaagcacggcctgtacctacccacccgtgtcaccgccatccacatcgaccctgccacccacaggcagaagctgtacacactgcaggacaaggcccaagtggctgacgtggtggtgagcaggtggccgagggtcacagtggcgggaggcgtccacatctccgggctccacactgagtcggccccgcggcggcagcaggagcagcaggtgcccatcctggagaagttttgcttcactccccacacggaggaggggtgcctgtctgagcgcgctgccctgcaggaggagctgcaactgtgcaaggggctggtgcaggcactgcagaccaaggtgacccagcaggggctgaagatggtggtgcccggactggatggggcccagatcccccgggacccctcacagcaggaactgccccggctgttgtcggctgcctgcaggcttcagctcaacgggaacctgcagctggagctggcgcaggtgctggcccaggagaggcccaagctgccagaggaccctctgctcagcggcctcctggactccccggcactcaaggcctgcctggacactgccgtggagaacatgcccagcctgaagatgaaggtggtggaggtgctggctggccacggtcacctgtattcccgcatcccaggcctgctcagcccccatcccctgctgcagctgagctacacggccaccgaccgccacccccaggccctggaggctgccaggccgagctgcagcagcacgacgttgcccagggccagtgggatcccgcagaccctgcccccagcgccctgggcagcgccgacctcctggtgtgcaactgtgctgtggctgccctcggggacccggcctcagctctcagcaacatggtggctgccctgagagaagggggctttctgctcctgcacacactgctccgggggcaccccctcggggacatcgtggccttcctcacctccactgagccgcagtatggccagggcatcctgagccaggacgcgtgggagagcctcttctccagggtgtcgctgcgcctggtgggcctgaagaagtccttctacggctccacgctcttcctgtgccgccggcccaccccgcaggacagccccatcttcctgccggtggacgataccagcttccgctgggtggagtctctgaagggcatcctggctgacgaagactcttcccggcctgtgtggctgaaggccatcaactgtgccacctcgggcgtggtgggcttggtgaactgtctccgccgagagcccggcgggaaccgcctccggtgtgtgctgctctccaacctcagcagcacctcccacgtcccggaggtggacccgggctccgcagaactgcagaaggtgttgcagggagacctggtgatgaacgtctaccgcgacggggcctggggggctttccgccacttcctgctggaggaggacaagcctgaggagccgacggcacatgcctttgtgagcaccctcacccggggggacctgtcctccatccgctgggtctgctcctcgctgcgccatgcccagcccacctgccctggcgcccagctctgcacggtctactacgcctccctcaacttccgcgacatcatgctggccactggcaagctgtcccctgatgccatcccagggaagtggacctcccaggacagcctgctaggtatggagttctcgggccgagacgccagcggcaagcgtgtgatgggactggtgcctgccaagggcctggccacctctgtcctgctgtcaccggacttcctctgggatgtgccttccaactggacgctggaggaggcggcctcggtgcctgtcgtctacagcacggcctactacgcgctggtggtgcgtgggcgggtgcgccccggggagacgctgctcatccactcgggctcgggcggcgtgggccaggccgccatcgccatcgccctcagtctgggctgccgcgtcttcaccaccgtggggtcggctgagaagcgggcgtacctccaggccaggttcccccagctcgacagcaccagcttcgccaactcccgggacacatccttcgagcagcatgtgctgtggcacacgggcgggaagggcgttgacctggtcttgaactccttggcggaagagaagctgcaggccagcgtgaggtgcttggctacgcacggtcgcttcctggaaattggcaaattcgacctttctcagaaccacccgctcggcatggctatcttcctgaagaacgtgacattccacggggtcctactggatgcgttcttcaacgagagcagtgctgactggcgggaggtgtgggcgcttgtgcaggccggcatccgggatggggtggtacggcccctcaagtgcacggtgttccatggggcccaggtggaggacgccttccgctacatggcccaagggaagcacattggcaaagtcgtcgtgcaggtgcttgcggaggagccggaggcagtgctgaagggggccaaacccaagctgatgtcggccatctccaagaccttctgcccggcccacaagagctacatcatcgctggtggtctgggtggcttcggcctggagttggcgcagtggctgatacagcgtggggtgcagaagctcgtgttgacttctcgctccgggatccggacaggctaccaggccaagcaggtccgccggtggaggcgccagggcgtacaggtgcaggtgtccaccagcaacatcagctcactggagggggcccggggcctcattgccgaggcggcgcagcttgggcccgtgggcggcgtcttcaacctggccgtggtcttgagagatggcttgctggagaaccagaccccagagttcttccaggacgtctgcaagcccaagtacagcggcaccctgaacctggacagggtgacccgagaggcgtgccctgagctggactactttgtggtcttctcctctgtgagctgcgggcgtggcaatgcgggacagagcaactacggctttgccaattccgccatggagcgtatctgtgagaaacgccggcacgaaggcctcccaggcctggccgtgcagtggggcgccatcggcgacgtgggcattttggtggagacgatgagcaccaacgacacgatcgtcagtggcacgctgccccagcgcatggcgtcctgcctggaggtgctggacctcttcctgaaccagccccacatggtcctgagcagctttgtgctggctgagaaggctgcggcctatagggacagggacagccagcgggacctggtggaggccgtggcacacatcctgggcatccgcgacttggctgctgtcaacctggacagctcactggcggacctgggcctggactcgctcatgagcgtggaggtgcgccagacgctggagcgtgagctcaacctggtgctgtccgtgcgcgaggtgcggcaactcacgctccggaaactgcaggagctgtcctcaaaggcggatgaggccagcgagctggcatgccccacgcccaaggaggatggtctggcccagcagcagactcagctgaacctgcgctccctgctggtgaacccggagggccccaccctgatgcggctcaactccgtgcagagctcggagcggcccctgttcctggtgcacccaatcgagggctccaccaccgtgttccacagcctggcctcccggctcagcatccccacctatggcctgcagtgcacccgagctgcgccccttgacagcatccacagcctggctgcctactacatcgactgcatcaggcaggtgcagcccgagggcccctaccgcgtggccggctactcctacggggcctgcgtggcctttgaaatgtgctcccagctgcaggcccagcagagcccagcccccacccacaacagcctcttcctgttcgacggctcgcccacctacgtactggcctacacccagagctaccgggcaaagctgaccccaggctgtgaggctgaggctgagacggaggccatatgcttcttcgtgcagcagttcacggacatggagcacaacagggtgctggaggcgctgctgccgctgaagggcctagaggagcgtgtggcagccgccgtggacctgatcatcaagagccaccagggcctggaccgccaggagctgagctttgcggcccggtccttctactacaagctgcgtgccgctgagcagtacacacccaaggccaagtaccatggcaacgtgatgctactgcgcgccaagacgggtggcgcctacggcgaggacctgggcgcggactacaacctctcccaggtatgcgacgggaaagtatccgtccacgtcatcgagggtgaccaccgcacgctgctggagggcagcggcctggagtccatcatcagcatcatccacagctccctggctgagccacgcgtgagcgtgcgggagggctaggcccgtgcccccgcctgccaccggaggtcactccaccatccccaccccaccccaccccacccccgccatgcaacgggattgaagggtcctgccggtgggaccctgtccggcccagtgccactgccccccgaggctgctagatgtaggtgttaggcatgtcccacccacccgccgcctcccacggcacctcggggacaccagagctgccgacttggagactcctggtctgtgaagagccggtggtgcccgtgcccgcaggaactgggctgggcctcgtgcgcccgtggggtctgcgcttggtctttctgtgcttggatttgcatatttattgcattgctggtagagacccccaggcctgtccaccctgccaagactcctcaggcagcgtgtgggtcccgcactctgcccccatttccccatttccccgtggggtgctgcccttatgcccggcgccgggcaccaactccatgtttggtgtttgtctgtgtttgtttttcaagaaatgattcaaattgc

SEQ ID NO: 530813 - DNA, 740 bp, Homo sapiens
  misc_feature (103)..(103): n is a, c, g, or t
  misc_feature (109)..(109): n is a, c, g, or t
  misc_feature (173)..(174): n is a, c, g, or t
  misc_feature (321)..(321): n is a, c, g, or t
  misc_feature (622)..(622): n is a, c, g, or t
  misc_feature (668)..(668): n is a, c, g, or t
  misc_feature (673)..(673): n is a, c, g, or t
  misc_feature (691)..(692): n is a, c, g, or t
  misc_feature (695)..(695): n is a, c, g, or t
  misc_feature (697)..(697): n is a, c, g, or t
  misc_feature (708)..(708): n is a, c, g, or t
  misc_feature (712)..(712): n is a, c, g, or t
  misc_feature (736)..(736): n is a, c, g, or t
gggaccagacgccccagtcccggcccgcaccgcgactactgaaggcgctgaccgctctgacctgaacgggcacttgtgttccagctcccctgggacctgtggncgccgnccacagaccatgctcctggggcgcctgacttcccagctgttgagggccgttccttgggcaggcnngcgtccgccttggcccgtctctggagtgctgggcagccgggtctgcgggcccctttacagcacatcgccggccggcccaggtagggcggctctctccctcgcaagggggcccagctggagctggaggagatgctggtccccaggaangatgtccgtcagccccctggagagctggctcacggcccgctgcttcctgcccagactggataccgggaccgcagggactgtggctccaccgcaatcctaccagtgtccgcccagccagataggggaaggggccgagcagggggatgaaggcgtcgcggatgcgcctcaaattcagtgcaaaaacgtgctgaagatccgccggcggaagatgaatccaccacaagtaccggaagctggtgaagaagacgcggttcctgcggaggaaggtccaggagggacgcctgagacgcaagcagatcangttcgagaaagacctgaggcgcatctggctggaaggcggggctaanggaangcccccgaaggctggcannacncncaagatctacntggngggcaaactgagtccttggcgccngccc

SEQ ID NO: 530814 - DNA, 148 bp, Homo sapiens
  misc_feature (31)..(31): n is a, c, g, or t
atgggacgaatatgcgcatcttgctcccatnagacgttcctcctccagatactgtgccattttctctgaatgctgtaactgagcagctctcagttgcttcttcagccgttccacttcattctttaaaaacctgctggagaagactgcg

SEQ ID NO: 530815 - DNA, 7876 bp, Homo sapiens
atggaggaggtggtgattgccggcatgttcgggaagctgccagagtcggagaacttgcaggagttctgggacaacctcatcggcggtgtggacatggtcacggacgatgaccgtcgctggaaggctgggctctacggcctgccccggcggtccggcaagctgaaggacctgtctaggtttgatgcctccttcttcggagtccaccccaagcaggcacacacgatggaccctcagctgcggctgctgctggaagctacctatgaagccatcgtggacggaggcatcaacccagattcactccgaggaacacacactggcgtctgggtgggcgtgagcggctctgagacctcggaggccctgagccgagaccccgagacactcgtgggctacagcatggtgggctgccagcgagcgatgatggccaaccggctctccttcttcttcgacttcagagggcccagcatcgcactggacacagcctgctcctccagcctgatggccctgcagaacgcctaccaggccatccacagcgggcagtgccctgccgccatcgtggggggcatcaacgtcctgctgaagcccaacacctccgtgcagttcttgaggctggggatgctcagccccgagggcacctgcaaggccttcgacacagcggggaatgggtactgccgctcggagggtgtggtggctgtcctgctgaccaagaagtccctggcccggaaggtctacaccaccatcctgaacaaaggcaccaatacagatggcttcaaggagcaaggcgtgaccttccctcaggatatccaggagcagcctatccgctcgttgtaccagtcggccggagtggcccctgagtcatttgaatacatcgaagcccacggaccaggcaccaaggtgggcgacccccaggagcgtaatggcatcacccgagccctgtgcgccacccgccaggagccgctgctcatcggctccaccaagtccaacatggggcacccggagccagcctcggggctcgacgccctggccaaggtgctgctgtccctggagcacgggctctgggcccccaacctgcacttccatagccccaaccctgagatcccagcgctgttggatgggcggctgcaggtggtggaccagcccctgcccgtccgtggcggcaacgtgggcatcaactcctttggcttcgggggctccaacatgcacatcatcctgaggcccaacacgcagtccgcccccgcacccgccccacatgccaccctgccccgtctgctgcgggccagcggacgcacccctgaggccgtgcagaagctgctggagcagggcctccggcacagccagggcctggctttcctgagcatgctgaacgacatcgcggctgtccccgccaccgccatgcccttccgtggctacgctgtgctgggtggtgagacgcggtggcccagagtgcagcaggtgcccgctggcgagcgcccgctctggttcatctgctctgggatgggcacacagtggcgtggaatggggctgagccttatgcgcctggaccgcttccgagattccatcctacgctccgatgaggctgtgaaccgattcggcctgaaggtgtcacagctgctgctgagcacagacgagagcacctttgatgacatcgtccattcgtttgtgagcctgactgccatccagataggcctcatagacctgctgagctgcatgggacctgaggcagatggcatcgtcggccactccctgggggagtggctgtcggtacgcgacggctgcctgtcccaggaggaggccgtcctcgctgcctactggaggggacagtgcatcaaagaagccccacttcccgccggcgccatggcagccgtgggcttgtcctgggaggagtgtaaacagcgctgcccccctgcggtggtgcccgcctgccacaactccaaggacacagtcaccatctcgggacctcaggccccggtgtttgagttcgtggagcagctgaggaaggagggtgtgtttgccaaggaggtgcggaccggcggtatggccttccactcctacttcatggaggccatcgcacccccactgctgcaggagctcaagaaggtgatccgggagccgaagccacgttcagcccgctggctcagcacctctatccccgaggcccagtggcacagcagcctggcacgcacgtcttccgccgagtacaatgtcaacaacctggtgagccctgtgctgttccaggaggccctgtggcacgtgcctgagcacgcggtggtgctggagatcgccccgaccccgtgccctcaggctgtcctgaagcgggtccgtaagccgagctgcaccatcatcccccgtatgaagaaggatcacagggacaacctggagttcttcctggccggcatcggcaggctgcacctctcaggcatcgacgccaaccccaatgccttgttcccacctgtggagtccccagctccccgaggaactcccctcatctccccactcatcaagtgggaccacagcctggcctgggacgcgccggccgccgaggacttccccaacggttcaggttccccctcagccaccatctacacatgcacaccaagctccgagtctcctgaccgctacctggtggaccacaccatcgacggtcgcgtcctcttccccgccactggctacctgagcatagtgtggaagacgctggcccgcgcctgggctgggctcgagcagctgcctgtggtgtttgaggatgtggtgcagcaccaggccaccatcctgcccaagactgggacagtgtccttggaggtacggctcctggaggccaccggtgccttcgaggtgtcagagaacggcaacctggtagtgagtgggaaggtgtaccagtgggatgaccctgaccccaggctcttcgaccacccggaaagtccccaccccaattccccacggagtcccctcttcctggcccaggcagaagtttacaaggagctgcgtctgcgtggctacgactacggccctcatttccagggcatcctggaggccagcctggaaggtgactcggggaggctgctgtggaaggataactgggtgagcttcatggacaccatgctgcagatgtccatcctgggctcggccaagcacggcctgtacctacccacccgtgtcaccgccatccacatcgaccctgccacccacaggcagaagctgtacacactgcaggacaaggcccaagtggctgacgtggtggtgagcaggtggccgagggtcacagtggcgggaggcgtccacatctccgggctccacactgagtcggccccgcggcggcagcaggagcagcaggtgcccatcctggagaagttttgcttcactccccacacggaggaggggtgcctgtctgagcgcgctgccctgcaggaggagctgcaactgtgcaaggggctggtgcaggcactgcagaccaaggtgacccagcaggggctgaagatggtggtgcccggactggatggggcccagatcccccgggacccctcacagcaggaactgccccggctgttgtcggctgcctgcaggcttcagctcaacgggaacctgcagctggagctggcgcaggtgctggcccaggagaggcccaagctgccagaggaccctctgctcagcggcctcctggactccccggcactcaaggcctgcctggacactgccgtggagaacatgcccagcctgaagatgaaggtggtggaggtgctggctggccacggtcacctgtattcccgcatcccaggcctgctcagcccccatcccctgctgcagctgagctacacggccaccgaccgccacccccaggccctggaggctgccaggccgagctgcagcagcacgacgttgcccagggccagtgggatcccgcagaccctgcccccagcgccctgggcagcgccgacctcctggtgtgcaactgtgctgtggctgccctcggggacccggcctcagctctcagcaacatggtggctgccctgagagaagggggctttctgctcctgcacacactgctccgggggcaccccctcggggacatcgtggccttcctcacctccactgagccgcagtatggccagggcatcctgagccaggacgcgtgggagagcctcttctccagggtgtcgctgcgcctggtgggcctgaagaagtccttctacggctccacgctcttcctgtgccgccggcccaccccgcaggacagccccatcttcctgccggtggacgataccagcttccgctgggtggagtctctgaagggcatcctggctgacgaagactcttcccggcctgtgtggctgaaggccatcaactgtgccacctcgggcgtggtgggcttggtgaactgtctccgccgagagcccggcgggaaccgcctccggtgtgtgctgctctccaacctcagcagcacctcccacgtcccggaggtggacccgggctccgcagaactgcagaaggtgttgcagggagacctggtgatgaacgtctaccgcgacggggcctggggggctttccgccacttcctgctggaggaggacaagcctgaggagccgacggcacatgcctttgtgagcaccctcacccggggggacctgtcctccatccgctgggtctgctcctcgctgcgccatgcccagcccacctgccctggcgcccagctctgcacggtctactacgcctccctcaacttccgcgacatcatgctggccactggcaagctgtcccctgatgccatcccagggaagtggacctcccaggacagcctgctaggtatggagttctcgggccgagacgccagcggcaagcgtgtgatgggactggtgcctgccaagggcctggccacctctgtcctgctgtcaccggacttcctctgggatgtgccttccaactggacgctggaggaggcggcctcggtgcctgtcgtctacagcacggcctactacgcgctggtggtgcgtgggcgggtgcgccccggggagacgctgctcatccactcgggctcgggcggcgtgggccaggccgccatcgccatcgccctcagtctgggctgccgcgtcttcaccaccgtggggtcggctgagaagcgggcgtacctccaggccaggttcccccagctcgacagcaccagcttcgccaactcccgggacacatccttcgagcagcatgtgctgtggcacacgggcgggaagggcgttgacctggtcttgaactccttggcggaagagaagctgcaggccagcgtgaggtgcttggctacgcacggtcgcttcctggaaattggcaaattcgacctttctcagaaccacccgctcggcatggctatcttcctgaagaacgtgacattccacggggtcctactggatgcgttcttcaacgagagcagtgctgactggcgggaggtgtgggcgcttgtgcaggccggcatccgggatggggtggtacggcccctcaagtgcacggtgttccatggggcccaggtggaggacgccttccgctacatggcccaagggaagcacattggcaaagtcgtcgtgcaggtgcttgcggaggagccggaggcagtgctgaagggggccaaacccaagctgatgtcggccatctccaagaccttctgcccggcccacaagagctacatcatcgctggtggtctgggtggcttcggcctggagttggcgcagtggctgatacagcgtggggtgcagaagctcgtgttgacttctcgctccgggatccggacaggctaccaggccaagcaggtccgccggtggaggcgccagggcgtacaggtgcaggtgtccaccagcaacatcagctcactggagggggcccggggcctcattgccgaggcggcgcagcttgggcccgtgggcggcgtcttcaacctggccgtggtcttgagagatggcttgctggagaaccagaccccagagttcttccaggacgtctgcaagcccaagtacagcggcaccctgaacctggacagggtgacccgagaggcgtgccctgagctggactactttgtggtcttctcctctgtgagctgcgggcgtggcaatgcgggacagagcaactacggctttgccaattccgccatggagcgtatctgtgagaaacgccggcacgaaggcctcccaggcctggccgtgcagtggggcgccatcggcgacgtgggcattttggtggagacgatgagcaccaacgacacgatcgtcagtggcacgctgccccagcgcatggcgtcctgcctggaggtgctggacctcttcctgaaccagccccacatggtcctgagcagctttgtgctggctgagaaggctgcggcctatagggacagggacagccagcgggacctggtggaggccgtggcacacatcctgggcatccgcgacttggctgctgtcaacctggacagctcactggcggacctgggcctggactcgctcatgagcgtggaggtgcgccagacgctggagcgtgagctcaacctggtgctgtccgtgcgcgaggtgcggcaactcacgctccggaaactgcaggagctgtcctcaaaggcggatgaggccagcgagctggcatgccccacgcccaaggaggatggtctggcccagcagcagactcagctgaacctgcgctccctgctggtgaacccggagggccccaccctgatgcggctcaactccgtgcagagctcggagcggcccctgttcctggtgcacccaatcgagggctccaccaccgtgttccacagcctggcctcccggctcagcatccccacctatggcctgcagtgcacccgagctgcgccccttgacagcatccacagcctggctgcctactacatcgactgcatcaggcaggtgcagcccgagggcccctaccgcgtggccggctactcctacggggcctgcgtggcctttgaaatgtgctcccagctgcaggcccagcagagcccagcccccacccacaacagcctcttcctgttcgacggctcgcccacctacgtactggcctacacccagagctaccgggcaaagctgaccccaggctgtgaggctgaggctgagacggaggccatatgcttcttcgtgcagcagttcacggacatggagcacaacagggtgctggaggcgctgctgccgctgaagggcctagaggagcgtgtggcagccgccgtggacctgatcatcaagagccaccagggcctggaccgccaggagctgagctttgcggcccggtccttctactacaagctgcgtgccgctgagcagtacacacccaaggccaagtaccatggcaacgtgatgctactgcgcgccaagacgggtggcgcctacggcgaggacctgggcgcggactacaacctctcccaggtatgcgacgggaaagtatccgtccacgtcatcgagggtgaccaccgcacgctgctggagggcagcggcctggagtccatcatcagcatcatccacagctccctggctgagccacgcgtgagcgtgcgggagggctaggcccgtgcccccgcctgccaccggaggtcactccaccatccccaccccaccccaccccacccccgccatgcaacgggattgaagggtcctgccggtgggaccctgtccggcccagtgccactgccccccgaggctgctagatgtaggtgttaggcatgtgctacgcactctgcggctattacggaaactcggagacactagaattgacgacttgaagactacttgatggtgacaactcacaggtgcctatcgcctaagaacatgtaatgggccctttgcgccacgagatgcttgcgctaggactttgtgatctggccaatcgataattatagcagttgattgaggtg

SEQ ID NO: 530816 - DNA, 8309 bp, Homo sapiens
  misc_feature (7594)..(7594): n is a, c, g, or t
  misc_feature (7633)..(7633): n is a, c, g, or t
  misc_feature (7637)..(7637): n is a, c, g, or t
  misc_feature (7647)..(7647): n is a, c, g, or t
  misc_feature (7651)..(7651): n is a, c, g, or t
  misc_feature (7653)..(7653): n is a, c, g, or t
  misc_feature (7655)..(7655): n is a, c, g, or t
  misc_feature (7664)..(7664): n is a, c, g, or t
  misc_feature (8308)..(8309): n is a, c, g, or t
atggaggaggtggtgattgccggcatgttcgggaagctgccagagtcggagaacttgcaggagttctgggacaacctcatcggcggtgtggacatggtcacggacgatgaccgtcgctggaaggctgggctctacggcctgccccggcggtccggcaagctgaaggacctgtctaggtttgatgcctccttcttcggagtccaccccaagcaggcacacacgatggaccctcagctgcggctgctgctggaagctacctatgaagccatcgtggacggaggcatcaacccagattcactccgaggaacacacactggcgtctgggtgggcgtgagcggctctgagacctcggaggccctgagccgagaccccgagacactcgtgggctacagcatggtgggctgccagcgagcgatgatggccaaccggctctccttcttcttcgacttcagagggcccagcatcgcactggacacagcctgctcctccagcctgatggccctgcagaacgcctaccaggccatccacagcgggcagtgccctgccgccatcgtggggggcatcaacgtcctgctgaagcccaacacctccgtgcagttcttgaggctggggatgctcagccccgagggcacctgcaaggccttcgacacagcggggaatgggtactgccgctcggagggtgtggtggctgtcctgctgaccaagaagtccctggcccggaaggtctacaccaccatcctgaacaaaggcaccaatacagatggcttcaaggagcaaggcgtgaccttccctcaggatatccaggagcagcctatccgctcgttgtaccagtcggccggagtggcccctgagtcatttgaatacatcgaagcccacggaccaggcaccaaggtgggcgacccccaggagcgtaatggcatcacccgagccctgtgcgccacccgccaggagccgctgctcatcggctccaccaagtccaacatggggcacccggagccagcctcggggctcgacgccctggccaaggtgctgctgtccctggagcacgggctctgggcccccaacctgcacttccatagccccaaccctgagatcccagcgctgttggatgggcggctgcaggtggtggaccagcccctgcccgtccgtggcggcaacgtgggcatcaactcctttggcttcgggggctccaacatgcacatcatcctgaggcccaacacgcagtccgcccccgcacccgccccacatgccaccctgccccgtctgctgcgggccagcggacgcacccctgaggccgtgcagaagctgctggagcagggcctccggcacagccagggcctggctttcctgagcatgctgaacgacatcgcggctgtccccgccaccgccatgcccttccgtggctacgctgtgctgggtggtgagacgcggtggcccagagtgcagcaggtgcccgctggcgagcgcccgctctggttcatctgctctgggatgggcacacagtggcgtggaatggggctgagccttatgcgcctggaccgcttccgagattccatcctacgctccgatgaggctgtgaaccgattcggcctgaaggtgtcacagctgctgctgagcacagacgagagcacctttgatgacatcgtccattcgtttgtgagcctgactgccatccagataggcctcatagacctgctgagctgcatgggacctgaggcagatggcatcgtcggccactccctgggggagtggctgtcggtacgcgacggctgcctgtcccaggaggaggccgtcctcgctgcctactggaggggacagtgcatcaaagaagccccacttcccgccggcgccatggcagccgtgggcttgtcctgggaggagtgtaaacagcgctgcccccctgcggtggtgcccgcctgccacaactccaaggacacagtcaccatctcgggacctcaggccccggtgtttgagttcgtggagcagctgaggaaggagggtgtgtttgccaaggaggtgcggaccggcggtatggccttccactcctacttcatggaggccatcgcacccccactgctgcaggagctcaagaaggtgatccgggagccgaagccacgttcagcccgctggctcagcacctctatccccgaggcccagtggcacagcagcctggcacgcacgtcttccgccgagtacaatgtcaacaacctggtgagccctgtgctgttccaggaggccctgtggcacgtgcctgagcacgcggtggtgctggagatcgccccgaccccgtgccctcaggctgtcctgaagcgggtccgtaagccgagctgcaccatcatcccccgtatgaagaaggatcacagggacaacctggagttcttcctggccggcatcggcaggctgcacctctcaggcatcgacgccaaccccaatgccttgttcccacctgtggagtccccagctccccgaggaactcccctcatctccccactcatcaagtgggaccacagcctggcctgggacgcgccggccgccgaggacttccccaacggttcaggttccccctcagccaccatctacacatgcacaccaagctccgagtctcctgaccgctacctggtggaccacaccatcgacggtcgcgtcctcttccccgccactggctacctgagcatagtgtggaagacgctggcccgcgcctgggctgggctcgagcagctgcctgtggtgtttgaggatgtggtgcagcaccaggccaccatcctgcccaagactgggacagtgtccttggaggtacggctcctggaggccaccggtgccttcgaggtgtcagagaacggcaacctggtagtgagtgggaaggtgtaccagtgggatgaccctgaccccaggctcttcgaccacccggaaagtccccaccccaattccccacggagtcccctcttcctggcccaggcagaagtttacaaggagctgcgtctgcgtggctacgactacggccctcatttccagggcatcctggaggccagcctggaaggtgactcggggaggctgctgtggaaggataactgggtgagcttcatggacaccatgctgcagatgtccatcctgggctcggccaagcacggcctgtacctacccacccgtgtcaccgccatccacatcgaccctgccacccacaggcagaagctgtacacactgcaggacaaggcccaagtggctgacgtggtggtgagcaggtggccgagggtcacagtggcgggaggcgtccacatctccgggctccacactgagtcggccccgcggcggcagcaggagcagcaggtgcccatcctggagaagttttgcttcactccccacacggaggaggggtgcctgtctgagcgcgctgccctgcaggaggagctgcaactgtgcaaggggctggtgcaggcactgcagaccaaggtgacccagcaggggctgaagatggtggtgcccggactggatggggcccagatcccccgggacccctcacagcaggaactgccccggctgttgtcggctgcctgcaggcttcagctcaacgggaacctgcagctggagctggcgcaggtgctggcccaggagaggcccaagctgccagaggaccctctgctcagcggcctcctggactccccggcactcaaggcctgcctggacactgccgtggagaacatgcccagcctgaagatgaaggtggtggaggtgctggctggccacggtcacctgtattcccgcatcccaggcctgctcagcccccatcccctgctgcagctgagctacacggccaccgaccgccacccccaggccctggaggctgccaggccgagctgcagcagcacgacgttgcccagggccagtgggatcccgcagaccctgcccccagcgccctgggcagcgccgacctcctggtgtgcaactgtgctgtggctgccctcggggacccggcctcagctctcagcaacatggtggctgccctgagagaagggggctttctgctcctgcacacactgctccgggggcaccccctcggggacatcgtggccttcctcacctccactgagccgcagtatggccagggcatcctgagccaggacgcgtgggagagcctcttctccagggtgtcgctgcgcctggtgggcctgaagaagtccttctacggctccacgctcttcctgtgccgccggcccaccccgcaggacagccccatcttcctgccggtggacgataccagcttccgctgggtggagtctctgaagggcatcctggctgacgaagactcttcccggcctgtgtggctgaaggccatcaactgtgccacctcgggcgtggtgggcttggtgaactgtctccgccgagagcccggcgggaaccgcctccggtgtgtgctgctctccaacctcagcagcacctcccacgtcccggaggtggacccgggctccgcagaactgcagaaggtgttgcagggagacctggtgatgaacgtctaccgcgacggggcctggggggctttccgccacttcctgctggaggaggacaagcctgaggagccgacggcacatgcctttgtgagcaccctcacccggggggacctgtcctccatccgctgggtctgctcctcgctgcgccatgcccagcccacctgccctggcgcccagctctgcacggtctactacgcctccctcaacttccgcgacatcatgctggccactggcaagctgtcccctgatgccatcccagggaagtggacctcccaggacagcctgctaggtatggagttctcgggccgagacgccagcggcaagcgtgtgatgggactggtgcctgccaagggcctggccacctctgtcctgctgtcaccggacttcctctgggatgtgccttccaactggacgctggaggaggcggcctcggtgcctgtcgtctacagcacggcctactacgcgctggtggtgcgtgggcgggtgcgccccggggagacgctgctcatccactcgggctcgggcggcgtgggccaggccgccatcgccatcgccctcagtctgggctgccgcgtcttcaccaccgtggggtcggctgagaagcgggcgtacctccaggccaggttcccccagctcgacagcaccagcttcgccaactcccgggacacatccttcgagcagcatgtgctgtggcacacgggcgggaagggcgttgacctggtcttgaactccttggcggaagagaagctgcaggccagcgtgaggtgcttggctacgcacggtcgcttcctggaaattggcaaattcgacctttctcagaaccacccgctcggcatggctatcttcctgaagaacgtgacattccacggggtcctactggatgcgttcttcaacgagagcagtgctgactggcgggaggtgtgggcgcttgtgcaggccggcatccgggatggggtggtacggcccctcaagtgcacggtgttccatggggcccaggtggaggacgccttccgctacatggcccaagggaagcacattggcaaagtcgtcgtgcaggtgcttgcggaggagccggaggcagtgctgaagggggccaaacccaagctgatgtcggccatctccaagaccttctgcccggcccacaagagctacatcatcgctggtggtctgggtggcttcggcctggagttggcgcagtggctgatacagcgtggggtgcagaagctcgtgttgacttctcgctccgggatccggacaggctaccaggccaagcaggtccgccggtggaggcgccagggcgtacaggtgcaggtgtccaccagcaacatcagctcactggagggggcccggggcctcattgccgaggcggcgcagcttgggcccgtgggcggcgtcttcaacctggccgtggtcttgagagatggcttgctggagaaccagaccccagagttcttccaggacgtctgcaagcccaagtacagcggcaccctgaacctggacagggtgacccgagaggcgtgccctgagctggactactttgtggtcttctcctctgtgagctgcgggcgtggcaatgcgggacagagcaactacggctttgccaattccgccatggagcgtatctgtgagaaacgccggcacgaaggcctcccaggcctggccgtgcagtggggcgccatcggcgacgtgggcattttggtggagacgatgagcaccaacgacacgatcgtcagtggcacgctgccccagcgcatggcgtcctgcctggaggtgctggacctcttcctgaaccagccccacatggtcctgagcagctttgtgctggctgagaaggctgcggcctatagggacagggacagccagcgggacctggtggaggccgtggcacacatcctgggcatccgcgacttggctgctgtcaacctggacagctcactggcggacctgggcctggactcgctcatgagcgtggaggtgcgccagacgctggagcgtgagctcaacctggtgctgtccgtgcgcgaggtgcggcaactcacgctccggaaactgcaggagctgtcctcaaaggcggatgaggccagcgagctggcatgccccacgcccaaggaggatggtctggcccagcagcagactcagctgaacctgcgctccctgctggtgaacccggagggccccaccctgatgcggctcaactccgtgcagagctcggagcggcccctgttcctggtgcacccaatcgagggctccaccaccgtgttccacagcctggcctcccggctcagcatccccacctatggcctgcagtgcacccgagctgcgccccttgacagcatccacagcctggctgcctactacatcgactgcatcaggcaggtgcagcccgagggcccctaccgcgtggccggctactcctacggggcctgcgtggcctttgaaatgtgctcccagctgcaggcccagcagagcccagcccccacccacaacagcctcttcctgttcgacggctcgcccacctacgtactggcctacacccagagctaccgggcaaagctgaccccaggctgtgaggctgaggctgagacggaggccatatgcttcttcgtgcagcagttcacggacatggagcacaacagggtgctggaggcgctgctgccgctgaagggcctagaggagcgtgtggcagccgccgtggacctgatcatcaagagccaccagggcctggaccgccaggagctgagctttgcggcccggtccttctactacaagctgcgtgccgctgagcagtacacacccaaggccaagtaccatggcaacgtgatgctactgcgcgccaagacgggtggcgcctacggcgaggacctgggcgcggactacaacctctcccaggtatgcgacgggaaagtatccgtccacgtcatcgagggtgaccaccgcacgctgctggagggcagcggcctggagtccatcatcagcatcatccacagctccctggctgagccacgcgtgagcgtgcgggagggctaggcccgtgcccccgcctgccaccggaggtcactccaccatcccacaaacgagaaagagagaaaaanaaagaagaaaagaagaaaagaaaagagaaaaagaaaagncganggaaaaaganaganananaaaaggaanagaaagaagaagaagacaggaaaaaaacagaaagaaaagaaaagaggacggggcgcgggggagcgaggcgagagggaggaagagggggagaagcggcaggagaaggagagtgggtgagacgagcgaggaggggcggcgggggtagagcgggggggagacggggaaaaggaggaagaggagcgaggggagagaggggggacaagagaggagaggagacgggggggaaggggcgaggagggggacgggggcagggggacagcgggggaggagagggagggaggagggagcggaaggaggagaggcgagcaccggggcacgcgcgagagccgacaggcgcgaggaggacaaacggagagaagaagagcccagaacgacaagaagagaaagacaggaacaggacagacacggcagccagaaaaggaagcgaaacgaaacggcagaagccaagaagacgagggaacgagacgatggagacggaagagggcaggaagccagaagagggagagaaagggagagcagaaaagacggacaacgagagaagagacagacggaaggggacggcagcacgaaggaggaaaaacagagcaggataagaaccgaagcccgcacgcacgtagagagggccgtgtcggctgcctgggggnn

SEQ ID NO: 530817 - DNA, 7630 bp, Homo sapiens
atggaggaggtggtgattgccggcatgttcgggaagctgccagagtcggagaacttgcaggagttctgggacaacctcatcggcggtgtggacatggtcacggacgatgaccgtcgctggaaggctgggctctacggcctgccccggcggtccggcaagctgaaggacctgtctaggtttgatgcctccttcttcggagtccaccccaagcaggcacacacgatggaccctcagctgcggctgctgctggaagctacctatgaagccatcgtggacggaggcatcaacccagattcactccgaggaacacacactggcgtctgggtgggcgtgagcggctctgagacctcggaggccctgagccgagaccccgagacactcgtgggctacagcatggtgggctgccagcgagcgatgatggccaaccggctctccttcttcttcgacttcagagggcccagcatcgcactggacacagcctgctcctccagcctgatggccctgcagaacgcctaccaggccatccacagcgggcagtgccctgccgccatcgtggggggcatcaacgtcctgctgaagcccaacacctccgtgcagttcttgaggctggggatgctcagccccgagggcacctgcaaggccttcgacacagcggggaatgggtactgccgctcggagggtgtggtggctgtcctgctgaccaagaagtccctggcccggaaggtctacaccaccatcctgaacaaaggcaccaatacagatggcttcaaggagcaaggcgtgaccttccctcaggatatccaggagcagcctatccgctcgttgtaccagtcggccggagtggcccctgagtcatttgaatacatcgaagcccacggaccaggcaccaaggtgggcgacccccaggagcgtaatggcatcacccgagccctgtgcgccacccgccaggagccgctgctcatcggctccaccaagtccaacatggggcacccggagccagcctcggggctcgacgccctggccaaggtgctgctgtccctggagcacgggctctgggcccccaacctgcacttccatagccccaaccctgagatcccagcgctgttggatgggcggctgcaggtggtggaccagcccctgcccgtccgtggcggcaacgtgggcatcaactcctttggcttcgggggctccaacatgcacatcatcctgaggcccaacacgcagtccgcccccgcacccgccccacatgccaccctgccccgtctgctgcgggccagcggacgcacccctgaggccgtgcagaagctgctggagcagggcctccggcacagccagggcctggctttcctgagcatgctgaacgacatcgcggctgtccccgccaccgccatgcccttccgtggctacgctgtgctgggtggtgagacgcggtggcccagagtgcagcaggtgcccgctggcgagcgcccgctctggttcatctgctctgggatgggcacacagtggcgtggaatggggctgagccttatgcgcctggaccgcttccgagattccatcctacgctccgatgaggctgtgaaccgattcggcctgaaggtgtcacagctgctgctgagcacagacgagagcacctttgatgacatcgtccattcgtttgtgagcctgactgccatccagataggcctcatagacctgctgagctgcatgggacctgaggcagatggcatcgtcggccactccctgggggagtggctgtcggtacgcgacggctgcctgtcccaggaggaggccgtcctcgctgcctactggaggggacagtgcatcaaagaagccccacttcccgccggcgccatggcagccgtgggcttgtcctgggaggagtgtaaacagcgctgcccccctgcggtggtgcccgcctgccacaactccaaggacacagtcaccatctcgggacctcaggccccggtgtttgagttcgtggagcagctgaggaaggagggtgtgtttgccaaggaggtgcggaccggcggtatggccttccactcctacttcatggaggccatcgcacccccactgctgcaggagctcaagaaggtgatccgggagccgaagccacgttcagcccgctggctcagcacctctatccccgaggcccagtggcacagcagcctggcacgcacgtcttccgccgagtacaatgtcaacaacctggtgagccctgtgctgttccaggaggccctgtggcacgtgcctgagcacgcggtggtgctggagatcgccccgaccccgtgccctcaggctgtcctgaagcgggtccgtaagccgagctgcaccatcatcccccgtatgaagaaggatcacagggacaacctggagttcttcctggccggcatcggcaggctgcacctctcaggcatcgacgccaaccccaatgccttgttcccacctgtggagtccccagctccccgaggaactcccctcatctccccactcatcaagtgggaccacagcctggcctgggacgcgccggccgccgaggacttccccaacggttcaggttccccctcagccaccatctacacatgcacaccaagctccgagtctcctgaccgctacctggtggaccacaccatcgacggtcgcgtcctcttccccgccactggctacctgagcatagtgtggaagacgctggcccgcgcctgggctgggctcgagcagctgcctgtggtgtttgaggatgtggtgcagcaccaggccaccatcctgcccaagactgggacagtgtccttggaggtacggctcctggaggccaccggtgccttcgaggtgtcagagaacggcaacctggtagtgagtgggaaggtgtaccagtgggatgaccctgaccccaggctcttcgaccacccggaaagtccccaccccaattccccacggagtcccctcttcctggcccaggcagaagtttacaaggagctgcgtctgcgtggctacgactacggccctcatttccagggcatcctggaggccagcctggaaggtgactcggggaggctgctgtggaaggataactgggtgagcttcatggacaccatgctgcagatgtccatcctgggctcggccaagcacggcctgtacctacccacccgtgtcaccgccatccacatcgaccctgccacccacaggcagaagctgtacacactgcaggacaaggcccaagtggctgacgtggtggtgagcaggtggccgagggtcacagtggcgggaggcgtccacatctccgggctccacactgagtcggccccgcggcggcagcaggagcagcaggtgcccatcctggagaagttttgcttcactccccacacggaggaggggtgcctgtctgagcgcgctgccctgcaggaggagctgcaactgtgcaaggggctggtgcaggcactgcagaccaaggtgacccagcaggggctgaagatggtggtgcccggactggatggggcccagatcccccgggacccctcacagcaggaactgccccggctgttgtcggctgcctgcaggcttcagctcaacgggaacctgcagctggagctggcgcaggtgctggcccaggagaggcccaagctgccagaggaccctctgctcagcggcctcctggactccccggcactcaaggcctgcctggacactgccgtggagaacatgcccagcctgaagatgaaggtggtggaggtgctggctggccacggtcacctgtattcccgcatcccaggcctgctcagcccccatcccctgctgcagctgagctacacggccaccgaccgccacccccaggccctggaggctgccaggccgagctgcagcagcacgacgttgcccagggccagtgggatcccgcagaccctgcccccagcgccctgggcagcgccgacctcctggtgtgcaactgtgctgtggctgccctcggggacccggcctcagctctcagcaacatggtggctgccctgagagaagggggctttctgctcctgcacacactgctccgggggcaccccctcggggacatcgtggccttcctcacctccactgagccgcagtatggccagggcatcctgagccaggacgcgtgggagagcctcttctccagggtgtcgctgcgcctggtgggcctgaagaagtccttctacggctccacgctcttcctgtgccgccggcccaccccgcaggacagccccatcttcctgccggtggacgataccagcttccgctgggtggagtctctgaagggcatcctggctgacgaagactcttcccggcctgtgtggctgaaggccatcaactgtgccacctcgggcgtggtgggcttggtgaactgtctccgccgagagcccggcgggaaccgcctccggtgtgtgctgctctccaacctcagcagcacctcccacgtcccggaggtggacccgggctccgcagaactgcagaaggtgttgcagggagacctggtgatgaacgtctaccgcgacggggcctggggggctttccgccacttcctgctggaggaggacaagcctgaggagccgacggcacatgcctttgtgagcaccctcacccggggggacctgtcctccatccgctgggtctgctcctcgctgcgccatgcccagcccacctgccctggcgcccagctctgcacggtctactacgcctccctcaacttccgcgacatcatgctggccactggcaagctgtcccctgatgccatcccagggaagtggacctcccaggacagcctgctaggtatggagttctcgggccgagacgccagcggcaagcgtgtgatgggactggtgcctgccaagggcctggccacctctgtcctgctgtcaccggacttcctctgggatgtgccttccaactggacgctggaggaggcggcctcggtgcctgtcgtctacagcacggcctactacgcgctggtggtgcgtgggcgggtgcgccccggggagacgctgctcatccactcgggctcgggcggcgtgggccaggccgccatcgccatcgccctcagtctgggctgccgcgtcttcaccaccgtggggtcggctgagaagcgggcgtacctccaggccaggttcccccagctcgacagcaccagcttcgccaactcccgggacacatccttcgagcagcatgtgctgtggcacacgggcgggaagggcgttgacctggtcttgaactccttggcggaagagaagctgcaggccagcgtgaggtgcttggctacgcacggtcgcttcctggaaattggcaaattcgacctttctcagaaccacccgctcggcatggctatcttcctgaagaacgtgacattccacggggtcctactggatgcgttcttcaacgagagcagtgctgactggcgggaggtgtgggcgcttgtgcaggccggcatccgggatggggtggtacggcccctcaagtgcacggtgttccatggggcccaggtggaggacgccttccgctacatggcccaagggaagcacattggcaaagtcgtcgtgcaggtgcttgcggaggagccggaggcagtgctgaagggggccaaacccaagctgatgtcggccatctccaagaccttctgcccggcccacaagagctacatcatcgctggtggtctgggtggcttcggcctggagttggcgcagtggctgatacagcgtggggtgcagaagctcgtgttgacttctcgctccgggatccggacaggctaccaggccaagcaggtccgccggtggaggcgccagggcgtacaggtgcaggtgtccaccagcaacatcagctcactggagggggcccggggcctcattgccgaggcggcgcagcttgggcccgtgggcggcgtcttcaacctggccgtggtcttgagagatggcttgctggagaaccagaccccagagttcttccaggacgtctgcaagcccaagtacagcggcaccctgaacctggacagggtgacccgagaggcgtgccctgagctggactactttgtggtcttctcctctgtgagctgcgggcgtggcaatgcgggacagagcaactacggctttgccaattccgccatggagcgtatctgtgagaaacgccggcacgaaggcctcccaggcctggccgtgcagtggggcgccatcggcgacgtgggcattttggtggagacgatgagcaccaacgacacgatcgtcagtggcacgctgccccagcgcatggcgtcctgcctggaggtgctggacctcttcctgaaccagccccacatggtcctgagcagctttgtgctggctgagaaggctgcggcctatagggacagggacagccagcgggacctggtggaggccgtggcacacatcctgggcatccgcgacttggctgctgtcaacctggacagctcactggcggacctgggcctggactcgctcatgagcgtggaggtgcgccagacgctggagcgtgagctcaacctggtgctgtccgtgcgcgaggtgcggcaactcacgctccggaaactgcaggagctgtcctcaaaggcggatgaggccagcgagctggcatgccccacgcccaaggaggatggtctggcccagcagcagactcagctgaacctgcgctccctgctggtgaacccggagggccccaccctgatgcggctcaactccgtgcagagctcggagcggcccctgttcctggtgcacccaatcgagggctccaccaccgtgttccacagcctggcctcccggctcagcatccccacctatggcctgcagtgcacccgagctgcgccccttgacagcatccacagcctggctgcctactacatcgactgcatcaggcaggtgcagcccgagggcccctaccgcgtggccggctactcctacggggcctgcgtggcctttgaaatgtgctcccagctgcaggcccagcagagcccagcccccacccacaacagcctcttcctgttcgacggctcgcccacctacgtactggcctacacccagagctaccgggcaaagctgaccccaggctgtgaggctgaggctgagacggaggccatatgcttcttcgtgcagcagttcacggacatggagcacaacagggtgctggaggcgctgctgccgctgaagggcctagaggagcgtgtggcagccgccgtggacctgatcatcaagagccaccagggcctggaccgccaggagctgagctttgcggcccggtccttctactacaagctgcgtgccgctgagcagtacacacccaaggccaagtaccatggcaacgtgatgctactgcgcgccaagacgggtggcgcctacggcgaggacctgggcgcggactacaacctctcccaggtatgcgacgggaaagtatccgtccacgtcatcgagggtgaccaccgcacgctgctggagggcagcggcctggagtccatcatcagcatcatccacagctccctggctgagccacgcgtgagcgtgcgggagggctaggcccgtgcccccgcctgccaccggaggtcactccaccatcccaagggaaggacagaccgggaggaccgatggaaaaggacggaggcagagagggaacagtg

SEQ ID NO: 530818 - DNA, 8986 bp, Homo sapiens
atggaggaggtggtgattgccggcatgttcgggaagctgccagagtcggagaacttgcaggagttctgggacaacctcatcggcggtgtggacatggtcacggacgatgaccgtcgctggaaggctgggctctacggcctgccccggcggtccggcaagctgaaggacctgtctaggtttgatgcctccttcttcggagtccaccccaagcaggcacacacgatggaccctcagctgcggctgctgctggaagctacctatgaagccatcgtggacggaggcatcaacccagattcactccgaggaacacacactggcgtctgggtgggcgtgagcggctctgagacctcggaggccctgagccgagaccccgagacactcgtgggctacagcatggtgggctgccagcgagcgatgatggccaaccggctctccttcttcttcgacttcagagggcccagcatcgcactggacacagcctgctcctccagcctgatggccctgcagaacgcctaccaggccatccacagcgggcagtgccctgccgccatcgtggggggcatcaacgtcctgctgaagcccaacacctccgtgcagttcttgaggctggggatgctcagccccgagggcacctgcaaggccttcgacacagcggggaatgggtactgccgctcggagggtgtggtggctgtcctgctgaccaagaagtccctggcccggaaggtctacaccaccatcctgaacaaaggcaccaatacagatggcttcaaggagcaaggcgtgaccttccctcaggatatccaggagcagcctatccgctcgttgtaccagtcggccggagtggcccctgagtcatttgaatacatcgaagcccacggaccaggcaccaaggtgggcgacccccaggagcgtaatggcatcacccgagccctgtgcgccacccgccaggagccgctgctcatcggctccaccaagtccaacatggggcacccggagccagcctcggggctcgacgccctggccaaggtgctgctgtccctggagcacgggctctgggcccccaacctgcacttccatagccccaaccctgagatcccagcgctgttggatgggcggctgcaggtggtggaccagcccctgcccgtccgtggcggcaacgtgggcatcaactcctttggcttcgggggctccaacatgcacatcatcctgaggcccaacacgcagtccgcccccgcacccgccccacatgccaccctgccccgtctgctgcgggccagcggacgcacccctgaggccgtgcagaagctgctggagcagggcctccggcacagccagggcctggctttcctgagcatgctgaacgacatcgcggctgtccccgccaccgccatgcccttccgtggctacgctgtgctgggtggtgagacgcggtggcccagagtgcagcaggtgcccgctggcgagcgcccgctctggttcatctgctctgggatgggcacacagtggcgtggaatggggctgagccttatgcgcctggaccgcttccgagattccatcctacgctccgatgaggctgtgaaccgattcggcctgaaggtgtcacagctgctgctgagcacagacgagagcacctttgatgacatcgtccattcgtttgtgagcctgactgccatccagataggcctcatagacctgctgagctgcatgggacctgaggcagatggcatcgtcggccactccctgggggagtggctgtcggtacgcgacggctgcctgtcccaggaggaggccgtcctcgctgcctactggaggggacagtgcatcaaagaagccccacttcccgccggcgccatggcagccgtgggcttgtcctgggaggagtgtaaacagcgctgcccccctgcggtggtgcccgcctgccacaactccaaggacacagtcaccatctcgggacctcaggccccggtgtttgagttcgtggagcagctgaggaaggagggtgtgtttgccaaggaggtgcggaccggcggtatggccttccactcctacttcatggaggccatcgcacccccactgctgcaggagctcaagaaggtgatccgggagccgaagccacgttcagcccgctggctcagcacctctatccccgaggcccagtggcacagcagcctggcacgcacgtcttccgccgagtacaatgtcaacaacctggtgagccctgtgctgttccaggaggccctgtggcacgtgcctgagcacgcggtggtgctggagatcgccccgaccccgtgccctcaggctgtcctgaagcgggtccgtaagccgagctgcaccatcatcccccgtatgaagaaggatcacagggacaacctggagttcttcctggccggcatcggcaggctgcacctctcaggcatcgacgccaaccccaatgccttgttcccacctgtggagtccccagctccccgaggaactcccctcatctccccactcatcaagtgggaccacagcctggcctgggacgcgccggccgccgaggacttccccaacggttcaggttccccctcagccaccatctacacatgcacaccaagctccgagtctcctgaccgctacctggtggaccacaccatcgacggtcgcgtcctcttccccgccactggctacctgagcatagtgtggaagacgctggcccgcgcctgggctgggctcgagcagctgcctgtggtgtttgaggatgtggtgcagcaccaggccaccatcctgcccaagactgggacagtgtccttggaggtacggctcctggaggccaccggtgccttcgaggtgtcagagaacggcaacctggtagtgagtgggaaggtgtaccagtgggatgaccctgaccccaggctcttcgaccacccggaaagtccccaccccaattccccacggagtcccctcttcctggcccaggcagaagtttacaaggagctgcgtctgcgtggctacgactacggccctcatttccagggcatcctggaggccagcctggaaggtgactcggggaggctgctgtggaaggataactgggtgagcttcatggacaccatgctgcagatgtccatcctgggctcggccaagcacggcctgtacctacccacccgtgtcaccgccatccacatcgaccctgccacccacaggcagaagctgtacacactgcaggacaaggcccaagtggctgacgtggtggtgagcaggtggccgagggtcacagtggcgggaggcgtccacatctccgggctccacactgagtcggccccgcggcggcagcaggagcagcaggtgcccatcctggagaagttttgcttcactccccacacggaggaggggtgcctgtctgagcgcgctgccctgcaggaggagctgcaactgtgcaaggggctggtgcaggcactgcagaccaaggtgacccagcaggggctgaagatggtggtgcccggactggatggggcccagatcccccgggacccctcacagcaggaactgccccggctgttgtcggctgcctgcaggcttcagctcaacgggaacctgcagctggagctggcgcaggtgctggcccaggagaggcccaagctgccagaggaccctctgctcagcggcctcctggactccccggcactcaaggcctgcctggacactgccgtggagaacatgcccagcctgaagatgaaggtggtggaggtgctggctggccacggtcacctgtattcccgcatcccaggcctgctcagcccccatcccctgctgcagctgagctacacggccaccgaccgccacccccaggccctggaggctgccaggccgagctgcagcagcacgacgttgcccagggccagtgggatcccgcagaccctgcccccagcgccctgggcagcgccgacctcctggtgtgcaactgtgctgtggctgccctcggggacccggcctcagctctcagcaacatggtggctgccctgagagaagggggctttctgctcctgcacacactgctccgggggcaccccctcggggacatcgtggccttcctcacctccactgagccgcagtatggccagggcatcctgagccaggacgcgtgggagagcctcttctccagggtgtcgctgcgcctggtgggcctgaagaagtccttctacggctccacgctcttcctgtgccgccggcccaccccgcaggacagccccatcttcctgccggtggacgataccagcttccgctgggtggagtctctgaagggcatcctggctgacgaagactcttcccggcctgtgtggctgaaggccatcaactgtgccacctcgggcgtggtgggcttggtgaactgtctccgccgagagcccggcgggaaccgcctccggtgtgtgctgctctccaacctcagcagcacctcccacgtcccggaggtggacccgggctccgcagaactgcagaaggtgttgcagggagacctggtgatgaacgtctaccgcgacggggcctggggggctttccgccacttcctgctggaggaggacaagcctgaggagccgacggcacatgcctttgtgagcaccctcacccggggggacctgtcctccatccgctgggtctgctcctcgctgcgccatgcccagcccacctgccctggcgcccagctctgcacggtctactacgcctccctcaacttccgcgacatcatgctggccactggcaagctgtcccctgatgccatcccagggaagtggacctcccaggacagcctgctaggtatggagttctcgggccgagacgccagcggcaagcgtgtgatgggactggtgcctgccaagggcctggccacctctgtcctgctgtcaccggacttcctctgggatgtgccttccaactggacgctggaggaggcggcctcggtgcctgtcgtctacagcacggcctactacgcgctggtggtgcgtgggcgggtgcgccccggggagacgctgctcatccactcgggctcgggcggcgtgggccaggccgccatcgccatcgccctcagtctgggctgccgcgtcttcaccaccgtggggtcggctgagaagcgggcgtacctccaggccaggttcccccagctcgacagcaccagcttcgccaactcccgggacacatccttcgagcagcatgtgctgtggcacacgggcgggaagggcgttgacctggtcttgaactccttggcggaagagaagctgcaggccagcgtgaggtgcttggctacgcacggtcgcttcctggaaattggcaaattcgacctttctcagaaccacccgctcggcatggctatcttcctgaagaacgtgacattccacggggtcctactggatgcgttcttcaacgagagcagtgctgactggcgggaggtgtgggcgcttgtgcaggccggcatccgggatggggtggtacggcccctcaagtgcacggtgttccatggggcccaggtggaggacgccttccgctacatggcccaagggaagcacattggcaaagtcgtcgtgcaggtgcttgcggaggagccggaggcagtgctgaagggggccaaacccaagctgatgtcggccatctccaagaccttctgcccggcccacaagagctacatcatcgctggtggtctgggtggcttcggcctggagttggcgcagtggctgatacagcgtggggtgcagaagctcgtgttgacttctcgctccgggatccggacaggctaccaggccaagcaggtccgccggtggaggcgccagggcgtacaggtgcaggtgtccaccagcaacatcagctcactggagggggcccggggcctcattgccgaggcggcgcagcttgggcccgtgggcggcgtcttcaacctggccgtggtcttgagagatggcttgctggagaaccagaccccagagttcttccaggacgtctgcaagcccaagtacagcggcaccctgaacctggacagggtgacccgagaggcgtgccctgagctggactactttgtggtcttctcctctgtgagctgcgggcgtggcaatgcgggacagagcaactacggctttgccaattccgccatggagcgtatctgtgagaaacgccggcacgaaggcctcccaggcctggccgtgcagtggggcgccatcggcgacgtgggcattttggtggagacgatgagcaccaacgacacgatcgtcagtggcacgctgccccagcgcatggcgtcctgcctggaggtgctggacctcttcctgaaccagccccacatggtcctgagcagctttgtgctggctgagaaggctgcggcctatagggacagggacagccagcgggacctggtggaggccgtggcacacatcctgggcatccgcgacttggctgctgtcaacctggacagctcactggcggacctgggcctggactcgctcatgagcgtggaggtgcgccagacgctggagcgtgagctcaacctggtgctgtccgtgcgcgaggtgcggcaactcacgctccggaaactgcaggagctgtcctcaaaggcggatgaggccagcgagctggcatgccccacgcccaaggaggatggtctggcccagcagcagactcagctgaacctgcgctccctgctggtgaacccggagggccccaccctgatgcggctcaactccgtgcagagctcggagcggcccctgttcctggtgcacccaatcgagggctccaccaccgtgttccacagcctggcctcccggctcagcatccccacctatggcctgcagtgcacccgagctgcgccccttgacagcatccacagcctggctgcctactacatcgactgcatcaggcaggtgcagcccgagggcccctaccgcgtggccggctactcctacggggcctgcgtggcctttgaaatgtgctcccagctgcaggcccagcagagcccagcccccacccacaacagcctcttcctgttcgacggctcgcccacctacgtactggcctacacccagagctaccgggcaaagctgaccccaggctgtgaggctgaggctgagacggaggccatatgcttcttcgtgcagcagttcacggacatggagcacaacagggtgctggaggcgctgctgccgctgaagggcctagaggagcgtgtggcagccgccgtggacctgatcatcaagagccaccagggcctggaccgccaggagctgagctttgcggcccggtccttctactacaagctgcgtgccgctgagcagtacacacccaaggccaagtaccatggcaacgtgatgctactgcgcgccaagacgggtggcgcctacggcgaggacctgggcgcggactacaacctctcccaggtatgcgacgggaaagtatccgtccacgtcatcgagggtgaccaccgcacgctgctggagggcagcggcctggagtccatcatcagcatcatccacagctccctggctgagccacgcgtgagcgtgcgggagggctaggcccgtgcccccgcctgccaccggaggtcactccaccatccccaccccaacacacatagggagcacttggagggaaggtggggaaggtatgataagggcatccttcgacgaggatagctccgaggagacgagccaggccttgagacgaaagcgagaggggaaaagaggacaacagtagcagagcacaaactagggaagagagaagagaagagaaaagcaagcaataacaaaaaccacaaaagagaacgcaaaacacacaactgacaacaccgcggagcctcaccagaaaccgctgctccaccaccagacaacgagaccaagacgagaacaacgactaggacaccaaagacacacagagaaccagcaccacacatcgacgaacacactcaagaaaacgaatgcagacacaaaccagacaccacacgagccacaaaaacacaccaccaaaaacgaacaagctgacgcaagcatagggagacgcccacccgcgacacacagacaggggaacaaaataaccgggggaaaaaacgacaaaccaacaaacaggcgagaggagacgcgcaagaaagacggcaagaacaaccgaaaagaagagaagagaagcgaccaggacagcccacctgaggagagacacaaagagacaacggggagccaccaagaatcgtacgacaagggagagccaccggagaggcaacacagagaaaacaccacaacgaaccacgagggagggaagcagaaaccaaagagagcgcgggcgacaccagatacaggagggcgcaccgaagaaacgcagaaaaagacgactagagcaaatgcacagcgacccaggccacaccacacgcgcgacacaaacaacaagggaggacaacaatggcggcagaccaagaatcgaggcgcaccacaaacaacgcaaagcctcagcgcgaaaccaagtcagaaaaagaaggatgcaaaccaggacaaagagcaaggccaccccaaccccagacaaacgcgcaagaacacacatgaacatcccgcagaagcacaagacaacaccgaaccagcaaaaacccaaagcgggagcacaacacggacacacacaaaacccagggaaaaaacgggaccaaaacagcgctaaaaaaacaagcaaagagagacatacagacccggaaagataggtgacgaccacaaaagagaaggagcaaaaagcaagggcaaggacagaagacaagcccagaccaacaaacgaaacaagcgacaacaggggaggcgagagcgaagcagaccaacgggacgacccccggaagaacaacaaccaacagaaaaagagcagacgaagtgcagaaaaagagagaagacacataggcgagaagagagaaaacgaacaacgaaggaaacactaacaagggtaagacacaacagtcagcataaaaagggcagacacgacaaggaccacgaggaaggaggaagaacag

SEQ ID NO: 530819 - DNA, 266 bp, Homo sapiens
gtagctggggactacaggtgtgtgtctctatacctgctcatttttctatttcttttgtagagacagggtttcatcatgttgctcaggctggtctcaaactcctgagctcaagcagtctgcccaccttggactcccaaagcactgggattacaggcatgagctaccatgcccgaccagtatcagttcttttatggcatttattagctgtaaatgctattgatcctatatgtaatcaattaggattggactttgtggtttgaataatc

SEQ ID NO: 530820 - DNA, 8419 bp, Homo sapiens
atggaggaggtggtgattgccggcatgttcgggaagctgccagagtcggagaacttgcaggagttctgggacaacctcatcggcggtgtggacatggtcacggacgatgaccgtcgctggaaggctgggctctacggcctgccccggcggtccggcaagctgaaggacctgtctaggtttgatgcctccttcttcggagtccaccccaagcaggcacacacgatggaccctcagctgcggctgctgctggaagctacctatgaagccatcgtggacggaggcatcaacccagattcactccgaggaacacacactggcgtctgggtgggcgtgagcggctctgagacctcggaggccctgagccgagaccccgagacactcgtgggctacagcatggtgggctgccagcgagcgatgatggccaaccggctctccttcttcttcgacttcagagggcccagcatcgcactggacacagcctgctcctccagcctgatggccctgcagaacgcctaccaggccatccacagcgggcagtgccctgccgccatcgtggggggcatcaacgtcctgctgaagcccaacacctccgtgcagttcttgaggctggggatgctcagccccgagggcacctgcaaggccttcgacacagcggggaatgggtactgccgctcggagggtgtggtggctgtcctgctgaccaagaagtccctggcccggaaggtctacaccaccatcctgaacaaaggcaccaatacagatggcttcaaggagcaaggcgtgaccttccctcaggatatccaggagcagcctatccgctcgttgtaccagtcggccggagtggcccctgagtcatttgaatacatcgaagcccacggaccaggcaccaaggtgggcgacccccaggagcgtaatggcatcacccgagccctgtgcgccacccgccaggagccgctgctcatcggctccaccaagtccaacatggggcacccggagccagcctcggggctcgacgccctggccaaggtgctgctgtccctggagcacgggctctgggcccccaacctgcacttccatagccccaaccctgagatcccagcgctgttggatgggcggctgcaggtggtggaccagcccctgcccgtccgtggcggcaacgtgggcatcaactcctttggcttcgggggctccaacatgcacatcatcctgaggcccaacacgcagtccgcccccgcacccgccccacatgccaccctgccccgtctgctgcgggccagcggacgcacccctgaggccgtgcagaagctgctggagcagggcctccggcacagccagggcctggctttcctgagcatgctgaacgacatcgcggctgtccccgccaccgccatgcccttccgtggctacgctgtgctgggtggtgagacgcggtggcccagagtgcagcaggtgcccgctggcgagcgcccgctctggttcatctgctctgggatgggcacacagtggcgtggaatggggctgagccttatgcgcctggaccgcttccgagattccatcctacgctccgatgaggctgtgaaccgattcggcctgaaggtgtcacagctgctgctgagcacagacgagagcacctttgatgacatcgtccattcgtttgtgagcctgactgccatccagataggcctcatagacctgctgagctgcatgggacctgaggcagatggcatcgtcggccactccctgggggagtggctgtcggtacgcgacggctgcctgtcccaggaggaggccgtcctcgctgcctactggaggggacagtgcatcaaagaagccccacttcccgccggcgccatggcagccgtgggcttgtcctgggaggagtgtaaacagcgctgcccccctgcggtggtgcccgcctgccacaactccaaggacacagtcaccatctcgggacctcaggccccggtgtttgagttcgtggagcagctgaggaaggagggtgtgtttgccaaggaggtgcggaccggcggtatggccttccactcctacttcatggaggccatcgcacccccactgctgcaggagctcaagaaggtgatccgggagccgaagccacgttcagcccgctggctcagcacctctatccccgaggcccagtggcacagcagcctggcacgcacgtcttccgccgagtacaatgtcaacaacctggtgagccctgtgctgttccaggaggccctgtggcacgtgcctgagcacgcggtggtgctggagatcgccccgaccccgtgccctcaggctgtcctgaagcgggtccgtaagccgagctgcaccatcatcccccgtatgaagaaggatcacagggacaacctggagttcttcctggccggcatcggcaggctgcacctctcaggcatcgacgccaaccccaatgccttgttcccacctgtggagtccccagctccccgaggaactcccctcatctccccactcatcaagtgggaccacagcctggcctgggacgcgccggccgccgaggacttccccaacggttcaggttccccctcagccaccatctacacatgcacaccaagctccgagtctcctgaccgctacctggtggaccacaccatcgacggtcgcgtcctcttccccgccactggctacctgagcatagtgtggaagacgctggcccgcgcctgggctgggctcgagcagctgcctgtggtgtttgaggatgtggtgcagcaccaggccaccatcctgcccaagactgggacagtgtccttggaggtacggctcctggaggccaccggtgccttcgaggtgtcagagaacggcaacctggtagtgagtgggaaggtgtaccagtgggatgaccctgaccccaggctcttcgaccacccggaaagtccccaccccaattccccacggagtcccctcttcctggcccaggcagaagtttacaaggagctgcgtctgcgtggctacgactacggccctcatttccagggcatcctggaggccagcctggaaggtgactcggggaggctgctgtggaaggataactgggtgagcttcatggacaccatgctgcagatgtccatcctgggctcggccaagcacggcctgtacctacccacccgtgtcaccgccatccacatcgaccctgccacccacaggcagaagctgtacacactgcaggacaaggcccaagtggctgacgtggtggtgagcaggtggccgagggtcacagtggcgggaggcgtccacatctccgggctccacactgagtcggccccgcggcggcagcaggagcagcaggtgcccatcctggagaagttttgcttcactccccacacggaggaggggtgcctgtctgagcgcgctgccctgcaggaggagctgcaactgtgcaaggggctggtgcaggcactgcagaccaaggtgacccagcaggggctgaagatggtggtgcccggactggatggggcccagatcccccgggacccctcacagcaggaactgccccggctgttgtcggctgcctgcaggcttcagctcaacgggaacctgcagctggagctggcgcaggtgctggcccaggagaggcccaagctgccagaggaccctctgctcagcggcctcctggactccccggcactcaaggcctgcctggacactgccgtggagaacatgcccagcctgaagatgaaggtggtggaggtgctggctggccacggtcacctgtattcccgcatcccaggcctgctcagcccccatcccctgctgcagctgagctacacggccaccgaccgccacccccaggccctggaggctgccaggccgagctgcagcagcacgacgttgcccagggccagtgggatcccgcagaccctgcccccagcgccctgggcagcgccgacctcctggtgtgcaactgtgctgtggctgccctcggggacccggcctcagctctcagcaacatggtggctgccctgagagaagggggctttctgctcctgcacacactgctccgggggcaccccctcggggacatcgtggccttcctcacctccactgagccgcagtatggccagggcatcctgagccaggacgcgtgggagagcctcttctccagggtgtcgctgcgcctggtgggcctgaagaagtccttctacggctccacgctcttcctgtgccgccggcccaccccgcaggacagccccatcttcctgccggtggacgataccagcttccgctgggtggagtctctgaagggcatcctggctgacgaagactcttcccggcctgtgtggctgaaggccatcaactgtgccacctcgggcgtggtgggcttggtgaactgtctccgccgagagcccggcgggaaccgcctccggtgtgtgctgctctccaacctcagcagcacctcccacgtcccggaggtggacccgggctccgcagaactgcagaaggtgttgcagggagacctggtgatgaacgtctaccgcgacggggcctggggggctttccgccacttcctgctggaggaggacaagcctgaggagccgacggcacatgcctttgtgagcaccctcacccggggggacctgtcctccatccgctgggtctgctcctcgctgcgccatgcccagcccacctgccctggcgcccagctctgcacggtctactacgcctccctcaacttccgcgacatcatgctggccactggcaagctgtcccctgatgccatcccagggaagtggacctcccaggacagcctgctaggtatggagttctcgggccgagacgccagcggcaagcgtgtgatgggactggtgcctgccaagggcctggccacctctgtcctgctgtcaccggacttcctctgggatgtgccttccaactggacgctggaggaggcggcctcggtgcctgtcgtctacagcacggcctactacgcgctggtggtgcgtgggcgggtgcgccccggggagacgctgctcatccactcgggctcgggcggcgtgggccaggccgccatcgccatcgccctcagtctgggctgccgcgtcttcaccaccgtggggtcggctgagaagcgggcgtacctccaggccaggttcccccagctcgacagcaccagcttcgccaactcccgggacacatccttcgagcagcatgtgctgtggcacacgggcgggaagggcgttgacctggtcttgaactccttggcggaagagaagctgcaggccagcgtgaggtgcttggctacgcacggtcgcttcctggaaattggcaaattcgacctttctcagaaccacccgctcggcatggctatcttcctgaagaacgtgacattccacggggtcctactggatgcgttcttcaacgagagcagtgctgactggcgggaggtgtgggcgcttgtgcaggccggcatccgggatggggtggtacggcccctcaagtgcacggtgttccatggggcccaggtggaggacgccttccgctacatggcccaagggaagcacattggcaaagtcgtcgtgcaggtgcttgcggaggagccggaggcagtgctgaagggggccaaacccaagctgatgtcggccatctccaagaccttctgcccggcccacaagagctacatcatcgctggtggtctgggtggcttcggcctggagttggcgcagtggctgatacagcgtggggtgcagaagctcgtgttgacttctcgctccgggatccggacaggctaccaggccaagcaggtccgccggtggaggcgccagggcgtacaggtgcaggtgtccaccagcaacatcagctcactggagggggcccggggcctcattgccgaggcggcgcagcttgggcccgtgggcggcgtcttcaacctggccgtggtcttgagagatggcttgctggagaaccagaccccagagttcttccaggacgtctgcaagcccaagtacagcggcaccctgaacctggacagggtgacccgagaggcgtgccctgagctggactactttgtggtcttctcctctgtgagctgcgggcgtggcaatgcgggacagagcaactacggctttgccaattccgccatggagcgtatctgtgagaaacgccggcacgaaggcctcccaggcctggccgtgcagtggggcgccatcggcgacgtgggcattttggtggagacgatgagcaccaacgacacgatcgtcagtggcacgctgccccagcgcatggcgtcctgcctggaggtgctggacctcttcctgaaccagccccacatggtcctgagcagctttgtgctggctgagaaggctgcggcctatagggacagggacagccagcgggacctggtggaggccgtggcacacatcctgggcatccgcgacttggctgctgtcaacctggacagctcactggcggacctgggcctggactcgctcatgagcgtggaggtgcgccagacgctggagcgtgagctcaacctggtgctgtccgtgcgcgaggtgcggcaactcacgctccggaaactgcaggagctgtcctcaaaggcggatgaggccagcgagctggcatgccccacgcccaaggaggatggtctggcccagcagcagactcagctgaacctgcgctccctgctggtgaacccggagggccccaccctgatgcggctcaactccgtgcagagctcggagcggcccctgttcctggtgcacccaatcgagggctccaccaccgtgttccacagcctggcctcccggctcagcatccccacctatggcctgcagtgcacccgagctgcgccccttgacagcatccacagcctggctgcctactacatcgactgcatcaggcaggtgcagcccgagggcccctaccgcgtggccggctactcctacggggcctgcgtggcctttgaaatgtgctcccagctgcaggcccagcagagcccagcccccacccacaacagcctcttcctgttcgacggctcgcccacctacgtactggcctacacccagagctaccgggcaaagctgaccccaggctgtgaggctgaggctgagacggaggccatatgcttcttcgtgcagcagttcacggacatggagcacaacagggtgctggaggcgctgctgccgctgaagggcctagaggagcgtgtggcagccgccgtggacctgatcatcaagagccaccagggcctggaccgccaggagctgagctttgcggcccggtccttctactacaagctgcgtgccgctgagcagtacacacccaaggccaagtaccatggcaacgtgatgctactgcgcgccaagacgggtggcgcctacggcgaggacctgggcgcggactacaacctctcccaggtatgcgacgggaaagtatccgtccacgtcatcgagggtgaccaccgcacgctgctggagggcagcggcctggagtccatcatcagcatcatccacagctccctggctgagccacgcgtgagcgtgcgggagggctaggcccgtgcccccgcctgccaccggaggtcactccaccatcccaccggagtggcagtgcaagtgaaggaagaagtagcagaggctgcaggtccagggtggacctgctggaggagaacgctgcagctggtgactggcccccactgcacaggccggggccgacgcagggcactggagcatgggctccccggaaccccaggcagccgtccatggatgcacatccatatccagaaagactcaggaacgcaatcagactaccctgagacagagcaagcatgcctatcacaagcgagggagcagcatggggtacctagcatcacacgcacacacacaagacgtcgcacgacatggacccaaggcgcgacacacaggcgcatgagaacactggacgccccccctacagcgaccggaacccatgacaagcaccaccaattcgcccccctagcgcacaacacgaatagacacgaggagcgaaaccacagaaacagcccaaccccaccagagcggattcgacccctagaacccggcgcacacgaggcacacaaacgaacggaaacacgaaccacagacctactacccacaccgataacaccaagacataccaacgaaagcaagagcaccacccacaccgaaaaacaccctgacgacaatggcgcgaacgaccgacgagagcgcaacacaacaaaccagagagaaaacttaccaccgaccaacggagcagacaaaacacaaacaacaaccaagcaacctacagacccacaagcggtcaagccagccaaaacgacacaagagacagagcgcgcaaacctgagaaaccagaccgcgcgaaacgagagaacacgaaagggacgacagacaggctacgggaagacacaccgaggaagaacacccac

SEQ ID NO: 530821 - DNA, 400 bp, Homo sapiens
ttggggttcctggataccagtcaagcattccacagtccaatgacgtcagtcgcagagcacagtaggtataaaagacaatgtgtgaggtacactggcaattggaattccgactattttccataaggattcatgaaactacactattctatttaaaatgattaacttactttaacaatccttctgaagatgtactaaggatgacctgcattctcttctgtttctctttatctttcagattgaacagtacgtgacatccgatctacgcttaccttctttttcctctggcagctttagtaggttctgaaggatagttcatcaagcttagtatctgatgctggacactaaagtcagtacagactgataactcttattcagtgtctgcttcttaaatagcatcctg

SEQ ID NO: 530822 - DNA, 274 bp, Homo sapiens
ggtataactaaccacagcttacaaggcactggttgtggcacaatgatttactcaaagcgaagtgaccacgcacgagcagggcaggtaagcggcgaattttgaccccgcttgcgcttgggatacagggcgaaacgagttcaccatggcaagttgtcattatcatctcgtttcgcaatatttatcacgccgattatgtaatatctaacacccataatcagatatagggtaaccagtatcttgaatgtaaatagggtcatatgtaaatcactccttt

SEQ ID NO: 530823 - DNA, 244 bp, Homo sapiens
tttgattacatttttatcacacttgatttactgaagaaaaatggtttggattttgattgtactaaccacacatgtaatgaattaacaataattataagtggcacaagtgcatattatgatgtgatattttctgtatggtgttttaaatggaagttttggattacacacagttatttttgttacattttaaaacccgttgcttttaacctacctaataaaagttgctcctccacaaaaaaaaaaa

SEQ ID NO: 530824 - DNA, 497 bp, Homo sapiens
tgacggtaccaacagatcaggaaggtgaagagattgctaatgagatgatgaggcagcaaggcgtctatacccaggatggcccccttggagcagcgaaagccatccaggcctacgggctgtgttggatgagacctatcctgaccctgtgcgagtcgtctccatgggggtcccggtgtccgagtggctggatgacccctctgggcctgctggctccctgacttctgtcgagttctgtgggggaacgcacctgcggaactcgagtcatgcaggagctttggtgatcgtgacggaagaagccattgccaagggtatccggaggattgtggctgtcacaggtgccgaggcccagaaaggccctcaggaaagcagagagcttgaagaaatgtctctctgtcatggaagccaaagtgacggctcagattgctccaaacaaggatgtgcaaagggagatcgctgaccttggagaggccttggcattgtagtcaatccccagtggc

SEQ ID NO: 530825 - DNA, 780 bp, Homo sapiens
tttttttggaggggggcagctatttaatttacaagtatacttttaacacaatgaaataaacacggatatactgaagcctagttaatagtagtggtaacaatatgcatcatttggatgatccccattatttaaaacaacaaactacccctgaaaaatgaaggccgataaaatcctgggccataatatcaagaacatacaatatataaatggaacaatatgatggcttcacaattggaaaagggaagtgaactcattgggacagactcagagttacacataatctgaagggaggggagctctggacccaaagtgatatcttccaggttaacagaagaaaaaagaacgcatagtttatctccagggagaacgggcagttggcttcttcaggtagaatatattcccagggtcctcaggcttcggcagcagaatcacatcaccgagcatgaagactcgcctggtagaagctgccccgtccatttctcctggcctccaaaattatccttcgaaaaacatccacgagccagtcggatttctcttatagcagaagatccccaaaaaagcggtcatcccaagatctcgggcaaagcttccgcttcttcataacggatcaccctttccatatgcgggtctttcttatcacaaccaacataataggtatggtccttcccccccacatatccaacaatttgccctggctcacttaatccctccacacttcgcttggtgctcccgaataccaagatttacgctatatcacggcgctctgctcgggaccaacca

SEQ ID NO: 530826 - DNA, 242 bp, Homo sapiens
ggctgactagaggactcgcaaaacccgtctctactaaaaatacaaaaaattagctggatgtggtggcgggcacctgtaatctcagctacatgggaggctgaggcaggagaatgtctgaacccgggaggcagagcttgcagtgagccgagatcacgcactgcactccagcctgggcgacagagcaagactgtgtctcaaaaaaaataataaaattagaaaatgttaaaataagaaatctaccg

SEQ ID NO: 530827 - DNA, 152 bp, Homo sapiens
tggaaagaatcttaagcgggtaacagtatacagacgcagcctacacacgatactgtacctttcacttcatcttgcccttcattattgcagacctagctagcactccagctcctattcttgcacgacacgggatcaaacaaccccctaggaat

SEQ ID NO: 530828 - DNA, 284 bp, Homo sapiens
atagtcacgtgtgggttagtatcaaaactcacctaaccagaatacagagggaggtaatgactgcctacaagttcggcatgatagaggcctacagaaatgtctccaacctcatctcctatcactctcccccactcactcactccagcaatccagaattatctgctgtttgtttctttccttccttccttccttccttccttcctatccttgcttccttccttaccttacctttcttcctttctatatctattctttcttattagagacagagtactccctctata

SEQ ID NO: 530829 - DNA, 884 bp, Homo sapiens
  misc_feature (1)..(1): n is a, c, g, or t
nggcgtgtcttggctgcgcccccctctttctcacctgtcgcgtgtccgggtgtacctcgcgccggagcttgttcgctcgattttcgcgcttgctgttatgcgagagtttctgccctaaccgaccctggggtggttgccagccacccccgcccccccgggggtccacccataccgggcccgggcattttatccctctccgcccagggacttattatgtcccgcgccctcggtggggagcaccttctcgaagaaggcgggccacccctctttaccggggggtggctccccactcggcggaatccgggggcccatttcagctttctcttccccaggcgcccatcattcatgatcttacagccccgttcgttttccaaaggacccactccgccgcggccttcacgttccgcccccgagtaattcctcctcgctcgttcttcttcctcctgggggatctccccgcagtgtttttccccgccctcctctccgccgtatgtagcccccgcgagtactttattataaccggtggccctttgtcacccaacccccgggcaccacgagttccccactgttgtcccccggggtgagtcgggcaccacgcaagtctccccaagtcgggggccacctcggtgtccccccccgtcttgggcaccctcaaggcttgcacagaacgcgtttcgtgaacgccaatccgtgtgtttacagagtttgcttgtggaacgctcagcgtcgcccgcttccccctgttgcctgatcggcttgcgccctctgttcagaagccggggtgtgctgggggcacagcttttacatgtgggtcctgcctccgtacctccaatccctgaaccccgggcccgggttcccccgcaaccgaccccctcccacaagca

SEQ ID NO: 530830 - DNA, 156 bp, Homo sapiens
gcctgcattgcccctagttgatcccccagacacaataggcgagttgaacagtgttgagacaccacggtctcctcccagctggcaagagccacccccgaaaccacctccatagctggcagaggagctctgcaggcgtggggccgctggctcgagggg

SEQ ID NO: 530831 - DNA, 248 bp, Homo sapiens
gtacaatccagccacggttctgatctccaggaaagcattgctgtggtacaaaaggacaagggttaaaagggaacagtgggagctctctttcccaacgaagtcacgcagtgtgacgcacaggctttcagcacagcccaggaagcaagtgggcacactccaagtggggcagctctccgtacatgcgccccacccccgtgagccagttcagccctactgagggctgagcgggggcatcccctcctttgttg

SEQ ID NO: 530832 - DNA, 111 bp, Homo sapiens
gcatttgcttggagcgatttggcctgcctcactgtcggaggctgaggggaaggcgaatcgcttgaaccggaggcagaggtttcagtgagtcaaaatcgcaccgattcactc

SEQ ID NO: 530833 - DNA, 565 bp, Homo sapiens
gaggagacacaggcgctggctgccccgtccgctctccgcctccgccgcgccctcctcgcccgggatgggcccccccgccgccgccggatccctcgcctcccggccgccgccgttgcgctcgccggctcgcactgaagcccgggccctcgcgcgccgcggttcgccccgcagcctcgccccctgcccaccccgggcggcgtagggcggtcacgagtgcttgccgcccttaccctcccgcctcgggctgcgtgctgctgctgctcctgtgcccggcgcacgtcggctgtgactgtggtgggctgtgggcagcccttggttatggaccctaccagcatcttgcaggaaggtgcactggctgagcatggaaccgggctggcatgagccagagttgttgccatggcttgagcctgcgaaagtgcgtggcagaagctacgctccggggcgcccgagctcggggtgcgatgagtgccagttccaagttccgcttcctgccgcttggaaatttgtccaggcatcagcaaaggcttttggactgcatcctgcaacacggacaatcgggagaccg

SEQ ID NO: 530834 - DNA, 435 bp, Homo sapiens
  misc_feature (138)..(139): n is a, c, g, or t
  misc_feature (145)..(145): n is a, c, g, or t
  misc_feature (148)..(148): n is a, c, g, or t
  misc_feature (151)..(151): n is a, c, g, or t
gcatgctcacgcccgagatccagtacctgatggacctcggcgccaacctgtgggtcaccaagctctggaagttcattcgcgatttcctgcggtggtgacgtcccaccgcccagcggcttgcctgcctttttggggggnncctttnccnggnctcccctgcagaggggctgagcaggacgccgctggtgctggccgcccccagccccctcctggtgccacctcagaccccggggtgagggggggctccctggggggaggcagccagccaagactgggcccatgaacacagagagggcctaaccgagatcagtatttaactaattataccagtttttattaaacccctttccctccccgataaagaatgttctatttctgcctccccttaaaggggagacctcagaagtaaaggaatttgatgttgtgtttttgtta

SEQ ID NO: 530835 - DNA, 816 bp, Homo sapiens
  misc_feature (413)..(413): n is a, c, g, or t
  misc_feature (417)..(417): n is a, c, g, or t
  misc_feature (460)..(461): n is a, c, g, or t
  misc_feature (472)..(472): n is a, c, g, or t
  misc_feature (475)..(475): n is a, c, g, or t
  misc_feature (483)..(483): n is a, c, g, or t
  misc_feature (485)..(486): n is a, c, g, or t
agtctgggatcaatcatttttactagaaggcttcgttccttttttttatttttatcttttgagacagcgtttcactcttgctgcccaggctggagtgcaatggcacgatctcggctcaccgcaacctccgcctcccaggttcaaggtgattctcctccatcctttatatcacgtcttgcacaagagtgtatatagtcaaatactgtgcttataaatcacttgaattagttctttttctcttcacggctttttttcccccccttatctttcaataactttggtatcagggtagttattatagtaatatgaaatacaattggggccgggcgcggtggctcaggcctgcagtctcagcactttgggaggccgaggtgggcggatcatccatctgaggtcgggaatttgagaccagnctgnccaacacagcgaaaccccatctctactaaatatacaacaattnnctgggtgtggnggnagacaccngnnatcctggctacttgggaggctgagacaggagatcacttgaacctgggaggcggagggtgcagggagccaagattgcagaattgcacttcagcctgggcaacgagagtgaaactctgtcttatggttcagggttaaaaaaaaaaaaaaaaaaatctaagtcccaagcccgtatgggggaattgaccagtggccaatgaatatcttctgaaatactaaaccgaattggttgggactgtgaaataatttccatgtctttatttcaacaaccgcacactgtattggctttttaggattgacaattccatgtgtgtgcctgtcttcctgccttaa

SEQ ID NO: 530836 - DNA, 761 bp, Homo sapiens
  misc_feature (307)..(307): n is a, c, g, or t
  misc_feature (321)..(321): n is a, c, g, or t
  misc_feature (350)..(350): n is a, c, g, or t
  misc_feature (368)..(368): n is a, c, g, or t
  misc_feature (551)..(551): n is a, c, g, or t
  misc_feature (608)..(610): n is a, c, g, or t
  misc_feature (644)..(644): n is a, c, g, or t
  misc_feature (646)..(647): n is a, c, g, or t
acaaaatggcgcctacagcctactggtgactcggctgcagaaagctctgggtgtgcggcagtaccatgtggcctcagtcctgtgccaacgggccaaggtggcgatgagccactttgatgcccaacgagtacatccattatgacctgctagagaagaacattaacattgttcgcaaacgactgaaccggccgctgactactctcggagaagatttgtgtatggacacctggatgaccccgccagccaggaaattgagctgaggcaagtctgtacctgcggtctgcggccgggaccgtgtggccatgcnaggatgcgactggnccagagtggccatgctccagttcatcagncagcgggcttgtccaagngtggctgtgccatccaccatccactgtgaccatctgattgaatgcccaggtatgggggcgatgaaagacctgcgccggagccaaggacatcaaccaggaaagtttataatttcctggcaactgcaaggtgccaaatatggcgtgggcttctggaagcctggatctggaaatcattcaccaganttattctggaaaactatgcgtaccctggtgtacttctgattggcactgactcccaannncccaatggtggcggccttgggggcatctgcattngnngttgggggtgccgagtgctgtggatgtcagtggctgggatcccctgcgaggttgaagtgccccacggtgattggcgtgaaggctgacgggctctctctccggtaggtcctcacc

SEQ ID NO: 530837 - DNA, 561 bp, Homo sapiens
  misc_feature (38)..(38): n is a, c, g, or t
  misc_feature (83)..(83): n is a, c, g, or t
  misc_feature (101)..(101): n is a, c, g, or t
  misc_feature (106)..(106): n is a, c, g, or t
  misc_feature (141)..(141): n is a, c, g, or t
  misc_feature (156)..(156): n is a, c, g, or t
  misc_feature (175)..(175): n is a, c, g, or t
  misc_feature (186)..(186): n is a, c, g, or t
  misc_feature (206)..(206): n is a, c, g, or t
  misc_feature (221)..(222): n is a, c, g, or t
  misc_feature (232)..(232): n is a, c, g, or t
  misc_feature (261)..(261): n is a, c, g, or t
  misc_feature (288)..(288): n is a, c, g, or t
  misc_feature (290)..(290): n is a, c, g, or t
  misc_feature (292)..(292): n is a, c, g, or t
  misc_feature (342)..(342): n is a, c, g, or t
  misc_feature (351)..(351): n is a, c, g, or t
  misc_feature (369)..(369): n is a, c, g, or t
  misc_feature (398)..(398): n is a, c, g, or t
  misc_feature (497)..(497): n is a, c, g, or t
  misc_feature (520)..(522): n is a, c, g, or t
  misc_feature (526)..(526): n is a, c, g, or t
tttattagtgtgtgtggttgacccttggcgtataccantgtcagtctgagtggtctctcactcctttgtttataagtgaatgnttgtgcatgttttgtctntcatngtatgtcctcacataaaagggggggagcgaaaaancattacattaagatnatattggaccacaccactnacttgctctanacagtacttgtaccccttancctgtcttcaaaagnngcatatagtnacagtagtgtataaattaaatattgtggnaaacagtcttgtattttctgtatgtgngnanatatatataattatgtacttctggcaattctatctgtatttaaagatgtnacaatcttnacaccaattttaagaatngctgtgagaccgaattaagataatccctnccaagtgaaaattgatgtgtgttaagagggtacagaattatcaactgatttggtcagttgcttccaatgctggttgatttccctcattgtgtaacattnacaggtatgtgacaaatgggaannnaaanccaaataataaagtgacatattggtgttcagcaat

SEQ ID NO: 530838 - DNA, 196 bp, Homo sapiens
  misc_feature (184)..(184): n is a, c, g, or t
  misc_feature (192)..(192): n is a, c, g, or t
tatcgagctggtaccgcgggactgccctcgcaggctgctggcatcaggtatacgggactcatccctccctttcctgccagctcccaccattgccctgatgggggctccagctcctgcccccagcatggggagtctggcccaaaggaccatctgtaaacacttgttccgaatccaatggctgccnctccccangaag

SEQ ID NO: 530839 - DNA, 200 bp, Homo sapiens
  misc_feature (14)..(14): n is a, c, g, or t
  misc_feature (21)..(21): n is a, c, g, or t
  misc_feature (153)..(154): n is a, c, g, or t
  misc_feature (179)..(179): n is a, c, g, or t
  misc_feature (195)..(195): n is a, c, g, or t
gtgacagaagaagnctccgtntccaaaaaaaagacaaaaaaaaaaaaaaaaaaaaaaagacccaaatagaggctgggcacggtggctcactcctgtaaccccagcactttgagaagctgagatgggaggatcgcttaaggccaggagttcgannccagcctggtccatatagtgagacngcccatctctgttganagaaa

SEQ ID NO: 530840 - DNA, 417 bp, Homo sapiens
gcgtcgacccacagaatgtcccaaatgactctcgggaagccatgcccatctctcttcagtgctttttggacttgggatgaatcgtgtgagttttcagtctccctcagttgccccgtgtggcggcacatctgcattgctgcaggggagcagttttgcttcatgcaggcctgggctgggcctacctccctcccgaaccttgagcttgctcatggaagctctttctcctccaggtccccccagcggcttcccatgcacttgcccctggggagaattgcatgaaacacacacatcgagtgccgggcgcagggtcagaaccaggatcggtcccgctccggggtctgagatggagagctggttcttctttcagaactgcttccctttactggggtgtggtggctcacgcctgtaacccagcac

SEQ ID NO: 530841 - DNA, 165 bp, Homo sapiens
aattcatctttaggattgttggaaaacatctttcaaaaaggcatcttcttcggccaaatgtagtgatttgctaccggcagcaacagcaccacttgggtttctaccacagtatctgaccttgaaatccttatatttatcccgttcttttaatgttgtgtgtaagcg

SEQ ID NO: 530842 - DNA, 934 bp, Homo sapiens
  misc_feature (26)..(26): n is a, c, g, or t
  misc_feature (155)..(155): n is a, c, g, or t
  misc_feature (169)..(169): n is a, c, g, or t
  misc_feature (175)..(175): n is a, c, g, or t
  misc_feature (270)..(270): n is a, c, g, or t
  misc_feature (329)..(329): n is a, c, g, or t
  misc_feature (332)..(332): n is a, c, g, or t
  misc_feature (524)..(524): n is a, c, g, or t
  misc_feature (609)..(609): n is a, c, g, or t
  misc_feature (615)..(615): n is a, c, g, or t
  misc_feature (706)..(706): n is a, c, g, or t
  misc_feature (728)..(728): n is a, c, g, or t
  misc_feature (870)..(870): n is a, c, g, or t
  misc_feature (874)..(874): n is a, c, g, or t
gatgaagtagaattgcacgcatcaanaatgctgtggcaaggtcaccatggatggcgagtcaacggggcctcaacctctccagagccattgggaccacttctataagagaaacaagaacctgccacctgaggaacagatgatttcagcccttcctnacatcaaggtgctnactctnactgacgaccatgaattcatggtcattgcctgtgatggcatctggaatgtgatgagcagccaggaagttgtagatttcattcaatcaaagatcanccagcgtgatgaaaatggggagcttcggttattgtcatccattgtggaagagctgctgnatnagtgcctggcaccagacacttctggggatggtacagggtgtgacaacatgacctgcatcatcatttgcttcaagccccgaaacacagcagagctccagccagagagtggcaagcgaaaactagaggaggtgctctctactgagggggctgaagaaaatggcaacagcgacaagaagaagaaggccaagcganaatagcagtcatccagacccctgcccacctagactgttttctgagccctccggacctgagactgagttttgtctttttcctttanccttancagtgggtataaggtgtgcagggggagctgggtggcttcactccgcccattccaaagagggctctccctccacactgcagccgggagcctntgctgtccttcccagccgcctntgctcctcgggctcatccccggttctgtgcctgtgctctgttgtgttggagggaaggactggcggttctggtttttactctgtgaactttatttaaggacattcttttttattggcggctccatggccctcggccgcttgcncccnctctctgttgtacactttcaatcaacactttttcagactaaaggccaaaacctaatcgta

SEQ ID NO: 530843 - DNA, 140 bp, Homo sapiens
  misc_feature (44)..(44): n is a, c, g, or t
cgtccttctgcagtggcgaagacatttgttgccctgtttactancacaaccaaagtgaaggagttggaattgccctcaaaacatgttcgagttctgggattgggtagggaggacgctactcgctgtcgggctagtcgggg

SEQ ID NO: 530844 - DNA, 956 bp, Homo sapiens
  misc_feature (26)..(26): n is a, c, g, or t
  misc_feature (155)..(155): n is a, c, g, or t
  misc_feature (169)..(169): n is a, c, g, or t
  misc_feature (175)..(175): n is a, c, g, or t
  misc_feature (270)..(270): n is a, c, g, or t
  misc_feature (329)..(329): n is a, c, g, or t
  misc_feature (332)..(332): n is a, c, g, or t
  misc_feature (524)..(524): n is a, c, g, or t
  misc_feature (609)..(609): n is a, c, g, or t
  misc_feature (615)..(615): n is a, c, g, or t
  misc_feature (679)..(679): n is a, c, g, or t
  misc_feature (685)..(685): n is a, c, g, or t
  misc_feature (728)..(728): n is a, c, g, or t
  misc_feature (750)..(750): n is a, c, g, or t
  misc_feature (892)..(892): n is a, c, g, or t
  misc_feature (896)..(896): n is a, c, g, or t
gatgaagtagaattgcacgcatcaanaatgctgtggcaaggtcaccatggatggcgagtcaacggggcctcaacctctccagagccattgggaccacttctataagagaaacaagaacctgccacctgaggaacagatgatttcagcccttcctnacatcaaggtgctnactctnactgacgaccatgaattcatggtcattgcctgtgatggcatctggaatgtgatgagcagccaggaagttgtagatttcattcaatcaaagatcanccagcgtgatgaaaatggggagcttcggttattgtcatccattgtggaagagctgctgnatnagtgcctggcaccagacacttctggggatggtacagggtgtgacaacatgacctgcatcatcatttgcttcaagccccgaaacacagcagagctccagccagagagtggcaagcgaaaactagaggaggtgctctctactgagggggctgaagaaaatggcaacagcgacaagaagaagaaggccaagcganaatagcagtcatccagacccctgcccacctagactgttttctgagccctccggacctgagactgagttttgtctttttcctttanccttancagtgggtataaggtgtgcagggggagctgggtggcttcactccgcccattccaaagagggggntccctncttccctttccccctctccctccacactgcagccgggagcctntgctgtccttcccagccgcctntgctcctcgggctcatccccggttctgtgcctgtgctctgttgtgttggagggaaggactggcggttctggtttttactctgtgaactttatttaaggacattcttttttattggcggctccatggccctcggccgcttgcncccnctctctgttgtacactttcaatcaacactttttcagactaaaggccaaaacctaatcgta

SEQ ID NO: 530845 - DNA, 175 bp, Homo sapiens
gggagcccaggaaaacccccaagggcccatggttctttcccccttgttgggggttcaggcaactcccataaatttttgagtttcaatttgtttttttttcctgggggggtgaaatgtcccttcccccctgtttcccagtgtggtttttgggcccaaaagttgtgttttattccca

SEQ ID NO: 530846 - DNA, 222 bp, Homo sapiens
gtcggtaatcttctgagcaggtgtggagggtagtgttgtgtgtagcgagccagtgctgtgtgggtgggtgtagatgcctccagaggctgaggttatggtgtcgtcaggtaagagtgtggtttcagtgtcgcctgggctgctgtggaaggttgtagattgttgaccaagggatgaggctgtggtactgccagggaatgctgttgtgtgcgttgagcctggtcg

SEQ ID NO: 530847 - DNA, 163 bp, Homo sapiens
taaaagagcacaatgtaggtgtattggagtatttcaagaaaagaataaaaacattaatgcagtattaggttaactggatatcaacgtaagccctggtgaacagtgaaagtattataacctttttttaacgttctgaaaattaaaaataaaatttatttcgtgc

SEQ ID NO: 530848 - DNA, 314 bp, Homo sapiens
gcacgagccaaagagcagctccatattaaaaatgatttttgagggatagctcacacctgtaatcacagcattgtggaagccaaaacaggaggattgcttgaggccaggagtttgaaaccggcctgggcaacatagtgagactccatctttgcaaaaaataaaaaattagccaggtatggtgtcgtgtacctgtggtcccggctgctcggaaggctgaggtgagagaatcgcttgagcccaagaggtcaaggctgcagtgacctgtgatcgtgccactccattccagcctgggtgacagaatgagacccgtctca

SEQ ID NO: 530849 - DNA, 238 bp, Homo sapiens
aatataagttttttttaaagtgcaagaaaaatgaaaaaaccctcgatggaactacggtgcctcttactgccggaagcagatatcaaaggatgataaaataactagacaatgatgggtaggagtgataggaagttcactgtaagctcctataaccccccaacaccatcaccacatgcctaatacaacctgcagacacacttactcgcaacagacttgcaatctgggctctcttttcctt

SEQ ID NO: 530850 - DNA, 379 bp, Homo sapiens
tctacaaatagagaattcacaaaagcaagaagcagaatggtggttaccagaggctggaggatgggaatggggagatggggagatgatggtcaaaaggtacaaaggcacagttagacaagaggaataagtttttcttaatccactgcagtgtggtaaatatagttaataacattatattatacatttcaaaatcgctgaaagtacatttcgaatgctctcaccacaaaaaaataagtatttgatgtgatgggtatgttaattcacttgattaattattccacattttactcatgaatcataatttcactttgtaccccataaatatacactataatttgtcaatttacaataagaaaagtaaataaaatagaaacaagta

SEQ ID NO: 530851 - DNA, 410 bp, Homo sapiens
aaaaatgcaaaaaattggccgagcccggtggtgcatgcctgtagtcccaactgcttgggagggttaggcccgagattccttgaaccccaaaggttgagggtatgttgagctgagatcccccccctgtactccagcctggatgacagagtggaggctctgtttccaaaaaaccgaaaagaaaatataggttggttcttccttttttttaatttgccaatccccgggataaagtttgctaagtaaattaggaatggcctatagatataactggcccaaaattgttccacctaaaaccatctggaattgctttttgttttattggatactctttgtctttttaagacccctaatagccctttgtaacttgatggctttaaaaaacttaattaatttgccctttccaatttcca

SEQ ID NO: 530852 - DNA, 826 bp, Homo sapiens
gagcgggagggttcgagacaacctaccctccttccccattttcttgtggtccaactaccctcggcgatcccaggcttggcggggcaccgctctgtgcctactcccgtgtcctattagtgcctgccgtccgactgaccaatgccgctcgatgagcacgaggtttgaggccatacaatagagcacctatctaaatatgcaagttgagtgtaccttatatgcgtttggctcgtatcaaagagaggcttgagactcaaaactgtagattcctgcttccaagacctcaaggagagcaggctggctggaggacaccttcaccatagatgaacgtctctgaagtcctcaactggcttacaagctgtggttcatagtgaggtggacatctgagctcatcaacactgcctataccaatgtgttacttctgcgacagctgtctgcacaagctgagaagtggtatcttaaaggctacagacagacatctctgacacttgaaacaaccgcgcaactcattagaacaaagttgcccgactctcgacaacagcacgagattacatcttcaaaccacaccagccccatctttcaccatgctcaccaaagccaaacacttgcctaccaccttcaatgcacgcgtgcaacccagcagaccctccctcacaccaagcgacaactcggcaacgcccgcccccgcccgacacctggccgaacatccgcccgccacacggtcgacgaaccacccacactaccaggtccccaaccgccactggactgcacacgcccccaccacgaccaccgccctgcccacacccacaccctcgaccacgcaccccac

SEQ ID NO: 530853 - DNA, 239 bp, Homo sapiens
  misc_feature (228)..(228): n is a, c, g, or t
  misc_feature (239)..(239): n is a, c, g, or t
gcgacaaacctaccgagcctggtgatagctggtttgtccaagatagaatcttagtttcaacttttaaaatttgccccacagaaccctctaaaatcccttgtaaatttaactgttagtccaagagacagctctttgacactaggaaaaacctttgtagagagagttaaaaatttaaccacccatagtaggcctgcagccaccaatttaagcgcgttccaaggttcaacncccccaccttn

SEQ ID NO: 530854 - DNA, 201 bp, Homo sapiens
ttgctggagcggatcagcctgcccgactgacactctgccacttatcctctaccgtgcatttcttctgaaaatggatcgtgtccacataaaaaaaatccgcgttgcactggaccgacgatcatccaatgaatactggctgccgtcagcagcctgctgaacagcaccgcccactacgaggatggtggcggcagtcaactaccc

SEQ ID NO: 530855 - DNA, 256 bp, Homo sapiens
actaatctagagattactatagagtggatttgcagatataattgaagtcccagttgactgtaaaactatccaagatgagcataacatcaatacggggagccctattaaaagcagataatttttcatctcatcattccagatgcttatgggaggccaacggcaggaggattgcattgaggccagcaagttctgcagacctagccatggcctaaaatcagtgcagaccctagtctcatattcaaaacacaacaacaca

SEQ ID NO: 530856 - DNA, 143 bp, Homo sapiens
cgggctggtgagcactctcgcgagtattgaaggagcggcggatgccagagggagtgagacgtaccggaatgtccttcatctcaaagcatcaatgtctgaaattcggcctgattttcatctatccggcaatgcccttttccagt

SEQ ID NO: 530857 - DNA, 482 bp, Homo sapiens
atggatgtcactcctctttcccttggtattgtggaaactgcttgggaggtcaatgacttttcctcaatcaaggcgtaatacccaccattcctaccaagcagacacagaccttcactacctattctgacaaccagcctggtgtgcttattcaggtttatgaaggcgagcgtgccatgacaaaggataacaacctgcttggcaagtttgaactcacaggcatacctcctgcaccccgaggtgttcctcagattgaagtcacttttgacattgatgccaatggtatactcaatgtctctgctgtggacaagagtacgggaaaagagaacaagattactatcactaatgacaagggccgtttgagcaaggaagacattgaacgtatggtccaggaagctgagaagtacaaagctgaagatgagaagcagagggacaggttcaccaagatcatttcgtcctttcctcaacatgaacactttggggtt

SEQ ID NO: 530858 - DNA, 1493 bp, Homo sapiens
  misc_feature (82)..(82): n is a, c, g, or t
  misc_feature (88)..(88): n is a, c, g, or t
  misc_feature (95)..(95): n is a, c, g, or t
  misc_feature (112)..(112): n is a, c, g, or t
  misc_feature (430)..(430): n is a, c, g, or t
  misc_feature (500)..(500): n is a, c, g, or t
  misc_feature (525)..(525): n is a, c, g, or t
agaaagattatgacaaccgaatggtcaaccattttattgctgagtttaagcgcacgcataagaaggacatcagtgaaaaacnagaganctgtaanacgcctccgtactgctngtgaacgtgctaagcgtaccctctcttccagcacccaggccagtattgagatcgattctctctatgaaggaatcgacttctatacctccattacccgtgcccgatttgaagaactgaagtgctgacctgttccgtggcaccctggacccagtagagaaagcccttcgagatgccaaactagacaagtcacagattcatgatattgtcctggttggtggttctactcgtatccccaagattcagaagcttctccaagacttcttcaatggaaaagaactgaataagagcatcaacccctgatgaagctgttgcttatgngtgcagctgtccaggcagccatcttgtctggagacaagtctgagaatgttcaagatttgctgctcttggnatgtcattcctcttgtcccttggtnattgaaactgctggtggagtcatgactgtcctcatcaagcgtaataccaccattcctaccaagcagacacagaccttcactacctattctgacaaccagcctggtgtgcttattcaggtttatgaaggcgagcgtgccatgacaaaggataacaacctgcttggcaagtttgaactcacaggcatacctcctgcaccccgaggtgttcctcagattgaagtcacttttgacattgatgccaatggtatactcaatgtctctgctgtggacaagagtacgggaaaagagaacaagattactatcactaatgacaagggccgtttgagcaaggaagacattgaacgtatggtccaggaagctgagaagtacaaagctgaagatgagaagcagagggacaaggtgtcatccaagaattcacttgagtcctatgccttcaacatgaaagcaactgttgaagatgagaaacttcaaggcaagattaacgatgaggacaaacagaagattctggacaagtgtaatgaaattatcaactggcttgataagaatcagactgctgagaaggaagaatttgaacatcaacagaaagagctggagaaagtttgcaaccccatcatcaccaagctgtaccagagtgcaggaggcatgccaggaggaatgcctgggggatttcctggtggtggagctcctccctctggtggtgcttcctcagggcccacccattgaagaggttgattaagccaaccaagtgtagatgtagcattgttccacacatttaaaacatttgaaggacctaaattcgtagcaaattctgtggcagttttaaaaagttaagctgctatagtaagttactgggcattctcaatacttgaatatggaacatatgcacaggggaaggaaataacattgcactttataaacactgtattgtaagtggaaaatgcaatgtcttaaataaaactatttaaaat

SEQ ID NO: 530859 - DNA, 1493 bp, Homo sapiens
  misc_feature (82)..(82): n is a, c, g, or t
  misc_feature (88)..(88): n is a, c, g, or t
  misc_feature (95)..(95): n is a, c, g, or t
  misc_feature (112)..(112): n is a, c, g, or t
  misc_feature (430)..(430): n is a, c, g, or t
  misc_feature (500)..(500): n is a, c, g, or t
  misc_feature (525)..(525): n is a, c, g, or t
tggtcatttcggtcacgagggactggacgttgtcagctgataattactgtgcccttggctctgtcacattcaccagagaacnagaganctgtaanacgcctccgtactgctngtgaacgtgctaagcgtaccctctcttccagcacccaggccagtattgagatcgattctctctatgaaggaatcgacttctatacctccattacccgtgcccgatttgaagaactgaagtgctgacctgttccgtggcaccctggacccagtagagaaagcccttcgagatgccaaactagacaagtcacagattcatgatattgtcctggttggtggttctactcgtatccccaagattcagaagcttctccaagacttcttcaatggaaaagaactgaataagagcatcaacccctgatgaagctgttgcttatgngtgcagctgtccaggcagccatcttgtctggagacaagtctgagaatgttcaagatttgctgctcttggnatgtcattcctcttgtcccttggtnattgaaactgctggtggagtcatgactgtcctcatcaagcgtaataccaccattcctaccaagcagacacagaccttcactacctattctgacaaccagcctggtgtgcttattcaggtttatgaaggcgagcgtgccatgacaaaggataacaacctgcttggcaagtttgaactcacaggcatacctcctgcaccccgaggtgttcctcagattgaagtcacttttgacattgatgccaatggtatactcaatgtctctgctgtggacaagagtacgggaaaagagaacaagattactatcactaatgacaagggccgtttgagcaaggaagacattgaacgtatggtccaggaagctgagaagtacaaagctgaagatgagaagcagagggacaaggtgtcatccaagaattcacttgagtcctatgccttcaacatgaaagcaactgttgaagatgagaaacttcaaggcaagattaacgatgaggacaaacagaagattctggacaagtgtaatgaaattatcaactggcttgataagaatcagactgctgagaaggaagaatttgaacatcaacagaaagagctggagaaagtttgcaaccccatcatcaccaagctgtaccagagtgcaggaggcatgccaggaggaatgcctgggggatttcctggtggtggagctcctccctctggtggtgcttcctcagggcccacccattgaagaggttgattaagccaaccaagtgtagatgtagcattgttccacacatttaaaacatttgaaggacctaaattcgtagcaaattctgtggcagttttaaaaagttaagctgctatagtaagttactgggcattctcaatacttgaatatggaacatatgcacaggggaaggaaataacattgcactttataaacactgtattgtaagtggaaaatgcaatgtcttaaataaaactatttaaaat

SEQ ID NO: 530860 - DNA, 1068 bp, Homo sapiens
cgtctcctatttaggatgggatactaatgccacatataaccgcaatcttgatttttaaaataaaactggaattaaattgttgtggttggggacagagggagagaaaagactagataatcaaattgctttttcccaaggacttctctcttccattcctaccaagcagacacagaccttcactacctattctgacaaccagcctggtgtgcttattcaggtttatgaaggcgagcgtgccatgacaaaggataacaacctgcttggcaagtttgaactcacaggcatacctcctgcaccccgaggtgttcctcagattgaagtcacttttgacattgatgccaatggtatactcaatgtctctgctgtggacaagagtacgggaaaagagaacaagattactatcactaatgacaagggccgtttgagcaaggaagacattgaacgtatggtccaggaagctgagaagtacaaagctgaagatgagaagcagagggacaaggtgtcatccaagaattcacttgagtcctatgccttcaacatgaaagcaactgttgaagatgagaaacttcaaggcaagattaacgatgaggacaaacagaagattctggacaagtgtaatgaaattatcaactggcttgataagaatcagactgctgagaaggaagaatttgaacatcaacagaaagagctggagaaagtttgcaaccccatcatcaccaagctgtaccagagtgcaggaggcatgccaggaggaatgcctgggggatttcctggtggtggagctcctccctctggtggtgcttcctcagggcccacccattgaagaggttgattaagccaaccaagtgtagatgtagcattgttccacacatttaaaacatttgaaggacctaaattcgtagcaaattctgtggcagttttaaaaagttaagctgctatagtaagttactgggcattctcaatacttgaatatggaacatatgcacaggggaaggaaataacattgcactttataaacactgtattgtaagtggaaaatgcaatgtcttaaataaaactatttaaaat

SEQ ID NO: 530861 - DNA, 2040 bp, Homo sapiens
  misc_feature (82)..(82): n is a, c, g, or t
  misc_feature (88)..(88): n is a, c, g, or t
  misc_feature (95)..(95): n is a, c, g, or t
  misc_feature (112)..(112): n is a, c, g, or t
  misc_feature (430)..(430): n is a, c, g, or t
  misc_feature (500)..(500): n is a, c, g, or t
  misc_feature (525)..(525): n is a, c, g, or t
agaaagattatgacaaccgaatggtcaaccattttattgctgagtttaagcgcacgcataagaaggacatcagtgaaaaacnagaganctgtaanacgcctccgtactgctngtgaacgtgctaagcgtaccctctcttccagcacccaggccagtattgagatcgattctctctatgaaggaatcgacttctatacctccattacccgtgcccgatttgaagaactgaagtgctgacctgttccgtggcaccctggacccagtagagaaagcccttcgagatgccaaactagacaagtcacagattcatgatattgtcctggttggtggttctactcgtatccccaagattcagaagcttctccaagacttcttcaatggaaaagaactgaataagagcatcaacccctgatgaagctgttgcttatgngtgcagctgtccaggcagccatcttgtctggagacaagtctgagaatgttcaagatttgctgctcttggnatgtcattcctcttgtcccttggtnattgaaactgctggtggagtcatgactgtcctcatcaagcgtaataccaccattcctaccaagcagacacagaccttcactacctattctgacaaccagcctggtgtgcttattcaggtttatgaaggcgagcgtgccatgacaaaggataacaacctgcttggcaagtttgaactcacaggcatacctcctgcaccccgaggtgttcctcagattgaagtcacttttgacattgatgccaatggtatactcaatgtctctgctgtggacaagagtacgggaaaagagaacaagattactatcactaatgacaagggccgtttgagcaaggaagacattgaacgtatggtccaggaagctgagaagtacaaagctgaagatgagaagcagagggacaaggtgtcatccaagaattcacttgagtcctatgccttcaacatgaaagcaactgttgaagatgagaaacttcaaggcaagattaacgatgaggacaaacagaagattctggacaagtgtaatgaaattatcaactggcttgataagaatcagactgctgagaaggaagaatttgaacatcaacagaaagagctggagaaagtttgcaaccccatcatcaccaagctgtaccagagtgcaggaggcatgccaggaggaatgcctgggggatttcctggtggtggagctcctccctctggtggtgcttcctcagggcccacccattgaagaggttgattaagccaaccaagtgtagatgtagcattgttccacacatttaaaacatttgaaggacctaaattcgtagcaaattctgtggcagttttaaaaagttaagctgctatagtaagttactgggcattctcaatacttgaatatggaacatatgcacaggggaaggaaataacattgcactttataaacactgtattgtaagtggaaaatgcaatgtcttaaataaaactatttaaaatggcaccataaaaaaaaaaaaaaaaaaaaaaaaaaaaaaaaaaaaaaaaaaaaaaaaaaaaaaaaaaagcaacaaaaaaatcaaaaacaccacacaaaaacaacaccaggctcccagcgacacacacgcaccaaaaaccactaccagcggaagcgaacccacagaacccccgacacaacgacacgccaaccacgacccccaacgaacccccagagcgcggcccgacggcgcccccgcgcccaccaccgcgcccccccgccgacccgccccacgctccgcgccaaccacttcaccgcaggccaccagcaacaaacccgccaaacacgagaacgccccgaacccaccaaccacccagcgaaccaacacacacaccacacaggacacaagaaccaccccaacgaaccggcagacgaacacaagatcgacaccacaacaccagcagtaccgaagcagaacagaaacaccacaaaccgcccacagaacgcgcctcgcacaccagcccctaccaacccgccacagcaggcgacacaacaacccaacgacacaag

SEQ ID NO: 530862 - DNA, 158 bp, Homo sapiens
atactacagatattagcaagcactacctccatgagaattcagtggtatagggtggatcgggtgtctagggtggtatagtcagtatcagaaaagcactacctccatgtagaattcacgtgtggggtaggtatagcttgggtaccgagactcgcaattcg

SEQ ID NO: 530863 - DNA, 830 bp, Homo sapiens
gactcgagaagatagcatctgaacatgcagacggaacagagttggagcaagcttgcaccccgaggtgttcctcagattgaagtcacttttgacattgatgccaatggtatactcaatgtctctgctgtggacaagagtacgggaaaagagaacaagattactatcactaatgacaagggccgtttgagcaaggaagacattgaacgtatggtccaggaagctgagaagtacaaagctgaagatgagaagcagagggacaaggtgtcatccaagaattcacttgagtcctatgccttcaacatgaaagcaactgttgaagatgagaaacttcaaggcaagattaacgatgaggacaaacagaagattctggacaagtgtaatgaaattatcaactggcttgataagaatcagactgctgagaaggaagaatttgaacatcaacagaaagagctggagaaagtttgcaaccccatcatcaccaagctgtaccagagtgcaggaggcatgccaggaggaatgcctgggggatttcctggtggtggagctcctccctctggtggtgcttcctcagggcccacccattgaagaggttgattaagccaaccaagtgtagatgtagcattgttccacacatttaaaacatttgaaggacctaaattcgtagcaaattctgtggcagttttaaaaagttaagctgctatagtaagttactgggcattctcaatacttgaatatggaacatatgcacaggggaaggaaataacattgcactttataaacactgtattgtaagtggaaaatgcaatgtcttaaataaaactatttaaaat

SEQ ID NO: 530864 - DNA, 1510 bp, Homo sapiens
  misc_feature (82)..(82): n is a, c, g, or t
  misc_feature (88)..(88): n is a, c, g, or t
  misc_feature (95)..(95): n is a, c, g, or t
  misc_feature (112)..(112): n is a, c, g, or t
  misc_feature (430)..(430): n is a, c, g, or t
  misc_feature (500)..(500): n is a, c, g, or t
  misc_feature (525)..(525): n is a, c, g, or t
  misc_feature (1394)..(1394): n is a, c, g, or t
  misc_feature (1402)..(1402): n is a, c, g, or t
  misc_feature (1410)..(1410): n is a, c, g, or t
  misc_feature (1441)..(1442): n is a, c, g, or t
  misc_feature (1454)..(1454): n is a, c, g, or t
agaaagattatgacaaccgaatggtcaaccattttattgctgagtttaagcgcacgcataagaaggacatcagtgaaaaacnagaganctgtaanacgcctccgtactgctngtgaacgtgctaagcgtaccctctcttccagcacccaggccagtattgagatcgattctctctatgaaggaatcgacttctatacctccattacccgtgcccgatttgaagaactgaagtgctgacctgttccgtggcaccctggacccagtagagaaagcccttcgagatgccaaactagacaagtcacagattcatgatattgtcctggttggtggttctactcgtatccccaagattcagaagcttctccaagacttcttcaatggaaaagaactgaataagagcatcaacccctgatgaagctgttgcttatgngtgcagctgtccaggcagccatcttgtctggagacaagtctgagaatgttcaagatttgctgctcttggnatgtcattcctcttgtcccttggtnattgaaactgctggtggagtcatgactgtcctcatcaagcgtaataccaccattcctaccaagcagacacagaccttcactacctattctgacaaccagcctggtgtgcttattcaggtttatgaaggcgagcgtgccatgacaaaggataacaacctgcttggcaagtttgaactcacaggcatacctcctgcaccccgaggtgttcctcagattgaagtcacttttgacattgatgccaatggtatactcaatgtctctgctgtggacaagagtacgggaaaagagaacaagattactatcactaatgacaagggccgtttgagcaaggaagacattgaacgtatggtccaggaagctgagaagtacaaagctgaagatgagaagcagagggacaaggtgtcatccaagaattcacttgagtcctatgccttcaacatgaaagcaactgttgaagatgagaaacttcaaggcaagattaacgatgaggacaaacagaagattctggacaagtgtaatgaaattatcaactggcttgataagaatcagactgctgagaaggaagaatttgaacatcaacagaaagagctggagaaagtttgcaaccccatcatcaccaagctgtaccagagtgcaggaggcatgccaggaggaatgcctgggggatttcctggtggtggagctcctccctctggtggtgcttcctcagggcccacccattgaagaggttgattaagccaaccaagtgtagatgtagcattgttccacacatttaaaacatttgaaggacctaaattcgtagcaaattctgtggcagttttaaaaagttaagctgctatagtaagttactgggcattctcaatattttnggagtaanaaattcanacaggggaaggcaataacaatgcacatgatnnacactgtcgttntaagtggaaaatgcaactgtcttaaatactaattaagatcgcccctatcgagggca

SEQ ID NO: 530865 - DNA, 1203 bp, Homo sapiens
cgccgttatctctgcccatcgcagcttgcgtgaccaactgtctacgagggtgcccgcagagctgcgcacacagttccggctctagcgctttcccactgtgggtcccttgcccagcacgggtaacgcgtaaggctacacgccggagcggtaaatctgttcccatacggtggtacccccgacggggggaccccccttggaagtcggaaccagtaggaagtttattcgggcagtcgaaacctccaccccttttgggcccatctgaagggtgacctccctgggccctcccagtgcgtgatatattgtactttctctcatgtatataggtcactgctcctgtgctcttccctctgtacacgggttgtaatggtccctttcgcaaggttggaggctcccccttgctccatcaggccaagccccttgccacgtgggccccaagcccagagagtgttactcgaaaactggtacaaaaatcggacagggaaagtctactatttctagtactagttgagcctgagccaaggcccgggcaaatgacgtagcaacacggtactctactgtctgctcagtccccgcgtacagtggccctgcgtcccaattggcatctcccccaatgtcctgcgctctcagggtagaccaggtcaggtgaggggcattggcggtcgtgcacccctcactatcacctctcctagcgcagtaacgcacacctcactgggagtaggctggttgcgtgctacgccgggtcccccgtgcccagtagtaagagcaccttttgcgcaaggctcatcacccatctcggcctccatccctgctgtgaccacagcttcgccacagcttgccttgagggtctaatatctgggaagggagagttctttagctgcccctgtctggaagacgtggctctgggtgaggtagcgcgggaaacggatggatgtgatattagttcttggagggaggccacgccctaagccgccagccacgcaagctctcaggggcacctactgacgattggccagtgctcaaccccgcatcccagacaggccctccctgtctccagggcccccaccgaggttacccagggctggagacttcctctggtaaacattcctccagcctccccgtcacctgggacgccaagagaggtgggcacacccaggaagggaaagcaggcagccccgttttgggagtaactgcttggatattttg

SEQ ID NO: 530866 - DNA, 1505 bp, Homo sapiens
  misc_feature (82)..(82): n is a, c, g, or t
  misc_feature (88)..(88): n is a, c, g, or t
  misc_feature (95)..(95): n is a, c, g, or t
  misc_feature (112)..(112): n is a, c, g, or t
  misc_feature (430)..(430): n is a, c, g, or t
  misc_feature (500)..(500): n is a, c, g, or t
  misc_feature (525)..(525): n is a, c, g, or t
agaaagattatgacaaccgaatggtcaaccattttattgctgagtttaagcgcacgcataagaaggacatcagtgaaaaacnagaganctgtaanacgcctccgtactgctngtgaacgtgctaagcgtaccctctcttccagcacccaggccagtattgagatcgattctctctatgaaggaatcgacttctatacctccattacccgtgcccgatttgaagaactgaagtgctgacctgttccgtggcaccctggacccagtagagaaagcccttcgagatgccaaactagacaagtcacagattcatgatattgtcctggttggtggttctactcgtatccccaagattcagaagcttctccaagacttcttcaatggaaaagaactgaataagagcatcaacccctgatgaagctgttgcttatgngtgcagctgtccaggcagccatcttgtctggagacaagtctgagaatgttcaagatttgctgctcttggnatgtcattcctcttgtcccttggtnattgaaactgctggtggagtcatgactgtcctcatcaagcgtaataccaccattcctaccaagcagacacagaccttcactacctattctgacaaccagcctggtgtgcttattcaggtttatgaaggcgagcgtgccatgacaaaggataacaacctgcttggcaagtttgaactcacaggcatacctcctgcaccccgaggtgttcctcagattgaagtcacttttgacattgatgccaatggtatactcaatgtctctgctgtggacaagagtacgggaaaagagaacaagattactatcactaatgacaagggccgtttgagcaaggaagacattgaacgtatggtccaggaagctgagaagtacaaagctgaagatgagaagcagagggacaaggtgtcatccaagaattcacttgagtcctatgccttcaacatgaaagcaactgttgaagatgagaaacttcaaggcaagattaacgatgaggacaaacagaagattctggacaagtgtaatgaaattatcaactggcttgataagaatcagactgctgagaaggaagaatttgaacatcaacagaaagagctggagaaagtttgcaaccccatcatcaccaagctgtaccagagtgcaggaggcatgccaggaggaatgcctgggggatttcctggtggtggagctcctccctctggtggtgcttcctcagggcccacccattgaagaggttgattaagccaaccaagtgtagatgtagcattgttccacacatttaaaacatttgaaggacctaaattcgtagcaaattctgtggcagttttaaaaagttaagctgctatagtaagttactgggcattctcaatactttaatatggcccataggctcaggggaagggaatacctttgcactttattatctgtgtattggaagtggaaaagccattgtctttgattgacccctttctttttggcaaacaaac

SEQ ID NO: 530867 - DNA, 2076 bp, Homo sapiens
  misc_feature (82)..(82): n is a, c, g, or t
  misc_feature (88)..(88): n is a, c, g, or t
  misc_feature (95)..(95): n is a, c, g, or t
  misc_feature (112)..(112): n is a, c, g, or t
  misc_feature (430)..(430): n is a, c, g, or t
  misc_feature (500)..(500): n is a, c, g, or t
  misc_feature (525)..(525): n is a, c, g, or t
  misc_feature (1335)..(1335): n is a, c, g, or t
  misc_feature (1337)..(1337): n is a, c, g, or t
agaaagattatgacaaccgaatggtcaaccattttattgctgagtttaagcgcacgcataagaaggacatcagtgaaaaacnagaganctgtaanacgcctccgtactgctngtgaacgtgctaagcgtaccctctcttccagcacccaggccagtattgagatcgattctctctatgaaggaatcgacttctatacctccattacccgtgcccgatttgaagaactgaagtgctgacctgttccgtggcaccctggacccagtagagaaagcccttcgagatgccaaactagacaagtcacagattcatgatattgtcctggttggtggttctactcgtatccccaagattcagaagcttctccaagacttcttcaatggaaaagaactgaataagagcatcaacccctgatgaagctgttgcttatgngtgcagctgtccaggcagccatcttgtctggagacaagtctgagaatgttcaagatttgctgctcttggnatgtcattcctcttgtcccttggtnattgaaactgctggtggagtcatgactgtcctcatcaagcgtaataccaccattcctaccaagcagacacagaccttcactacctattctgacaaccagcctggtgtgcttattcaggtttatgaaggcgagcgtgccatgacaaaggataacaacctgcttggcaagtttgaactcacaggcatacctcctgcaccccgaggtgttcctcagattgaagtcacttttgacattgatgccaatggtatactcaatgtctctgctgtggacaagagtacgggaaaagagaacaagattactatcactaatgacaagggccgtttgagcaaggaagacattgaacgtatggtccaggaagctgagaagtacaaagctgaagatgagaagcagagggacaaggtgtcatccaagaattcacttgagtcctatgccttcaacatgaaagcaactgttgaagatgagaaacttcaaggcaagattaacgatgaggacaaacagaagattctggacaagtgtaatgaaattatcaactggcttgataagaatcagactgctgagaaggaagaatttgaacatcaacagaaagagctggagaaagtttgcaaccccatcatcaccaagctgtaccagagtgcaggaggcatgccaggaggaatgcctgggggatttcctggtggtggagctcctccctctggtggtgcttcctcagggcccacccattgaagaggttgattaagccaaccaagtgtagatgtagcattgttccacacatttaaaacatttgctacgaatttaggtccttcaaatgtntnaaatatgtaaggacctaaattcgtagcaaattctgtggcagttttaaaaagttaagctgctatagtaagttactgggcattctcaatacttgaatatggaacatatgcacaggggaaggaaataacattgcactttataaacactgtattgtaagtggaaaatgcaatgtcttaaataaaactatttaaaatggcaccataaaaaaaaaaaaaaaaaaaaaaaaaaaaaaaaaaaaaaaaaaaaaaaaaaaaaaaaaaagcaacaaaaaaatcaaaaacaccacacaaaaacaacaccaggctcccagcgacacacacgcaccaaaaaccactaccagcggaagcgaacccacagaacccccgacacaacgacacgccaaccacgacccccaacgaacccccagagcgcggcccgacggcgcccccgcgcccaccaccgcgcccccccgccgacccgccccacgctccgcgccaaccacttcaccgcaggccaccagcaacaaacccgccaaacacgagaacgccccgaacccaccaaccacccagcgaaccaacacacacaccacacaggacacaagaaccaccccaacgaaccggcagacgaacacaagatcgacaccacaacaccagcagtaccgaagcagaacagaaacaccacaaaccgcccacagaacgcgcctcgcacaccagcccctaccaacccgccacagcaggcgacacaacaacccaacgacacaag

SEQ ID NO: 530868 - DNA, 458 bp, Homo sapiens
  misc_feature (26)..(26): n is a, c, g, or t
  misc_feature (33)..(33): n is a, c, g, or t
atcccaaagtccgggaaataagggtntgaagcnactgcccccgggcccttataagagtatttataatatgggcatgccatagtttatttacctgggcccttttgctcttttggttttatatttgagacagagtctcactctgtcaccaaggctggagtacagtggcgtgatctcgctcactgcaccctccgcctcctggaattaagcaattcttctgcctcagcctcctgagtagctggcactacaggcacactccactgctctctacccagacccttttgaggaaattttagttctttctgtttaggttgcttctaagctttttaaaacattgaccatccctgaatgaacatatttgtgcccttgtccaattatttagtagaataaattcctaaaagcaggcttctgggctataaggtttgattttttttaaagtagataaagatatgaggttccta

SEQ ID NO: 530869 - DNA, 280 bp, Homo sapiens
aactggtaaggttcctcattgctgacagaagtaaaaactgctataacctgccaggcttggtggctcatgcctgtaatcccagcactttgtgaggccgaggtgggcagatcacttgaggtcgggagtttgagaccagcctgggcaacatggtgaaacctgtctctactaaaaaatatgtataaaacttagcctggagtggtggcacatgcctgtagtcccagctatttgggaggctgaggcacgagaatctcttgaacccaggaggcagaggctgcagtga

SEQ ID NO: 530870 - DNA, 1923 bp, Homo sapiens
  misc_feature (82)..(82): n is a, c, g, or t
  misc_feature (88)..(88): n is a, c, g, or t
  misc_feature (95)..(95): n is a, c, g, or t
  misc_feature (112)..(112): n is a, c, g, or t
  misc_feature (430)..(430): n is a, c, g, or t
  misc_feature (500)..(500): n is a, c, g, or t
  misc_feature (525)..(525): n is a, c, g, or t
agaaagattatgacaaccgaatggtcaaccattttattgctgagtttaagcgcacgcataagaaggacatcagtgaaaaacnagaganctgtaanacgcctccgtactgctngtgaacgtgctaagcgtaccctctcttccagcacccaggccagtattgagatcgattctctctatgaaggaatcgacttctatacctccattacccgtgcccgatttgaagaactgaagtgctgacctgttccgtggcaccctggacccagtagagaaagcccttcgagatgccaaactagacaagtcacagattcatgatattgtcctggttggtggttctactcgtatccccaagattcagaagcttctccaagacttcttcaatggaaaagaactgaataagagcatcaacccctgatgaagctgttgcttatgngtgcagctgtccaggcagccatcttgtctggagacaagtctgagaatgttcaagatttgctgctcttggnatgtcattcctcttgtcccttggtnattgaaactgctggtggagtcatgactgtcctcatcaagcgtaataccaccattcctaccaagcagacacagaccttcactacctattctgacaaccagcctggtgtgcttattcaggtttatgaaggcgagcgtgccatgacaaaggataacaacctgcttggcaagtttgaactcacaggcatacctcctgcaccccgaggtgttcctcagattgaagtcacttttgacattgatgccaatggtatactcaatgtctctgctgtggacaagagtacgggaaaagagaacaagattactatcactaatgacaagggccgtttgagcaaggaagacattgaacgtatggtccaggaagctgagaagtacaaagctgaagatgagaagcagagggacaaggtgtcatccaagaattcacttgagtcctatgccttcaacatgaaagcaactgttgaagatgagaaacttcaaggcaagattaacgatgaggacaaacagaagattctggacaagtgtaatgaaattatcaactggcttgataagaatcagactgctgagaaggaagaatttgaacatcaacagaaagagctggagaaagtttgcaaccccatcatcaccaagctgtaccagagtgcaggaggcatgccaggaggaatgcctgggggatttcctggtggtggagctcctccctctggtggtgcttcctcagggcccacccattgaagaggttgattaagccaaccaagtgtagatgtagcattgttccacacatttaaaacatttgaagaacctaaatttgaagcaaaattgtaagtggaaaatgcaatgtcttaaataaaactatttaaaatggcaccataaaaaaaaaaaaaaaaaaaaaaaaaaaaaaaaaaaaaaaaaaaaaaaaaaaaaaaaaaagcaacaaaaaaatcaaaaacaccacacaaaaacaacaccaggctcccagcgacacacacgcaccaaaaaccactaccagcggaagcgaacccacagaacccccgacacaacgacacgccaaccacgacccccaacgaacccccagagcgcggcccgacggcgcccccgcgcccaccaccgcgcccccccgccgacccgccccacgctccgcgccaaccacttcaccgcaggccaccagcaacaaacccgccaaacacgagaacgccccgaacccaccaaccacccagcgaaccaacacacacaccacacaggacacaagaaccaccccaacgaaccggcagacgaacacaagatcgacaccacaacaccagcagtaccgaagcagaacagaaacaccacaaaccgcccacagaacgcgcctcgcacaccagcccctaccaacccgccacagcaggcgacacaacaacccaacgacacaag

SEQ ID NO: 530871 - DNA, 192 bp, Homo sapiens
  misc_feature (6)..(6): n is a, c, g, or t
tcgaantcgacggtttctcttctgatacctctatcatatgctatagtgtattttttttttttaaacaccagaatctctttaagtcttaaacaaaggggtagtccggcccggggcatacatggggtccggcgtccctagaaccacaaccaaccacagaatcacaccattttggagggaaaacaaaaaaattcc

SEQ ID NO: 530872 - DNA, 222 bp, Homo sapiens
  misc_feature (51)..(51): n is a, c, g, or t
  misc_feature (83)..(83): n is a, c, g, or t
  misc_feature (114)..(114): n is a, c, g, or t
  misc_feature (146)..(146): n is a, c, g, or t
  misc_feature (186)..(186): n is a, c, g, or t
  misc_feature (205)..(205): n is a, c, g, or t
  misc_feature (213)..(213): n is a, c, g, or t
cggtaagtgacctccgcttccacgcgtccattccccgccgctccggcgctntctcgcccgcccctaccccgaggccaggccgnattccccgaggaaagagcctgtcgccgcggngggacaggagggggctggacgcttccaggganactgaggccctggcgcgcccaggtccgcgcgtcctgggcnagaggggcaaggctggctnaagctccnggctgccag

SEQ ID NO: 530873 - DNA, 719 bp, Homo sapiens
  misc_feature (460)..(460): n is a, c, g, or t
  misc_feature (474)..(474): n is a, c, g, or t
ctctggtcttttgctactacgtgtgagtcccacagcgactctttagtgaccagcaccctcgcttctgatcatcatctgaaggtgacttctccgccgatacctccgagataattctcaccgtgacccgtgttacaccgttcttcgttgcttatgaatggtctccagaaataatccaagggaggcccaaagatctttggccaccccagatgttgaccctcctgaccatgaagacaccaagtatactgtggaccagaggtttggcctggattttaaagaaatagaattaattggctcaggtggatttggcccagttttccaacgccaaacaaccagaattgagccgggaagacttacgttattaaaccgtgttaaatataataacgagaaggccggagccgtgaagtataaagcacttggccaaaacttgatcactgtaaataattgttcaataccaatggcntgttgggatggatnttgattatgatcctcgagagcccgtgatgatttcttcttgagagcccgtgattatgatcctcgagagaccagcccacaaatagttccaggtccaagaactaagtgccttttcatcccaatggaattctgtgataaagggaccttggaaccatggattgaaaaaagaagaggcgagaaactagaccaagttttggctttggaactctttgaaccaataaccaaaggggtgcattatataccttcca

SEQ ID NO: 530874 - DNA, 184 bp, Homo sapiens
  misc_feature (9)..(9): n is a, c, g, or t
cagggcggngatgacccgcttgatcgcgaaccgggcggtctcgatgcccgccttgatcgcggggtccacgttgtccatgtcgcttcctcgcctccgtggacctcatccgggattaccagcgatacagagatgcgctggtcgccatcggtggtgcggggcagtccctggacagcaacggcatcca

SEQ ID NO: 530875 - DNA, 169 bp, Homo sapiens
gtctacagcaataaatgccgtctagctcagaagaggcccagatgtaggtacccatggagcactccgcagatcacatacccctgaaaacttaatactaacataaccacttatcagagacataagtactagtactttacctcatacctaatcaatactctagaaaggaagg

SEQ ID NO: 530876 - DNA, 962 bp, Homo sapiens
gatttgtgagtcgggtgctgaatggttatccggattcatgtctggtggctccgggtgcaataataacagagaaacatggacgatccacagggaatgtaccccgatggtgtcatcgaggagtcagacctgtcacattgatggcatttgtattgaataacctatcgaattgatactgaactttaaatgcgagatctctccttgcagaggccatctactgtcttagcgtgttgggagtacagccttccgactaattacagtagaggagcctatatatttccttctgtatcacaacggggtatgatcgtgacttgcttcaatgactcaaatgcatgggtaactggacacataacaagcgcagaattttggctatcttccaatcctgcatacatgcttgagagattgagttcacacggcagacccaatcactaatattggcgccccaaccagaagtacactggcgtcatacacggatccaattagggtaacttctggtgacctcggaagcactactattggtgagaccatcttgtgcatgctcttgcaattggtgggaaccaacagtgtttctacacttgtaactttttgccagaaaaaacctgacaggcttgcatagtctacccaaccaatatgtggttggcttggagctagccgccccgtgcgaggagtcgtcccttgcatacctgtttaaaaaccagaaagatactcctttttctcgcaataatcttggagtcaccacaatggtgtcgattcagaggcattgaaaagcaccgactgacacactggtttgactcccgttgggatttcaacaggcgacttccatatcttggtgaacaatgtttcccaccctagctcactgaactagaagtaatttcagggctggtgttggcctaattctaggcacaaaatagccaaacgtgtagttctttttggaaactctgaccaaaaacatttcactgcgacat

SEQ ID NO: 530877 - DNA, 220 bp, Homo sapiens
ccactgattttcgtattattacgtggagactgggtaacactctgttggccaggatggtccccatctcttgaccttgtgatccgcccgccttggcctcccaaagtgctgggataacaagcctgagccatcgctcccagcccattcattcgtacttacaggctgaataatattctatcgtgtctatataccataattccttattcattcatccagtgataac

SEQ ID NO: 530878 - DNA, 567 bp, Homo sapiens
  misc_feature (118)..(118): n is a, c, g, or t
  misc_feature (211)..(211): n is a, c, g, or t
gctcaaatgtaaaatgccccttcaattgagatcccccccccaggaaggtgggtggaagcaggggaagcaggatttttggcccttcttccaaactttccctccccggaccctgaggganaattattttggtttcccccccttgggttgaaaccccccaaaaaggccccttctgattaagccggttgaaacaaaaaagggcccggttatccangaatcttccgcgcctccggatgcccttgaataaaaatggcccccccccggggccccaatattttcccccccagaataaaaaagaaaccccttttttaaaaaacccgcttccaaggcccctttcccggtttttcgggggccccaaaaaaatttggaaagggaaaaagctctggtttttacccccccccccccccccaaggtttaggaaaagggttcccccccaattggggtccccgaaaatttttggggaagaaacctttttaaaggggtttttgaacccccttaaaaccgcttttttttttccccccagggacccccccccctgggtttggcccccaaaaatttttggaaaaccca

SEQ ID NO: 530879 - DNA, 510 bp, Homo sapiens
ctcacaatcatggcagaaggcaaaaggcatgtctcacatggtggcagacaagagaagagagcttgtgcagggaaagtcccgtttttaaaaccatcagatctcatgagactcattcactatcatgagaacagcatgggaaagacccgcccccatgacttgtctcccatcgggttcctcccacaacacatgggaactatgggagctacaagatgagatttgggtgggaacacagagccaaactgtatcagggtggtacaagtgtttcacatgagctgactggcagtcagtaactgatttcagttttccagataattgacatactgtgttatatactgcttttttttcctacttaatagtgcttttttaaaaatagaagttgtggctgggcatagtggttcacacctgtaatcccagcactttgtgagccaggatgattgctcagggccaggactttgaaaccagcctgggtaacagcaagacctgcatcagtataaaaagtagaaaaaaaaa

SEQ ID NO: 530880 - DNA, 269 bp, Homo sapiens
agaatgatcttggcttgggtaagttttcctgcttgtgtactttttgataaataagacgttaatactgttttaatgaaaacagttaaatattgaattatttagtaaaataaccatatatttaatcttaaggttctactcacctaaatatctgaaattcacaggctataaaatggttgacagggaaataactttacatgatgactcacagttttcataaataatgcaggtaaactattaatataaaataattaggtgttggggataacata

SEQ ID NO: 530881 - DNA, 378 bp, Homo sapiens
ggcacagggtggtgtcgtgcatctctgagccaatgctggtgttggtggcctgccgtcgcggctgagctctcctcctgcacgccactgtcctgccgtgcgccttcctctggaacagatctggaccctgggtgtcatccactgcgcagccgtgctgcccaactgttcgctcttgccccgaggccggagccaagggcggcccgcggggctggggcctaccccgagcgcctggaagcccagctcgctgcgcagctcccggcacaccggcctcagccccttttaagccacccagaggcccaacgactaaaccagcccaccctgggctgggcccaggtgcccggcccaaaacctttgggaattaaaaacccattatcgaggccc

SEQ ID NO: 530882 - DNA, 453 bp, Homo sapiens
  misc_feature (395)..(396): n is a, c, g, or t
gtggcgaggcagtctcgggggatggaaacgcgggcgtttccgcggcagctcagcacctgtcagagagcgaatttcttgggtgacttgtatgctcagaaaaactctggagtgacagcaaacggtgggccggggagcaaatttgcaggctactgtcggaatttggtgtctgatattcccaatcttgcaaaccataagatgccaccagctgctgctgaagagactcctccgtacggtaattataacacacttccctgtaggaaatctcactgtctctctgaaggtgccaccaacccacaaattagccatagcaacagcatgcaaggcagaagagctaaaacaactcaggatgttaatgcaggcgagggcagtgagtttgcagacagtgggattgaagnngccactaccgacacggacctcctgtccaggcgatctaatgccaccaactccagctac

SEQ ID NO: 530883 - DNA, 103 bp, Homo sapiens
cgacacttgtgcagcaggaagtaatcttcaaattatggtaggggttgtgaacaaaaccttttcctttattactcttaactggctgaatggctctacaagaagc

SEQ ID NO: 530884 - DNA, 161 bp, Homo sapiens
gagagcttgctttgcataactttcatgtagttgtctagagtcctttcatgtcacttgcaggactctctttagcatttttgtaagccaggtctagttgtgatgaactcccttaggttttgtttgcccgggcaaagtctttctatttttcattttctgaaagg

SEQ ID NO: 530885 - DNA, 437 bp, Homo sapiens
ggcacgaggaaaaagcttgtggcgaaggggggcaaaaaaaagaagcaggttttgaagttcaccctggactgcactcaccctgtagaagatggaatcatggatgctgccaattttgagcagttcctccaggagagaatcaaggtgaatgggaaagctggcaacctcggcggaggagtcgtgaccatcgaacgcagcaagagcaagatcactgtcacttcagaggtgcctttctccaaaaggtatttgaaatatctcaccaaaaaatatttgaagaagaacaacctcccgagactggctgcgtgttgtcgccaacagcaaagagagttacgagctgcgttacttccagattaaccaggatgaagaggaggaggaagacgaggattaggacacattggtctgcaatgttttgtattaattcataaataaaatttaggaac

SEQ ID NO: 530886 - DNA, 425 bp, Homo sapiens
  misc_feature (6)..(6): n is a, c, g, or t
  misc_feature (33)..(33): n is a, c, g, or t
  misc_feature (341)..(341): n is a, c, g, or t
ggccgngccagctgcagctttccgccgcttggnccttgtccggagctgcggccttagcttcgcttcctacggggcgcacggcgccaaatctcccagatgcctacgggaaggagctgtttgacaaggccaacaaacaccacttcttacacagcctggccctgttaggggtgccccattgcagaaagccactctgggctgggttattgctagcttccggaacgaccttattctgcaccagcttttactaccaggctctgagtggagaccccagcatccagactttgggccctccgggagggaccctgctactcttgggctggcttgccttggctctttgagcncccttttgcttaattactgggttttctgggcagtttttttttaaagagttggagtaagaagaggattaaaaaggaaaggcaaat

SEQ ID NO: 530887 - DNA, 349 bp, Homo sapiens
tttttttttttccccacccccccttagtttttaggaaattaattttgggggttttttacaaatggctttttccctgccgggattttaaaaaacttttttaaaaaccttttttatttttgggtttttttttgggatggtttttcctggggcccttgggggtttttttgggtagcccccccttgggtttggtgaaacccctttccaaatttattcccccgggtttttcccctaaaaaaaaaccagttttttcccccttttaaatttttttggaaaaagggggttttttttcccttttgggggttaaagggggggggggtaacggggggaaaattaaactttgggggcccca

SEQ ID NO: 530888 - DNA, 512 bp, Homo sapiens
  misc_feature (6)..(6): n is a, c, g, or t
  misc_feature (33)..(33): n is a, c, g, or t
  misc_feature (84)..(84): n is a, c, g, or t
  misc_feature (86)..(86): n is a, c, g, or t
  misc_feature (428)..(428): n is a, c, g, or t
ggccgngccagctgcagctttccgccgcttggnccttgtccggagctgcggccttagcttcgcttcctacggggcgcacgcaantntcccagatgcctacgggaaggagctgtttgacaaggccaacagctccttcccttaggcttcgcttcctacggggcgcacgggcgccaaatctcccagatgcctacgggaaggagctgtttgacaaggccaacaaacaccacttcttacacagcctggccctgttaggggtgccccattgcagaaagccactctgggctgggttattgctagcttccggaacgaccttattctgcaccagcttttactaccaggctctgagtggagaccccagcatccagactttgggccctccgggagggaccctgctactcttgggctggcttgccttggctctttgagcncccttttgcttaattactgggttttctgggcagtttttttttaaagagttggagtaagaagaggattaaaaaggaaaggcaaat

SEQ ID NO: 530889 - DNA, 895 bp, Homo sapiens
  misc_feature (38)..(38): n is a, c, g, or t
  misc_feature (78)..(78): n is a, c, g, or t
  misc_feature (89)..(89): n is a, c, g, or t
  misc_feature (94)..(94): n is a, c, g, or t
  misc_feature (111)..(111): n is a, c, g, or t
  misc_feature (114)..(114): n is a, c, g, or t
  misc_feature (117)..(117): n is a, c, g, or t
  misc_feature (124)..(126): n is a, c, g, or t
  misc_feature (134)..(134): n is a, c, g, or t
  misc_feature (140)..(140): n is a, c, g, or t
  misc_feature (145)..(145): n is a, c, g, or t
  misc_feature (149)..(152): n is a, c, g, or t
  misc_feature (155)..(155): n is a, c, g, or t
  misc_feature (157)..(157): n is a, c, g, or t
  misc_feature (159)..(159): n is a, c, g, or t
  misc_feature (163)..(164): n is a, c, g, or t
  misc_feature (167)..(168): n is a, c, g, or t
  misc_feature (176)..(176): n is a, c, g, or t
  misc_feature (184)..(184): n is a, c, g, or t
  misc_feature (188)..(188): n is a, c, g, or t
  misc_feature (199)..(199): n is a, c, g, or t
  misc_feature (202)..(202): n is a, c, g, or t
  misc_feature (229)..(229): n is a, c, g, or t
  misc_feature (262)..(262): n is a, c, g, or t
  misc_feature (278)..(278): n is a, c, g, or t
  misc_feature (284)..(284): n is a, c, g, or t
  misc_feature (290)..(290): n is a, c, g, or t
  misc_feature (309)..(309): n is a, c, g, or t
  misc_feature (311)..(311): n is a, c, g, or t
  misc_feature (313)..(313): n is a, c, g, or t
  misc_feature (328)..(328): n is a, c, g, or t
  misc_feature (733)..(733): n is a, c, g, or t
  misc_feature (885)..(885): n is a, c, g, or t
tctaggctctacataccatttcttttctacctggacangaccccataaaaacctccaagccacgtgtagatgtgaganacatttgaaanaacanttcaactcatagcttanaangangccattnnnccagccgngcaagnccctnaccnnnnctntncngggnnttnncgtggggntgggttgnttgnttggtgttttntgngccccacaatactgaagctccttttcnaggggcttgggataggcagtcaattccaggttngggggggggggtgggngggggngggtgngagggagtgggatcgaggngngngggtgcggtgggtgnagagcgatgtgtggggggaggatgatttaaaaagtacatctctctccctcctcccccacatgcacaaggctcacatctcattatggtgcggcccatgtacattaaagtgtgatacttggttttgaaaacattcaaacagtctctgtggaaatctgagagaaattggcggagagctgccgtggtgcattcctcctgtagtgcttcaagctaatgcttcatcctctctaataacttttgatagacaggggctagtcgcacagacctctgggaagccctggaaaacgctgatgcttgtttgaagatctcaagcgcagagtctgcaagttcatcccctctttcctgaggtctgttggctgaagaggaaagaaaaggcaggtttgaccagagtgaaaccattagcatgtnattcataacaaccgtgactgaggggcactggtgggctttctggctcacatttccaaagacatgttttctccataatgtttcataactcatggtagaacttggcccatggggagagagcgccaagaaaggtgaatgcacacatgaggagaggnaggactgagg

SEQ ID NO: 530890 - DNA, 1466 bp, Homo sapiens
gggcagctctgctggtgcgggggcgggagcccgggatcgagctaccgctggccgagcgcgccggccaccgacatgcaccgaccttccgcaccgccctccgcgacaggcgcagccctgcgaggtctccgctccagacacacacaacgagacaaacagagagacgatctgaccagccacaaggtaccaggagaaaccaggatagcccgcagacgcggacgaacagaagaccagatgaacgaacccagacgaacggcggacacacagacgaacggcaacggccagagcgggacaacagcacgaacgcacaagaagcacaccagagaagaaacgacaagggaagggcggcagaaagcagacggacggaaaagagagccaagaggaagagagaagcaggaacgaagagcgcgagaagaaagaaggagagagagcgacgaagggagcaagaggccaggggaacagagaggcgggagaggcgcgggcaggcagaagaccgcacagaggaaagagagggcgagcggcagaagaggagcgacgggagggaggaaagagagagggagaagaaaagaggaggggaggaggaggaaaaagagagaagacaaggagaagaagagaagagcgaaagagaagaaaaaagcaaaaagagagagagggagagagggagaagagaggaaggaggaaaggagaggaaagaaacagaaaaagaaaaaagggagaagagaaaagaagagaagagagaagcaagaggagaagggcagaggggaagggccacggagggggaggggaggggaagagaggaggggaaggaaggacgaagagaggaacgagagagaggaggaggggaaggaagaggaggagagaggaggagggaagagggcggtggagagaagagagagagggcaggagaggaagaaaaagagagaagaggacaggagggagagaggaggggagggaggggaggagagaagggaggggacgaaggagagaggcgaggcagagagagaaaaaaagaaagagaaggagacgggagagagagaagaggagaggaggagagaacgaacgaggaggcaagagagagaagcgacaaggaaggagcgggaggaaacgaagagagaagagaaggagagaaagagaagaagaaacaaggagaacgcgagaggagagagagagagggaggaacgagagagaacagaaagagagacaagagagcggagaagaagaggagaagaagaaaatgcaagaggaagagcgggacgacacacggccggagagagagaagaagagagcaggggagagaagaaggagagagaagagcgagaaggagaaggagagccgcaagctgaggacggagacaaacgacggaaggaagaggaggagaggagcgagcgagggagagaaggggacgacacgagacacgagagggagacacggagaggacgaccgcgacggacgagcgcagagcgaggagc

SEQ ID NO: 530891 - DNA, 138 bp, Homo sapiens
ggaggtgggagggaagaaattgcaaatggtgtttgccattgtttattagaaaaaaaaaccccattaaaaagtgggcaaaggacatgaacagacacttctcaaaagaagacatttatgctggcaaaaaaatatgaaaaa

SEQ ID NO: 530892 - DNA, 420 bp, Homo sapiens
ttaatccccatgctttctacactaattaacagctaataattatcattttaaagtaataaatttgcattctggtttatatatcagtagctatgagcttgattactaagtttgtccctaataggacatctagtctcagtatgcttacaaaatcagatatctgagtttgtaatattaagaattagactatatatatctttgtcattttatgagaataaaggccacctatgatggctttaggtagatagccagctgacagtaaaaatgtatgtttggtttgtatgaagcaagctaaggatttcatgactccagcaatttacaatttaactcaaaatctagctgaaagctagttcaagttctgtcttttctattaaatgttttctgattagacttacatgcagtgactacccagtataaaccacc

SEQ ID NO: 530893 - DNA, 844 bp, Homo sapiens
gataagacctagccccaaaaccactccaccttactaccagacaaccttagccaaaccatttaccgcaatataatagtataggcgatagaaattgaaacctggacgcagaatagatatagatacctgcaaggggaaagatgaacaaagttataaccaagcataatatagcgagaggacgtaaccccatataccttctgcgactaatgaagttaacctcagaaatatacgtttgcataggcatgaaagctcatacgctcaagacccccgataaccagacgagctacctaagaacagcgtagaaagagcacatccgtctatgtagcagaaatagtagggaagatttactaggatagcagcgcgacaagacctaccgaacctggtgatagcatggttgtccaagatagaatcttagttcaactttacatttgcccagcagaaccctctaaatccccttgtacaatgtaactgttagtcccaagagagcgaccagcatctttggacactaggcagagaaagcttgtcatcagagagtcaagaactttcagcagccatagtaggcctaaggagcagacaccgaattcaggacagcgttacaagctcgaagagccactacctaagcatatcccaaaagcatataactgaactcctcacagccaatgtggaccaatctatcaccctatagaagaactactgtcaggaataggttaacattgatgaacaattctcctccggcataagcctgcgtacacaattacaaacactgaactgacgaatcaacacgccaataattaccaatcaaccaagcacgctcaaattatcctcagcggtcacccagacaggcatg

SEQ ID NO: 530894 - DNA, 255 bp, Homo sapiens
gggcagtacggtggagctcagtgagtttgagacggctggccaacatggtgaaaccctgtctatactagaaatacaaaaaaatttagctgggcgtggtggcgcacacctgtaatcccagctactcaggagcctgaggagcagaatcgcttgaacctggttcagggattcagcggaggttgcagtgagtcaggatcggagccgactgcactcgcagcctgggctgagagcagtgagactcgtgtctccaaacaaaaa

SEQ ID NO: 530895 - DNA, 835 bp, Homo sapiens
tggagtgagccctaatgagctgagcgctgcagcactgaagctcgcatgccgcctccgcctgtgctgatcccacctcgtgcctgccgcctgcctgctgcctgcgaagatcctgcgcccggtctaccctcgagaagcggagcccctgtaactgcctgctgacacacgcaggcctgcagcctaacctgatctgacacaaacctgcgcacctgatggcgccttgagcgatgagacaggcaggaggacggagtgtattgagtgagtgctgggctgacgtgccgatgacatctcaacgcaggacagccaacgcaggctcgtaccgcggacatgtggcttcgcgacctgagcaggggccggaccctgctcgtggagaattcgccgcaatggaagcttctcgatggccgccaaacatgcccccgagttggcggccatggcggctagcgcgcccctagggaccctgacacacacccccgtggagggaaacagcccagaaaccaacagagcaacagggaagagaccaacaccaacctggactagggcgcacctggacagagctcccgcagacacacacaacaaggcgaaacaacacaggagctgccccggacaggaaccagtacattcacgcccaacacggcgccgcagcggcgagacgcagcaggagacgcgagccacccacaacacacaggatatcatccacgccacgccacaaacgactcccttctgagccccacaagcgcaccaagcaagtgcgcctcacaagccccgctccacctcccgcacctgccccctcacctcggcgtcaacactacgtctcggaacaccttgacaccgcctccaa

SEQ ID NO: 530896 - DNA, 267 bp, Homo sapiens
ggctgaccctgtgtctcccatggcccctgcgaggcccctaccatggcctgcctgggagacacataactatgacaggaacacacgtggactgatacagaatgaggccagacacacccatgcctgtgcctccctaatgagcgatccccaggagcagttggggctagacagatggtgtctacagctggcacgaaacatagggctgtgagccacacagtgaatgctcaggacacaatacggcgacgcagctactgcagacctggtccacac

SEQ ID NO: 530897 - DNA, 735 bp, Homo sapiens
  misc_feature (142)..(142): n is a, c, g, or t
  misc_feature (156)..(156): n is a, c, g, or t
tcttccatattcacaagcttatttaacctatccaaacgtatttattgcccaactatgcctttttttgttaatgtttgtgtcacactttatcgggatgacaaatccatagatatattcttttatgttaaattatgatcttcanattaatcttaaaantttgtgacgtgtctttttcctttttttccacagttttaatatattattcttcaacgacattttttgtaactttacacttttttggttattttattttaaaaaaatgaaaaattaatttaaaaaaatgcaaaaaactgttggattatttattttagaaattcccccctttgtgttggactgcaaattgagtttctttctctttaggcctttcacaactaggactgagaatgtatgtaaaagttctgtgacagtacagaaggaaaacaactttttatgtatagcttctaaaagggggaaaaaaaaaaaaaaaaaaaaagagaaaccctttgacttccacgtgcccatctcaagacattccactcacagatttgaggttctggattccaggtctggagttttccaatgttaatgtaaacagaactggcacacacacattaagatgaatgtaattattattcctcttgctggtcactaccgtcgctttctatttctctttctttgtgtgaatttatttaaaagaaaaaaaaactttttgtaacgactatttgcagtttaaaaatcaataaaccccgttttttc

SEQ ID NO: 530898 - DNA, 1095 bp, Homo sapiens
  misc_feature (142)..(142): n is a, c, g, or t
  misc_feature (156)..(156): n is a, c, g, or t
  misc_feature (817)..(817): n is a, c, g, or t
tcttccatattcacaagcttatttaacctatccaaacgtatttattgcccaactatgcctttttttgttaatgtttgtgtcacactttatcgggatgacaaatccatagatatattcttttatgttaaattatgatcttcanattaatcttaaaantttgtgacgtgtctttttcctttttttccacagttttaatatattattcttcaacgacattttttgtaactttacacttttttggttattttattttaaaaaaatgaaaaattaatttaaaaaaatgcaaaaaactgttggattatttattttagaaattcccccctttgtgttggactgcaaattgagtttctttctctttaggcctttcacaactaggactgagaatgtatgtaaaagttctgtgacagtacagaaggaaaacaactttttatgtatagcttctaaaagggggaaaaaaaaaaaaaaaaaaaaagagaaaccctttgacttccacgtgcccatctcaagacattccactcacagatttgaggttctggattccaggtctggagttttccaatgttaatgtaaacagaactggcacacacacattaagatgaatgtaattattattcctcttgctggtcactaccgtcgctttctatttctctttctttgtgtgaatttatttaaaagaaaaaaaaactttttgtaacgactatttgcagtttaaaaatcaataaaccccgttttttctccaagaaacaacaaaaaacaacaaaaaacaacaaaaaacaaaaagggggggcgcccgctaataaaagatctccccctagangggcggcgacagttttcgcgcttctacccggtttttctgggccacaaggggggcgccccaaaagagaggcgacgtcgattataataaccgccgaagcgccacgtgcgccgccgctttaaccacgagctgctagcgtggggaacacactggtgcgcgcgggagaaaccctggaggaagaaacccccaacaactcagggggcggcgcagcacaagctgccgcaacacactacccacagacgaactatttcaagcctctagtgaggaaaatcaacaaccct

SEQ ID NO: 530899 - DNA, 213 bp, Homo sapiens
ggttcacgccactctcctgcctcagcctcacaagtagctgggactatcatgtgtgccctgccacgcacgctgggctaattttttgtattttttggtagaggcgtgggtttcacctgttgttggccagtgatggtctcagatctccttgacctctgtgatcctgcctgctcttggccatcccagtagtgcttgggattacgagacatgaagcca

SEQ ID NO: 530900 - DNA, 730 bp, Homo sapiens
gtgaatatgtattaacaaatatatacatttctatttttataaatatagtttgagaggacagcaacaaaggttttaactagaagctgtcctctcaacactatatttataaaaatttgctagggccaaatccatacttgcagaataattcatcaaattttatttttaagtgaaaagtaacctttcaggcatttcagcagcatacattgacaatctagggtatatatgctatgtatgtttcttattgctatgtctatatatgtatgtggggaggacacggagtgaactgttcacacgactctcttcttgccgtacctcacactaacacttggacgaactgtctctgacagacaaactcggatgaacattagctgctgagacttgagtttctgccttacaaactctgaaacaaacaaacagggacaaattgctggctagatctactgactgtagccatcaccagaacacttagtttcttcccagacatgaactttcctgacaggctctgagccagaaacacactgtgggcgtgcatctggcttcagccctggcatatgcctccactgtggacgggaacgcattggaactggagttgtgcacagcaccgacacctagtgcggcctggctgaagaggtgcacaaagggcaagcggtagttctttccaatgtcacccattgcagctacacttaactttctcactgactaccaaatggaagtgaccggttgcaccgaa

SEQ ID NO: 530901 - DNA, 270 bp, Homo sapiens
  misc_feature (20)..(20): n is a, c, g, or t
  misc_feature (105)..(105): n is a, c, g, or t
  misc_feature (178)..(178): n is a, c, g, or t
ctttggaaaacaaacatttnttattactgaaatagcaaaaatcattctacactcctcctaagcatgttcaattagcatacattccaacaatgcatgaaaaaattnctagccagaggcatttaagtgatttcttcctaagtgtttgctaattcaatgccaagaactatgatgtttatcnttctgatggacaaatcaagaaacaaaacagatataataccaagggtaaagctgatatgacccacaacattgtcattactctaactgttaatc

SEQ ID NO: 530902 - DNA, 524 bp, Homo sapiens
ccagatgatgcagagacgatgccgtaccgctgcactccagccggtgacaatgaactctcaaaaacaaacaaacaaacaaaaagaatctttgacaggtgctctcaaatgtaggttgctaagaactttggagattgtaacattggaataaagaaaaaatgtacaggactcatgaagagctaaaatgttcacaaatatcaaggaaaacaacagttaactgaatggactgaatgaatagacaactgaaataattttttgaactttttcttggaacattattgattcttgttttgtttttcagagtcaaatttttagctacttacagcatttaataattcagtaacgtatacttctgtgaataaaattttaagtatatttgtctctctcattcttcctggcttctccagaatctggaaactaattgtgagtattttaacttatggcaatatagttgtttgcctccgtgcattaagagtctgttttcttcttcaacaggatgccattggagaaactgggtgttttaccaa

SEQ ID NO: 530903 - DNA, 186 bp, Homo sapiens
gcaactcctatttcctccgacctcccagcccttgcaaatcatgattctgtctgtgtgttgtgttgtgttgtgttgttttgagatggggtcggtctctgtcacccaggctggagtccagtggcagaatctcagctcactgcaacttccacctcccaggcttcagcaatcctcccatctcagcctctg

SEQ ID NO: 530904 - DNA, 495 bp, Homo sapiens
ctttacgcattgcactaagacttattcattcttccttcgaacagaaccacttagaattaaaacataattctgtaaaaaactcatgagccctgcaatgagtgggctgggtagactgtgctccttccttctgtgcgtgttcgggaggcttcacgttctcgtcccgtggtccctgggtggcctgcaggcaccaggtgttgaaaccaatgccaggcataattcctgtcacatcgaacaggaacattaactggattcctcttccagggaaaggagctgggggtggaagtgtggaaggactgagtgtagtttcttttccaactccaggcagtgactccggctgccaatcatgactgtcaatcatcgtagtaaataatctaacttggtgaacacccgttttgcagcctttatctgagaaaactctctcctctttggggaaaaatgtcattctcctcagccactctgctttacaatgtcttcatcaatctcataggcggtaaa

SEQ ID NO: 530905 - DNA, 750 bp, Homo sapiens
ggagagagagaactagtctggaattatattgtgtatcttttaggttgagaggccacaggatacttccatccgatggtccatgcagcaatggtgcggttccactaggcccctcccctcttcaaggggtctacatggcaactgtcgaggagggtgaaattcagcatgtgttgggagagactagacgtgtggcagggactcacccagactaggtgaggagctctgcttctaattacgcatcttgtggctactctgctgcaggctggctggcccaggggtcatagacatccttgagagcccaattgttggcccactaaggtccacccaaccctaggtgagctgttacgcgcaaaaatctcggatgcgtcatatcacgcagggacaaactaggcccctgagacaaacaccgtgggctccgttagcagcgggcaaatcagccaccagcccccaaggccgctcacaaacggctcgcaagagacgtggcattgtcacactgtgacgaaaccgtcaaccatgggaagaaacccagcccagcgggtactccacccacgttggatacgccaccagagagcaactgcccccctttgaacagagggacggcaccctccaaagacggccccatggagtctccaagcgcacactatccgttagaccagctctactccaccacttctgggcacggaggtctatccttcacaatcgggcacgagtcacgcgtccgccagccacgggacccggttttgccaagcagag

SEQ ID NO: 530906 - DNA, 841 bp, Homo sapiens
gtgcgcgcgggcgggcgggctatggcgcaggcgggttgtggggccggcgctggtgcgcggtggcgccggttgcatggcgtgtctgtctggcggagtcgtccctcgggggctgtcagatttgtgacccatgaagtgaaatctctgagcctcagctgtggtctcttggtgtctggtccaggaagccaacttcatgtcttgagtgcacgagcagcagtttgccatggcagagcttggggctgcacactggtgacccttagtgatgggacaacagcctacgtccagcgagctgtcaaacggagatgaacgcttcttgaagtggcaggtgatccagctctgaggatgggaccaccgtatacattcacctaggtgcacggtacagcaaatgaagctctctcctttgagtgattggtcatgcctgttgcatgctggacgatggcagtagtggtttacatacaccgtagcacccagagaaggctatgaccccaggagccctggaagccgtccaactggaagatggctccacttgctacattcaccaccctgtggctgtgccatcggagagcaccatcctggccgtacagacagaggtgggcttggaggacctggtcagcagaggatgatgagggcttcagtgcagacgcagtggtggccctggagcagtctgccagcaaggttcttcatgacatccagattccccggtaatgtaaaagggcagcaagttggagacagagcattccgactgtgggtaccaggggtgtgggcgtatcttaccgcaccgttcatcagttacaggtggttgaacgaactctacaggttagcgtccataccgaatgtgattccc

SEQ ID NO: 530907 - DNA, 328 bp, Homo sapiens
gtgatgttatcgcccaacactttggaagcaaggtgcaaggatcacttgaggccaggcatttgagaccagcctgggcaacataggagaccctatccctacaaaaatttttttttaattagctaaggatggtggtgcgcacatatggtcccagctactcaggaggctgagatgtaaggattgcttgaacccaagaagttgaggttggactgagccatgattgtgccactgcgctccagcctgggagacaaagtgagatcctgtcaaaaaaaagtaaaaaattttagaaaaggaacatctactatgtgctaattgtgcgtgttggggataa

SEQ ID NO: 530908 - DNA, 429 bp, Homo sapiens
  misc_feature (269)..(269): n is a, c, g, or t
gctagtactgtgcctggtgtggtgcactgtaggactcagataaatgctcgtaagtgcgtggcaagggaggtgttctgggaggtcagaagtgcaatcccaaaataaggctcctgcaagctttctcctccttccttccagacatgcatgtccctgactccgtgacccgagactgataagagcaagttgacctggttccataacagggtactcataaaagcatcgtgtggaaaccaagattacttcgaatccggccctcacccacgatattntttaaacccaaatggcaagatatgttgaatccaagaatgtctcacaaacgtggacgcgcaagtgttctagtgtcataaataccaacgcaacgcactattgaaatattcttgacaaaactaacaatcgaagagtgttgaagttgccaaataaataaaaaaa

SEQ ID NO: 530909 - DNA, 844 bp, Homo sapiens
cgcgagatgtcttggtggtaggcaattcctgtcaggaactcttggaaacaatcgccaaatgccctctttgttcgaaaactctcctcgtggtcataccggccaagtggatcaagatggctcgatctgaactctcccctcaattctggaatacatcccgtggttagtatccaacctttggtggcccagcgcttttactctcatggggggaaacaccacaaggtggagcgcccgagttatcaccctggcagctcctggtaatctgttcccactttgcaaaacgttgtttttcaaaagtcgatattccccaaggggaatttcacttctccccctcaactcgtgggacccttatttgtgggtcttattaaatacagcggcttccctcacaccctgtagttattgaaagcccgaggagtgcacgaaaagactttcggtttaacaaagaggatcttcttaaccgactaaaagatgggtccgagacacagactgtcatgcatgccctctttatatgtgagatatccccccgcggggggctcattgcattctaaaacatccttagatataaagtgggcacccccgcgacccctctgatacatgagtcttcacccagtatgccaaagaatggtccgtccggcgtcaatgttaaatccgtggtaccaaaaggtggttttcgtaaaaacaggcaccgcatgaaaaagtttgcatccaatcagaccccgcttttacacactgtgggcacaacactgtgtttaggtaagaaaccagtttgtcctgttgcacgcttctctatagtgttgttacccgcgggaactaaaatacaatttgtaaaaaaccccacaacataaca

SEQ ID NO: 530910 - DNA, 306 bp, Homo sapiens
  misc_feature (38)..(38): n is a, c, g, or t
  misc_feature (41)..(41): n is a, c, g, or t
  misc_feature (105)..(105): n is a, c, g, or t
ctcttttttttcccccccggggggagggggggggaaanaanccttttttccccccgcccccccccccggttttttttatgggggggtgggggggccccctttttnggggggggttccccctgggggggccctgggggccccccggggagggggacacctttggggcccccccccggggggggggtttttttttttttttttttttccccggggggggaagggggggtttttttttttttttttcccccccccccccccaaattttggggggttttttttaaaaaaaaaaaaaaatgtgccccccca

SEQ ID NO: 530911 - DNA, 297 bp, Homo sapiens
  misc_feature (54)..(54): n is a, c, g, or t
cggcacgagaaatttgcccacagaaccctctaaatccccttgtaaatttaactnttagtccaaagaggaacagctcttttggacactaggaaaaacccttgtagagagagtaaaaaattgaacacccatagtaggcctaaaagcagccaccatttaagaaagcgttcaagtgcaacacccatacctaaaagatcgcaaccatttactggactgatcaaacagatggaccatctatcacctttgaagactaatgttgttagtgactagaaaccatctctcgctaagcctccgtcgata

SEQ ID NO: 530912 - DNA, 1019 bp, Homo sapiens
  misc_feature (59)..(59): n is a, c, g, or t
  misc_feature (93)..(93): n is a, c, g, or t
  misc_feature (96)..(96): n is a, c, g, or t
  misc_feature (145)..(145): n is a, c, g, or t
  misc_feature (153)..(153): n is a, c, g, or t
  misc_feature (159)..(159): n is a, c, g, or t
  misc_feature (194)..(194): n is a, c, g, or t
  misc_feature (205)..(205): n is a, c, g, or t
  misc_feature (207)..(207): n is a, c, g, or t
  misc_feature (242)..(242): n is a, c, g, or t
  misc_feature (285)..(285): n is a, c, g, or t
  misc_feature (360)..(360): n is a, c, g, or t
  misc_feature (383)..(383): n is a, c, g, or t
  misc_feature (393)..(393): n is a, c, g, or t
  misc_feature (396)..(396): n is a, c, g, or t
  misc_feature (425)..(425): n is a, c, g, or t
  misc_feature (428)..(428): n is a, c, g, or t
  misc_feature (437)..(437): n is a, c, g, or t
  misc_feature (445)..(445): n is a, c, g, or t
  misc_feature (456)..(456): n is a, c, g, or t
  misc_feature (470)..(471): n is a, c, g, or t
  misc_feature (486)..(487): n is a, c, g, or t
  misc_feature (494)..(494): n is a, c, g, or t
  misc_feature (498)..(498): n is a, c, g, or t
  misc_feature (503)..(503): n is a, c, g, or t
  misc_feature (521)..(522): n is a, c, g, or t
  misc_feature (530)..(530): n is a, c, g, or t
  misc_feature (568)..(568): n is a, c, g, or t
  misc_feature (581)..(581): n is a, c, g, or t
  misc_feature (592)..(592): n is a, c, g, or t
  misc_feature (596)..(596): n is a, c, g, or t
  misc_feature (622)..(622): n is a, c, g, or t
  misc_feature (625)..(625): n is a, c, g, or t
  misc_feature (633)..(633): n is a, c, g, or t
  misc_feature (637)..(637): n is a, c, g, or t
  misc_feature (642)..(642): n is a, c, g, or t
  misc_feature (653)..(654): n is a, c, g, or t
  misc_feature (671)..(671): n is a, c, g, or t
  misc_feature (694)..(694): n is a, c, g, or t
  misc_feature (709)..(710): n is a, c, g, or t
  misc_feature (734)..(734): n is a, c, g, or t
  misc_feature (737)..(737): n is a, c, g, or t
  misc_feature (762)..(762): n is a, c, g, or t
  misc_feature (821)..(821): n is a, c, g, or t
  misc_feature (928)..(928): n is a, c, g, or t
  misc_feature (938)..(938): n is a, c, g, or t
  misc_feature (941)..(941): n is a, c, g, or t
  misc_feature (1004)..(1004): n is a, c, g, or t
ccggggcgggaaaggagggggaggggataggcctgagagaagaaaggcggggcagaatnggacgacggggaaaagggcctagagggggggaangcnagtaaggcaaataagacaaattatcatgttggtttactacatcaccagngaacaggngagagngggatgggtaaaaaagaaaaagggagaccgcaaangtgtagggtangntacaatcagcgggggggtatgggggggggaggggngaaggggggggggggggagggcaggggtaggcaccagagccgnggagaagaagcggcaaaaaaatggcggaggatgcgcactgggaaaggggggcggcggggggccagggtgctgggnacgagcaggaacacagacagtgnactcgtgtgnatnacggaaggtgtgagggcgggagtcgtgtncanaaggtatgngcaagttntacaaaagcanatatctataatctnntgtatctatttgtgnntatttgnggantaaantggtgtatgttatactgnntgcgaatnggattctggtaaaatataaagggattacacttaaaatntttggtatttaanagtaagaaaangatnacatttttacctgttagatgaactgncantgtgtacntcantagangttaatcccanncaaatcagattggaganaataaattgggggaatgtggganagatgtccaaaaagnnggtcaggaattttggagtaggtantgngcctgtctgggacaacattttaganccctctgacagattatttttcattgaagtctgatttcctacatcctggaatattcatgnttttctcattctacagatattttgtcttcccccaaactaaaaggaaaaaaaactaccctttactctcttttctactcagttactcttttgtgctatgttagaaactngaaatatatnggngatggggggatttgtccctgactgcccactgtacaggacagagagtacagtgttcagttggantcaggactccggttt

SEQ ID NO: 530913 - DNA, 744 bp, Homo sapiens
tgtcttgactctttcacagctggcatgaaggtcaggcagggaaatctcaaaaacacaacctgtgtattcccagactattaatcatagaaaatcacttcaactggattacggtcttgtacctggcagaaaggctgttatgaacattggaattggatttttacacttgatatgacacttccttgagtcagatcagattcgtgtttgatagactcttgccaaaaaattgctccagggtctgtgcagtagctaaagcctttttgttgttgttgttgttttaaaagcagcattaaatgttttcatgaagaccttcccagtcgtgattttattgggaatatggtctttatctctggtcctgaataactcacactgaggaaacctctaacaagtgttgtattggaagatgtctgatggatggttggttttaataacaaatctcttccctttttctgtcccctgtgttctattctcttttctctacacattattctgggaggattcacctattcccaaagtcctttcctctttatttccatttcagagctctctgtataactccaggctgacgaatccaacggcccagtttttatctccacttggctgtctttcttgcattgacctcatcttaccttgcctctcatgatttcctcttctgcctgggctcatcacatcagattcacaccacatccacccagcttccaaaacacctgggcctcctccttcattcctccctctgtctcagtcaag

SEQ ID NO: 530914 - DNA, 338 bp, Homo sapiens
  misc_feature (10)..(10): n is a, c, g, or t
acttccttgnacctctcagcagcatttgacacaattgatcatcttctctttattgaaccattctttgtcttgacattttaacctcaactttttttcatacatttttgcaccctactcagtacttcacctccttttgctagttctttctactctcacctcagaatttaactcatcggatttctttaatttgctcagtcctcattcccattttcttttcccattcataagtttctgcctcatcatccagcaagtccatatttccctttttgttccttaaaattcgtttctttgtgccctttccctcccatccaccaacaggcaaaacactcatttcattg

SEQ ID NO: 530915 - DNA, 105 bp, Homo sapiens
tcccggagtgcagcgacggaattggcattgaattcttctgaactgagatcgtctgagtgtatcgctgagtccactactgatggagctgctttcatcccagccgga

SEQ ID NO: 530916 - DNA, 542 bp, Homo sapiens
cccataaactgccccaaagtgcaagcggtacagactcactatgaaagtacacgtaaaagaggcaaatatcaaactagaattaaaactcaccatgaaacagcacaaggaacctatacaagtaaactcactatgaaatagcacaataaacctaaaaggaccccagaatagcacaatgaacgcataaggaccccagaaataaacctaactactaaactctaaataaaacctaaacctgaagtcgaagtaaacgctaaatcgctgaccgaactaggacctaaacaatgaacctatacaactaataataaaaactgaacaaattaacctgaaaacgaagacccaagtcaataccacaaaactaaattcgggaaatgtaagagacctgatggtgatatatagtctcatccatgatagtgaaaacgggcccctatggtgagcgaatctatcacccttgatggtacgggacctaatggtacctataacccttgacgggaggagaagaaaaagcgcgaaaaaacgaaccagggccgcgggcagtctaccaa

SEQ ID NO: 530917 - DNA, 559 bp, Homo sapiens
ctctatctctgttctcaggaatccagttctcaaggttaatagaattggactatcccataattaccatttgtttgatctcgttacacaggcagcactaacaccagaataacactgatgttgccatcagcagtcacacgactgaaacatgaggactgccctgcacgtgctgctccgcagcctgctgatctaacggccgcgcccgcgtctgttgcttgagtcaccacggctgttacatcccgtgctctcccttctctgccttcttggtgttggttctgcgggcgactgcccatgtggccctcagccccatcctctgttcatggctctctgccactcttgttgtccaaagctctttctctgtaggttccatgggaagagctcatgggaacatgatcttcgacctcatgcttgctgatcatagtttattgtgccttttatcgttgatggttttgctggttacaggattcttggctgacatttccttgagtgtcttaagttattccatattcttctggcagagagttgccagatttagcaaaaacaaataaacaggatgccccga

SEQ ID NO: 530918 - DNA, 412 bp, Homo sapiens
  misc_feature (5)..(5): n is a, c, g, or t
  misc_feature (137)..(137): n is a, c, g, or t
ttaantaactatcctcgggaaactgattccctcccatccctgaaacaccttaaacaaccggaaaaatagcccaagacccagacaagtcctgcctgtggggacaattagataaaaggaggcctgcacagtggcctcanacctgtaaacccagtgcctctgggaggcccaaggtggaaggactgcttgagccccaggagtttgagaccagccctgggtaacacagcaagaccccatctctacaaaacatttttaaaaattagttgggcatggtggtatgtgcctatagtcctggctactcaagaatctgaggcaggaggatcactggagcccaggagtttgaagttgcagtgaactataatcatgccactgtactttagcctggacgacaaaggggactctgtctctttttaga

SEQ ID NO: 530919 - DNA, 1060 bp, Homo sapiens
ctctatctctgttctcaggaatccagttctcaaggttaatagaattggactatcccataattaccatttgtttgatctcgttacacaggcagcactaacaccagaataacactgatgttgccatcagcagtcacacgactgaaacatgaggactgccctgcacgtgctgctccgcagcctgctgatctaacggccgcgcccgcgtctgttgcttgagtcaccacggctgttacatcccgtgctctcccttctctgccttcttggtgttggttctgcgggcgactgcccatgtggccctcagccccatcctctgttcatggctctctgccactcttgttgtccaaagctctttctctgtaggttccatgggaagagctcatgggaacatgatcttcgacctcatgcttgctgatcatagtttattgtgccttttatcgttgatggttttgctggttacaggattcttggctgacatttccttgagtgtcttaagttattccatattcttctggcagagagttgccagatttagcaaaaacaaataaacaggatgccccgaaaaaaaaaagaaaaaaaaaaaaaaaaaaaaaagaaaaaaaaaaaaaaaaaaaaaaaaaaaaaaaaaaaaaaaaaaaagaaaaaaaaaaaaaagaaaaaaaaaaaaaaaaacaaagaaaaagaataaagagtggggcgcgcgcgcggggcgccagccgagagaagaaccagctccagaaagcacactcggtggtgcggcgggcgcgcggcccgaccacatgcttagaagacaaggacaggtccgtcgaactcgggcgggcatagagcaaagtatgcgcgtctcgagaaatgacagtcggggtgggggcgtacctcgcccgggcaaaaaaaagaagccgcgcgcggtggagggagggagccaaaaaggcctgtggcaagaaaaacctaccacgccggaagtgggtggtcgtcagggaggagggacgcgatgcgtgggaagtccacatacgaggggggaacgcggtggtcgaagcccaattgcaattcaaaaaagcaacccggg

SEQ ID NO: 530920 - DNA, 318 bp, Homo sapiens
  misc_feature (239)..(239): n is a, c, g, or t
aggattatatggacgcgcggcgtgagggctggacgttcagcaagatcccggggcgtgcagacagtgtggtaggctatgatcatgagcgctgtcccagccaacagggcgaagagcgtgaagaacatgacctggtaggaatcccaggaagtgctggaacgaggctggtctccactaggggaccggtgcccacgtgcgagtccagtcacataaagccactggtcactggcgatggcaatggncttggattggtcacgcgggctggagacaggtcagggatagttgtgacagaggcccttggtctgccagccgcgcgtccat

SEQ ID NO: 530921 - DNA, 492 bp, Homo sapiens
gtatgtagtcctgttgcagactcagaatatggtcattctgttatcttagagccttgtaaggatggttatcttcagagagtgaacctgtaagttactaaacttcattctttcccaggaatgtgcaggtgggtactctggtttccacttcttcccttcacacccaagctatgttcactagcattactctgtttggatccccgctgaatgatttgagatgtgctctacaacatctaatcagtaactctctgtaacacagatggctcatacagggtaatcctaccaccttcgcttacttctgtgatttaggctgacatcacttatcaattacctcacttttctatctctttatgacaatgcctcatttactttttgttgtcatgcttcatgctgcacaaccaattaatcagagttgacacatgtaataatacttatttgttatcctcctctttttatgtattttttaaaaaacaacaacagctaaagaaaaaaaaa

SEQ ID NO: 530922 - DNA, 940 bp, Homo sapiens
cactacgtatgccactacgagttgcgctagaaatacacggaacgaagatagtgtgcgcgatatacttgtccagagacagttcattaggattatgcgtgctgagcgaaacagattacgcccagtggtacaatgcaccagggtgaccgacccggttagcttgcgtcgtgtgaccgtagttctgtctcgaatacatgcgcatgaaagacctgaatacagataggcgcgacgtagaactagcatcgctagtaactgccattgcatgtttagtccagcacctttgtgacaggactggactgcgtttcatcgctcttctcggactcagccgatgtcgagtctgcaaggagatctcactgctcaacgaagctaaggagtccctatgaatttgacgatcaattgaagacgcgatggctcataggtgactacgtataaaaggaatagagaagacaaaagaaagacaaagcggtccctaaggcgcagcgtagagtaccttgtgaaccacactcgcaaggcatacgctgccagaaaacagaactcatgtagaaagacggccacagagtactaggcacaactgattttacaggggaacacagcgagataatgcacactgggacactaggatgatacaaaacgttgtacttagagtgaggacaccttttacaggtcgatacacaagtaaggtggggcataagagtagatacacaaaaaggaacatcaagatagagacaacatgaaacaggatgaagaaagcagggtcgaaaaacggattgggggttgctatagattactagaggaaagaggacaaaattaatctgatcgttagataagaggaccgatgtagtgtcaaggtataaaaaagttgaaagaaaaaagtatatagtaaattagactataagttgagatacttaaggattatgaaaacaacgttgaacaaatttttcga

SEQ ID NO: 530923 - DNA, 412 bp, Homo sapiens
ttaatttttcccaattttaaaatgaattaaaaaaagaaaattgaaaaagttgggatgtttttccccccccaaatgtcctgttaaaatgtgacccccgtgttggggggggggctagtgggaggaacttgggtcatggggggggacccttcaaaaaggggtttggggggcccccccagtaaacagggggttccccctttatgggttcccatgagattggggggtttaaaaaacccccgcccacccccccttttttttgttcccttttgccatgggaaaaaaaaaatccccttttcccttcccccaagatgggaagtttcctggggattcccgcaaagccaagcggggggggggggccaggttgggccagcccccaaaattgggggccaaaaaacccctttttttttttgaatta

SEQ ID NO: 530924 - DNA, 154 bp, Homo sapiens
ttgactcatttctaaatatttactcctcattatgataattagtttaatatatttttaggcctctacgacccaagctaagtcctcatatcccctgtgacctgcatttacacatccagatggccggttcctgccttaactgatgacattccaccac

SEQ ID NO: 530925 - DNA, 178 bp, Homo sapiens
cgacgagactgagtgacgaggatggtacgacggaagacacagaagaaggtgcagagagaacaggagaagcgtcatcctctgatgagggcagcgacttccagcagtagctcatcagagtccgacgatgacatcggacgtcgcggcaggagcagctcagaacgctgccctcctggcagca

SEQ ID NO: 530926 - DNA, 447 bp, Homo sapiens
  misc_feature (27)..(27): n is a, c, g, or t
  misc_feature (160)..(160): n is a, c, g, or t
atctctacaaccacagggcgaaactanttggtgtttgggtggtggggtatggtcccccatcccaaatatcttggagccctcatcagggctcggggtgggtccttgcccggcggggggtcacacctggtgccctattttaccctcctttatttccccgggntgttggggccccgtgaggcccgggataagcggcagtgcctcaaaaagtacggcctggcctggcaggagaactgcgggggtgtgcctttccgcataatgccctacatttattaaaggggctccccccccccaggtggggggaggggcccatttatcccccagcacccccaggaccaggagccttgacccccttgggattcaagggcttgccccccccccagccctggggatgaaccccctcaaaaaaaggggggtttagagcaaggaaaaaaatgaacccgggggcca

SEQ ID NO: 530927 - DNA, 139 bp, Homo sapiens
actaaggcgagctgctgtggccacattcctgcattctgtgcaggtcccgaattcacccccaagtctggcgtcaagatccaggccctgcaccagttctgctgcatcctcctcattgctggggccgaggtggccggccatg

SEQ ID NO: 530928 - DNA, 135 bp, Homo sapiens
tgttacctttcctgagcgtcggtctacgtgacagactgtagctactgtacaactacactaacctacgtttacacttaacctactgcgactgttaacctacttacttacctacaacttttacaccacttttccaca

SEQ ID NO: 530929 - DNA, 224 bp, Homo sapiens
gctcgtaccccatttacagcgtagggatcgaaatttcgacacttacagacttgggcacatgctttaaatcacatatgcgattttcacacgtggggaaccttaaggtagtgcaacggcactgttaatcacccagggtttttcctttccctgatggaaatgtcgcacacaattgtccgatgactcctttgataccacaaggacagcgccaaccccacagttaaatg

SEQ ID NO: 530930 - DNA, 704 bp, Homo sapiens
cgcgggtgaacgggaggctgcaggatggtcaagctgacggcggagctgatcgagcaggcggcgcagtacaccaacgcggtgcgcgacgggagctggacctccgggggtataaaattcccgtcattgaaaagtctaggtgctgcgttagaccagcttgggatggctagtgattttgtcgtgaccaatgagatcaggaaactggatggttcccctttgttgagaagactggaaaacattgttaggtgaacaacaacagaatatgccgtataggtgacgggacttgatcaggctctgcccttgtctgacagaactcattctcaccaataatagtctcgtggaacttgggtgatcgtggaccctctggcatctctcaaatcgctgacttacctaagtatcctaagaaatccggtaaccaataagaacgcattacagattgtatgtgatttataaagttccgcaagtcagagtactggattcccagaacgtgaatcctaaaagagcgtcaggaacgcacgatgaaacattgttcaggggcaaacggtggttgcacagtttgcacaatggatatttgccaggagaagcaaaaatttataatccaggtgctggttttgccaactgaccaaaaagaaccggttgcgccatctccaggggatgtagaagcaatcaaggaatgccatagccaaaatgcttacaacttctggcta

SEQ ID NO: 530931 - DNA, 350 bp, Homo sapiens
cattgaactcatagtcgttttatttgcaaaaaaataaatatttctattttgaaaagcatttaggccgggtgcagtggcttatgccggtaatcccagccctttgggaggccgaggcaggtggatcacctgaggtcaggagttcgagaccagcctgatcaacatggtgaaaccccttctctactaaaaatacgaaagtagctgggcatggtggcagatgcgtgtaatcccagctactcgggaggctgaggcaggagaattgcttgaattcaggaggcagaggttgcagtgagccgagattgcgccattgcactccagcctgggcaacaaaagtgaactccatctcaaaaaaa

SEQ ID NO: 530932 - DNA, 1347 bp, Homo sapiens
  misc_feature (1064)..(1064): n is a, c, g, or t
ggtgccacccacccggagccggtgagtgcagccgcccgccctccggtagatctgcggcctggcggagaagtcgggaggggacagtgaagggagggctgggcccctgggcccatcctccgtctcagcctgactgcggaggtgcatgcccactgcctgtgaggccccacacgtgacccgtcagaaccagcgtctgctgcctccgtctcacccggtaaccctctgaggcatgagttgggcaagatgcaagtcggtcttaagaccaccgccaagcttctgggacacctcgtggagcaaagaacggctgggaagcacaaacccacctccgtcttttcccattggctgtggcagccacgcagaccagacactcgcgagcaatccatcaggggtaacgaccccccagaggccagggggaaggggccccgggaagagggctagggggcagccgggaccattcgtttccatgcgggagcgagtccagatatcagaaaggctagccccgtataccaggcggttccatcacttcgtttctcaaacggggcctggttgtggccatgaaagcggcgagacatttggcccttccccacaacccttggatcccaagtaccttcgcatcagacaaagattcccaccatatacaagcggaagacaccgagtgggccgccgcaacgggattggactaccccgccgcaagccacattgtgcagccgacacggggcacaacgttcgtggggtgggccaacttcttttccacagcgaatgtgtgcagcagggcggccatatatctaggcacgcaacgacaaagcaggcagctttgattgcacccggccggtatgatagacacaaatgcgacaggtgcgaacttcacaaggtgggcgaactaccgcccaaaaggcgtggggatatctcaaacagttggggcaaatttggacccccagcgcgaagaacgggtgggagcatcccagtgcatacagagcgccatcggaacgaggggaccaacacagttcgttgcccaagcccccaactagcagaagcaggaaaccccattaccagcgcgaaccgaccanagtatacggacatgagacgagcactaccaacgacaccacgagacatcggaggatccacacacacgcaaaacgaagcggtgcggggaccccagacgcacaacgacctagcagctcagacacacgccctatcacaccagcagcacacccagggcaccacagagactacactggtcgcacagcagcgacgcctccgacggagcagtggacggccctccgccacacgaggggagcacccaccgcccccgagcggggaactcaccacacggtggcggcaacaccgcgc

SEQ ID NO: 530933 - DNA, 2622 bp, Homo sapiens
cggtacaaattcgacaacggtaaaacagcatttgaaacagaattagaacgtatgctttactcaatcagtgacgcaggctttgaaattccagacgttgattttactttcgacaacattgaccaattcttgaagtcaaagcaatataaggcattcattcgagttcgtccacaaaagaacaatccagaatacactgaagctattttcatctcaaaagaacaattcgacaaagaaatcgaaaaacaagcaaatgacgcatttggtgacgtagttgacccattcgcaacagctacaccagtaacagacaacccatttgcttaataaatgcccttttatagggcgtaaataatcgtgcgctatccacgttaaaagggtaagaaaaggagtattatcatgaacacaaagaagttagcagtaacaaatggagtagtaggacttgtcggtggaatcgcactgttgttaggtggttggatcgtattgtattcaggcaacaggtggaacaggacgttcgcaattgtaaatgtgttattcttattattgaaaatcgcaacgcttgttcttggtattgtaggacttgtacaatttagcaaggaagcagttatcacaaaggcacctagcgtattactagttgtcggcggtgcattggcaattatcccattcatggggtggatcggtggtattctttcaatcatcggtggttcaatctacctagcaatatcaagaaatttaagtaacaaaatggcgtttatcgccgtacatattaaaaaaggagaccatgacatgattaacaattcgtatctattaaaggcagatttaaagcgtgaaaaggacattcctttaatcagccgtgaaagtattatcaaattagctaaggcacacgaacgtggcgatgttagatatttaaatgaagcagaaactaatgtatacgacttactgacaaaaatagaagtaaagcggttagctagtctgtacaagtcatttatttttgatttctcaattgaagatagtacagtgtcatacactttcgcagatattgaagaagctatacgtgataatatcggtgtcaaaaacaagcgtttgctagaagatagtactaaccttatgagtgatattatcagattcgcagtgacaccagttgattatatatttgattttcataaaaatgacaatggcaatttagaagtacaacgtgatcaagtattagaacgatttatcgaagttcttgaacagcagacgtatgaaaacgtatggtctgacttaatgaaatatccatttgacaaccagacacacgggatacgcaaacatttaatgctcggtgtcgcagcgtcaacaggtaaatctattatccttgaagctattggtaagttatacgaagcgtcagcttcattcaaatcaaacagacctgaaaacggctttgacgcagcaaattggaacgctgacattattgataagtttgttgtattgcttgatgatgataacccaaacgtctcaatcaacgaagactacctgaaaaacttcctaagcaataatatgccacaacaattagcacgcggtggcggtcaacgttggtcagaaatttattacgggtcatcggttatcgctttaaacacagcaccagacttccttaaaaaccaacaaaacaataagcgtgtcattttcttgaagttgacccagtcaattgaagaaatgttcacgtcagaagaattaaatcatttacacaatttagagcctaagcacatcttgggttacgtcaattcagaaccaacaaagttgtttaagtggcgtaatgactggtcaggcgttattgaagacttgaaagaagatgttaagcaacacatctcaatgcgtggttacgcaagccttaatgaccttaaaaagacgtttggcgacaaagttatgcgtgactatcaacgaacggttgaaaaggctaaaaacatcacagtaaacggtgaagcgttctacggtttaagacaagacgcaatcattgatgagccttatcgtgtcgatcaactaacgtttagtgcatttatcaacttacatgacgtgattggcgaacgaaattttgaaagccttgacgagtttaaaaacgatattgaagaatacggaaagttgaagaaagaagagcaaccactattcagtccagctgtttatcatgacgagttgaccaaagcaaatctaacaggctttgttggcgttgttctggatattgacggtgcaaacgcagcagacatggacgagctagaagataaaatcgctatgactggtatatcagcagttgcttgggaaacggcatcaagcacaccgtcatcgttgagagcgcgtatttggttctatcgtgtcggtggtggtttggaagaatatgctagtctagttaaaaagattgcgatgaagattgacgagccatttgaccgtgctagcatgccagctgaacatcgtttcttcattggtggtacaaatgtacgcctaatcaatacagacagcacagccgctgaaaataagccaatgacagacatgaagaagcgtgggctagtccgtgcagttcagaatgctaaggacggcgaacgtgagcagataacttactgggcattaatgcgagcagagcaagaaaacggtggaaaagaattc

SEQ ID NO: 530934 - DNA, 394 bp, Homo sapiens
  misc_feature (197)..(197): n is a, c, g, or t
atgagcatgtagtcatgatgcagaaccttttttttttttcttcgtttggagaacggagtttctctctcttgcccaggcgggagtgcagtggtgtgatctcggctcacgtgaagctccacctccggggttcacaccattctgcgtcagcctcccaaaatagcgtgggaataacgaggcaccgtgccacacacacccgngctaatttattggtatttttagtagagacggggcttcaccatgttagccagcatggtctcgatctcctgacctcaggatccgcccggctcggcctcccaaagtgctgggattacaggtgtgagccaccgtgcccggccagatgttagaatctttaaggaagacctcgtcgatcagaattcaggaggaagtactaaag

SEQ ID NO: 530935 - DNA, 222 bp, Homo sapiens
ccaggctggaacattcgtttcccttcaattgggtgggtaactcaatggtacggccttaatcgaatgactaggactagcacagccgctgaaaataagccaatgacagacatgaagaagcgtgggctagtccgtgcagttcagaatgctaaggacggcgaacgtgagcagataacttactgggcattaatgcgagcagagcaagaaaacggtggaaaagaattc

SEQ ID NO: 530936 - DNA, 703 bp, Homo sapiens
ctcagacgaggccacaggtccccggtcatcctcacctgcttctgaaacctggggcgctgtggtgggaaacagcccagacaggctgtcctcaacactctctactgcaaactacacacagttttacgtcgccagaaagaccccaaatttctattcacataaagaccgataccacgatttcaagttccacgccgaaccgtcaataggcagaggacaaagaggacgagtgtgccccatcctgtaactttcactttccttcaggtgacctgatgaacggccatgacggcgcacgacggtccaaccgccatgggggaacagggtcatgccagccgacatgccgagccagctgagctccaaatccctcgacatccgtcactcgcgcagaaagaacgaaccgttgccgctatccggccatcaagggtcacacgcggccctgtccagaacgcacacgccgcgggccagcccggcaaccccaagagaccgccttcggtcattctcgtcccgttcctccatgaaagaagcagagcccgttggaatggccttccctggccattcaaggcaacaaggcgcgtggtccacccctttcgcttccaattgcccttggcgacacctttacaaaccgttccggagctggcccccaagccacttggttgcccccaaacgcgcgggagccccttggcgcttttaaagggcacacgcgcacccg

SEQ ID NO: 530937 - DNA, 122 bp, Homo sapiens
ggggacaatcacagatctgatcaaggtacttgactcgcagacaatgatggtcctggtgaattacagtcgtgctttaaagccaaatgggagatgccctttgaccccacaagatacatcatcag

SEQ ID NO: 530938 - DNA, 107 bp, Homo sapiens
attcgcgaatacacaccatccgcgacccagatcctgtcatcaaggtgcccgatactgtgcagattgatatagggactggcaagataatcaagctttatcaatatttg

SEQ ID NO: 530939 - DNA, 966 bp, Homo sapiens
aacttatggctagtagagccggtgttaatcaggccgaggggccttgaggagctgctttcagcccaccgctgcactgtgggaagccctttctgggctggccaaggccagagccggctccctcagcttccaggaggtgtggagggagaggctcaagcgggaactgggtgctgcgtgcggctgcttgcgggccagctggagttccgggcgggcgtgggcttggcgtggccctgcactcagagcagccagccggccctgccggccccggtgcagtgaggggcttagtacctgggccatgcagctgtggagggtgtactagggtcccccagcagtgccagcccacccggcgctgcactctgatttctcacctgggccttagccggcttcccatggggcagtggcttgggacctgcagcccgccatgccctgagcctcccacaccccctccatgggctcctgtgcggccgagcctcctcgactgagcgccacccactgctccacaggacacccagtcccaatcgagcacccaagggctaaggagtgcgggcgcaaagcaggagactggcaggcagctccaactgcaagacaccgagagcggggattcaccagggtgaaagccagctgggcatccatgaatctggtggggcttaggagaacctttacaaacccatgaggctaaagcatacaatacacccaaaacagggagagaccatggataacatagactacaaaggagtttggtagaagacaaccaaggaaaaaggaacccaaagaagtaaaaaaaatcaagagggaatgtaaaattgcaccaaaatagacaacatctgtatcataagcatggattcaagaaagaaggcacggaaaaaaacgtataaagaaaaagctcaaggggataggagaagaaaacaaaaaaggagacaataatctaagatcaagggtaagagaacaaacaacaaagaccgagtgtct

SEQ ID NO: 530940 - DNA, 606 bp, Homo sapiens
tcattaaacactgcatttgaacattacatttatctccattagcagaactgggatccttatttagaatcttttgaccacctatcctgataatctgcttcctttctgaaatgaaatggaacaggaatgaaaatgtgctttgctattaaatgtcatgggcagggagggactttttcagcttccctaaactaatctcaaactccaggcagcatttttattttatgattatagacataagatccaatgtgcacttgcgtgcttaactttaatactgcatgcaaaataggggcatcatgaaattaattaggacatttatttgcagccatgagaaagaaaacacattactatgtagcaattgcctgctatcctttaggtggcagtatgaagtaaggagaggctggctgtgatagttactgcataggatctcttaccaacaaacagtcacaaggaaacacaaatcagtttcctgtcagacatggccttcttgaatcttctgcattctgattcctttctctacgggcacgttcctagtttgaattccacatacatgcccctgaatcttgtccattattgcgccatttccctttggtccacacacggtactctccg

SEQ ID NO: 530941 - DNA, 110 bp, Homo sapiens
tgttgatgggggctatagctgcatccgaggtgctggtggacagcgcggaggaggggtcccttgcttgcggcggcggagtggccccttcaagaaggcggggacaaggaggc

SEQ ID NO: 530942 - DNA, 332 bp, Homo sapiens
ttgcaacagcagtgagtgggcccacacattccttctacagagaatttctatgaatgcccactcacttgccgagttccagggccaataggaccggatggtatgcatatcccgccccttgtatatgatttgcttccttttggttactaggtcttcgtatgtgctatgtccgcgtgtcagcgaaacaagcacttactgtgtggggtgccgcccgcctgagtggtaatctccttggccagcactagtcccttttgttcgttcaaccatattggccaaattcctttccatcccaggatcacagtatttgctgttccctctgtttgcttgttccgctg

SEQ ID NO: 530943 - DNA, 438 bp, Homo sapiens
gtactctgggggctgcggtagttgaccctgattccagtgacacgatgacctgactgggagtcagatagacatgcaaagagaggacaccctagaacttcttcctgaagtggctcttagcttatattctcagcagagttcattctggtgaggcaagacgtagaatgtcatctttcactctaatgctttttataccatagatatgagacaactagcctgttattcagaccaatataccccccatggttttcccccaatctccctagcctctgctgcgagaagttctggagaagcagccagtgctaagccagaccgagacccgcgacttagtagaacgctgcatgcaagtgctgtactaccgagatgcccgttcttacaaccgggtgagggatgtgctgggaacctaattggcgggctctggctacttgcaatccccggtcg

SEQ ID NO: 530944 - DNA, 99 bp, Homo sapiens
attctgaatctttaatgaaaatcagcccagagcttgttgtaatacagacataactgcaagagcatgcccacagcttagagaggttgtaccaaatttaga

SEQ ID NO: 530945 - DNA, 971 bp, Homo sapiens
  misc_feature (13)..(13): n is a, c, g, or t
  misc_feature (16)..(16): n is a, c, g, or t
  misc_feature (21)..(21): n is a, c, g, or t
  misc_feature (80)..(80): n is a, c, g, or t
  misc_feature (127)..(127): n is a, c, g, or t
  misc_feature (196)..(196): n is a, c, g, or t
  misc_feature (201)..(201): n is a, c, g, or t
  misc_feature (205)..(205): n is a, c, g, or t
  misc_feature (233)..(233): n is a, c, g, or t
  misc_feature (278)..(278): n is a, c, g, or t
  misc_feature (324)..(324): n is a, c, g, or t
  misc_feature (326)..(326): n is a, c, g, or t
  misc_feature (357)..(357): n is a, c, g, or t
  misc_feature (359)..(359): n is a, c, g, or t
  misc_feature (376)..(376): n is a, c, g, or t
  misc_feature (403)..(403): n is a, c, g, or t
  misc_feature (419)..(419): n is a, c, g, or t
  misc_feature (439)..(439): n is a, c, g, or t
  misc_feature (470)..(470): n is a, c, g, or t
  misc_feature (508)..(510): n is a, c, g, or t
  misc_feature (512)..(512): n is a, c, g, or t
  misc_feature (527)..(527): n is a, c, g, or t
  misc_feature (581)..(581): n is a, c, g, or t
  misc_feature (628)..(628): n is a, c, g, or t
  misc_feature (634)..(634): n is a, c, g, or t
  misc_feature (689)..(689): n is a, c, g, or t
  misc_feature (698)..(698): n is a, c, g, or t
  misc_feature (707)..(708): n is a, c, g, or t
  misc_feature (724)..(724): n is a, c, g, or t
  misc_feature (739)..(739): n is a, c, g, or t
  misc_feature (756)..(756): n is a, c, g, or t
  misc_feature (811)..(811): n is a, c, g, or t
  misc_feature (879)..(879): n is a, c, g, or t
  misc_feature (971)..(971): n is a, c, g, or t
atggaggaccatnagnacgtncccatcgacatccagaccagcaagctgctcgattggctggtggacagaaggcattgtancctgaaatggcagattctggtgctgacgatccgcgagaagatcaatnctgccatcttaggaatatggccatgatgatgcgaagagatcgcccagctgctgtctgggtcctacattnactantttnactgcctaaagaattcctggaccttctnaataggcacagaggcctccacgaagaatatttttggccgatactnttcacagcggatgaaggattggcaggagattttagtcttctgtatnanaaggataaacactctatcttatgttggactntntatgcctcctggttcgnaatgtaacatttaaaatcccctcactnaaaaagaaaattgcanaagtgccaagcatgctgcangcaaaaaaacaagccgcaaggacggacggangtgccacggcacggggcgtgccgaagaatgcgcggaannngnttcgtaccacctccntgcaacgcacgtaatggcactcacggggcgaaaaactgtcccgaaggaagaacntgcatggccccctgggtgaagggaccctgcccgagatcagcctggcntgaganttgggggcagcggcctcaggcaagtccctgtgggggaaagcccatttgacggtgntacccaggncgtcttgtnnggggttttgtggtgtntagagcccccacagnagccagggtgtttgccnaatgcctgcgtgtttcgtgccagaaagcggggggaaactctaacgggtgttacgnagtgggagggacaggggacagagcccctctgttggtgggaacgacccccacctcggaggagctttctngagcaggtgggcagaagatgcgattgactgggggcgacttttggggtagaggcagtgtctgaggggactgactctggcatctctgccgaagn

SEQ ID NO: 530946 - DNA, 698 bp, Homo sapiens
tgctcctcttcgccctgcttcgtgccctgtgacattcctggtctgtcctcctccggtccatctccttgtcttgtgcctgactacccctcgtcttcatgttttcctccctccagctacgccacttgctgggcgtattagcctcttctaggccatctgctgcctctcatctgtcggtatccctttcccatgtgccttggctcctccggattcgcatccctcgttcattgatttctcagtctacctatacgtcatatactacactgtctataaatacaacacacccttcctaaatgacagcaacttcgcaaaggattatagaaacaccagccctctcagttgaggacggaacctgtgccaggttacccttgctaattctagtaagtcagagtgtctcccttacttccaaaggatcgaactagctccccagcaatggatcctaaccagatcttagatgtctcaaaatgacagagcatagaatttagaattggatgacaaggaagtctaatgagattcaagagaaagttaaaaccaatccaaggaccccagtaaagtaatctcaagagttgaaagatgacatagccattttaagtaagaaccctagctgaatcttctggaattgaaaaaatcactactaggaaattttcaaaataaattggaagttttaacaacataatagagctaactgaagaaagaattta

SEQ ID NO: 530947 - DNA, 294 bp, Homo sapiens
tgatcattggggtgggtcacaccagtaatcccaggctcttagggaggccgaggcggggcagatcacctgaggtcaggagttagaaaccagtctggccaacatggcgaaatcccgtctttactaaaaatacaaaaattagccaggcctggtggcaggcacctataatcccagctactcaggaggctgaggctggaaaatcacttgaacccagcaggcggaggtagcagtgagcccagaatggggcactgcactccaggtggggtgaccagtgaagccccaccccgtcgggtggag

SEQ ID NO: 530948 - DNA, 782 bp, Homo sapiens
gccggccggtctaagcgggagtctcgcggttccactcgcggtaagcgagagtctgagtcgcggtggcagctccggtcgcgtcgagcggtgagcgagatcgggagcggtgagcctgaggcggcgagctcccggggcagccctgtgcgcgtgaagcgggagtccgagccggcgagcgcgcgcgaggccccggtttcggttgtcccgtttgtgctgggtgatagcgggatgcgctgaggtcagatggaggactcggatgcctgagcgggaggtgctgagcaatgaatggccgagtggattctgaggacccggaggagcctgacactgctccgtacctggacagcattaacaggagtgtgctggacttcgacttttgagaaaacagtgttctatctccctctcacacatcaatgcttatgcctgtctggtgtagtggcaagtactttcaaggccgtgggttggaacgtctcacgcctacattcacagtgtccagttatagccaccatgtttcctcaacctccacagcctcaagttttagtgccttccatgacaacctatgagatcatcgattcctcatgtggagcgatatcacgtatgtgttgaagccagttttcacacacgcagcaaattgtcaacttggaaaagcaagccaaattgtcccgggcatatgatggtaccaccttaacctgcgggtattgtggactggtaacattattggcaatgattattgcaacgctgcctcaggggtctatctatggtctctctcgcaatacttctggcacgag

SEQ ID NO: 530949 - DNA, 194 bp, Homo sapiens
ttgcagataactgtcttgctgcatcctcacttggttttcctccatacacacacattcttatgtctcaatttcctcttcttataaggacatcaatcagattggatcaggccccgccccccaaagaactcattgtatcttaattacctctttccaaatcttatctccaaataccgttaagctgaagccacggtcaa

SEQ ID NO: 530950 - DNA, 216 bp, Homo sapiens
gcacgaatctgccacagtatagctgtctctcgtgtccaggaccccgtcttgagccctcgtcaccttgtcctgtggcacaagcagagggtcttgtcctcagatcccgggaacgtcaggaacctcaggcgggtcctcgcttcctcgatccagaatccactctccagcctccctcccctgactccctctgctgtcctcccctctcaggagaataaggtg

SEQ ID NO: 530951 - DNA, 543 bp, Homo sapiens
tcagctcggccccattactttgtcacagcacaccaacaccagttacagtgctgggtctagcaggttgttccaccactgctactgccattacccatttcacaccagctgcccaggagcctgagaagttgcccacatgtctggcccactgctgccactgctagcatctgagcaagtcacctgaaggcccaataattggccctccaagacccactaacgctgttgtcagtttaagccactctgtgggccctagcacaggctcattcaacccaccgctgccatcactagggcctgaagactggcccacctagcatcttagttcccagccaaacttcaccacagccttcactaataagtgcaccttaagtcaatgaggaagtcacagataccactgatgttgtatactgccaaataaatcatacagggatcacactactataggcactcaaaatcaaagccaaagcaccctactcaacaaacaacacgtaaaatcttcaggaaaaaaatcctcccctatgaaagcaatttcacaaatggaagaagtga

SEQ ID NO: 530952 - DNA, 223 bp, Homo sapiens
gcgcagattggatgtggataccgagcggcaccaacagcgcgcggcaagagcgcttgagtgaaaagtagatgcagtagcctctgcctcggatatagtggtgataactgtgccatctgcaggaacacatatggatcttgcatagatgtcagctatcagcgtcgctactcagagagtgtactgtcgcatgggagtctgtaccatgctttcactccactgcatcttg

SEQ ID NO: 530953 - DNA, 460 bp, Homo sapiens
tggggggaggaacacacgacacacctgttttaatttttggaacgcatgtacaatgaccagcaggatactgagattctaatgtagagactgagtatgccaccacactagaattatataaggatacgtcgaaggacgacatgcacggatatacttgctggacgtagaccacttttggaagctggacctagaccagtattacagggttacctgctacacatcatggagaccctgcctaagctggacccagaaaatggctaaatacatttgaaaaaacggacatgtgagcctgagcatcttcattgcccgaatctacgatgatccaggaagatgtcaggaggggatgcccacgctggccacagttggggccaatgattgaatagtgacatacagtgaatttaagaactgatggtagctctagccgagaccctgatggcgaggctgttgacccatcctacataag

SEQ ID NO: 530954 - DNA, 130 bp, Homo sapiens
agatccccctttcatcccttctgataacaaggagctccccaaggctgacacaaaccagcttgctgacgaatgggaagctttctcctcatgtctttcaaaatccgacatctggtggcaggacaactgacct

SEQ ID NO: 530955 - DNA, 192 bp, Homo sapiens
atgatgtgatcttggagtcgtgaaactgcttgacagccaggccggcggcaattgctaggacgcgatctccatccaccttcatgatctgaatggagtgggctcgggcgcggtgaccgggcacacatgtatcggtagcactgggtgacagcgcactgcagtggtcagagtcaccggaatccccggcacataccg

SEQ ID NO: 530956 - DNA, 884 bp, Homo sapiens
  misc_feature (42)..(42): n is a, c, g, or t
  misc_feature (73)..(73): n is a, c, g, or t
  misc_feature (81)..(82): n is a, c, g, or t
  misc_feature (145)..(146): n is a, c, g, or t
  misc_feature (182)..(182): n is a, c, g, or t
  misc_feature (200)..(200): n is a, c, g, or t
  misc_feature (209)..(210): n is a, c, g, or t
  misc_feature (227)..(227): n is a, c, g, or t
  misc_feature (231)..(231): n is a, c, g, or t
  misc_feature (268)..(268): n is a, c, g, or t
  misc_feature (326)..(326): n is a, c, g, or t
  misc_feature (339)..(339): n is a, c, g, or t
  misc_feature (364)..(364): n is a, c, g, or t
  misc_feature (368)..(368): n is a, c, g, or t
  misc_feature (467)..(467): n is a, c, g, or t
tgtaatttatagttgtgttctcattgttgtgggttataggangtttagtattctcctttaggtggggggacantgagggtnntattagtgagaagttaggagttgtgtttccattcatctttaggttttcaggtttcctccgttnnaggtgaggtcatgatagctatggataggtaggaagntgagttctgctgtggcanagaattttnnttaaaggaaaaacaccntttncaggggtcttcttccaaggggggttcccaccaccacnccttgaagtttaaaaaacagttgaaatcttgtgggagctggtctggctgctcctattngcagtcaccatcnagggtgcttagggtaagaggccctngaantgtgacctgaacggactcacagagctcgtggagtgaggaggggagctgggggaacacgggggcggagggtacagctgggtggccgcatactgcaatganggctctgggctgcaagactgaggacttggcacctcacagtcctgccagtttaggacggagctttgtttacagcaggagcagtacagcagctccatgacccggaagcagttgtccagcagggctttgggccgcaccagcttcaggtttggccctggggcattcaagagggacaacacggattccaccttggggctgacctccacatccgtgaggccctgctggacattcagcagcagcgtctgcacctcctgcaggtacttccaggatgggtggccctcgagcagcacgtcctgcaccgactcagtggcactgaggctcaccaagacccacagataccgcagctcccgctcgctcacctgggccctcagcctggtgacgttggcgattctgaacaccccctcgtaaggcacactgatc

SEQ ID NO: 530957 - DNA, 575 bp, Homo sapiens
tgactggacccacactacctcaacaattctagtattttgccccggcgaccgcacagtgaatgtggagtgccaagattctctgtaaactccacctgattctccttactgccctttgataatcgagtggacattgactcaagtttgtctatctacactcttcggggagccccttaaaacccggattagacttggagattatgcttttggttatggcttctgatcatgctatattgtggtagaagcctagtgtctgtatttttcaaattcagcacgggctttaattcctgggtaactacgtcatagctcctgctagattgatggagtgatggaaatagacaattgccattttgcagcccatcaatgaatagatggatctgggcatgagacatcgacacttggtaatatcctccagagacaataagctgttgtttgcccctgacagtagaatactttacctccaaggaagtagtcttataaaaacaaatacagctgatctgttcaagtaacaatttacagtaactacagaggacacgaaaacatggtaaaacaatgttgtcagggataccattggacta

SEQ ID NO: 530958 - DNA, 129 bp, Homo sapiens
gggaatgtgataacctaaacaacctttgctttgaaattccatttttccctctttccctgagttggattgacctacagagttaatttcctttgtatttttttaaaaaaatattaaaaatcaacggtctca

SEQ ID NO: 530959 - DNA, 328 bp, Homo sapiens
gatagacacacgcacacagatcacacacacactacagagagagagagagagagaaagagatcagctccaagcattaatgtgagtatgctgaaagcacgcagcgcgtatatgtaccaatataaagcaagaaagaggtggctcgcagtatatttaggtccttctgccataaatacgtttaatacactgttgtatctatggactttgctggctcactgagtctctcccatatgtagctataacttgtaacagtgatcaggaaatcgcattattagcacatatatcacccactgagcttcaaagaagatgaatactctttgtagccacagct

SEQ ID NO: 530960 - DNA, 234 bp, Homo sapiens
gaaagaaaagaagggatttgggccaaaagcaaaaggcggccccaaagacccggggaagggccgggggccccaggggttgaggggaattccaaagagggggaaagtggaggcccggcccggaggggtttggggcccagggaacctcccaaaaaggcgggggaaatgggctgtttggggaattcatccatggctttgtggatttttggaagggtgccttgagttccaatttggaat

SEQ ID NO: 530961 - DNA, 222 bp, Homo sapiens
acaacatgtagtcctcacgcgccaggggagcaggcttctgaggcaaggttcagccagtcaagaacaggccttatctgctcagacaagctgcggtgattaaccttactggagtaggaagtttaatgcagtcacaggcagctgcagttgcgattcttgcagcatcaagtggctatggcagcagcagcagcacaaacagctcagctacatcatcatcggcataca

SEQ ID NO: 530962 - DNA, 858 bp, Homo sapiens
  misc_feature (6)..(6): n is a, c, g, or t
  misc_feature (76)..(76): n is a, c, g, or t
  misc_feature (79)..(79): n is a, c, g, or t
  misc_feature (86)..(86): n is a, c, g, or t
  misc_feature (97)..(97): n is a, c, g, or t
  misc_feature (156)..(156): n is a, c, g, or t
  misc_feature (189)..(189): n is a, c, g, or t
  misc_feature (200)..(201): n is a, c, g, or t
  misc_feature (216)..(217): n is a, c, g, or t
  misc_feature (220)..(220): n is a, c, g, or t
  misc_feature (222)..(223): n is a, c, g, or t
  misc_feature (240)..(240): n is a, c, g, or t
  misc_feature (247)..(247): n is a, c, g, or t
  misc_feature (261)..(261): n is a, c, g, or t
  misc_feature (275)..(275): n is a, c, g, or t
  misc_feature (287)..(287): n is a, c, g, or t
  misc_feature (289)..(289): n is a, c, g, or t
  misc_feature (292)..(292): n is a, c, g, or t
  misc_feature (300)..(300): n is a, c, g, or t
  misc_feature (305)..(305): n is a, c, g, or t
  misc_feature (309)..(309): n is a, c, g, or t
  misc_feature (315)..(315): n is a, c, g, or t
  misc_feature (317)..(317): n is a, c, g, or t
  misc_feature (325)..(326): n is a, c, g, or t
  misc_feature (340)..(340): n is a, c, g, or t
  misc_feature (359)..(359): n is a, c, g, or t
  misc_feature (385)..(385): n is a, c, g, or t
  misc_feature (389)..(392): n is a, c, g, or t
  misc_feature (397)..(397): n is a, c, g, or t
  misc_feature (399)..(399): n is a, c, g, or t
  misc_feature (409)..(409): n is a, c, g, or t
  misc_feature (416)..(416): n is a, c, g, or t
  misc_feature (425)..(425): n is a, c, g, or t
  misc_feature (429)..(429): n is a, c, g, or t
  misc_feature (433)..(433): n is a, c, g, or t
  misc_feature (439)..(439): n is a, c, g, or t
  misc_feature (472)..(472): n is a, c, g, or t
  misc_feature (474)..(474): n is a, c, g, or t
  misc_feature (479)..(479): n is a, c, g, or t
  misc_feature (490)..(490): n is a, c, g, or t
  misc_feature (507)..(507): n is a, c, g, or t
  misc_feature (515)..(515): n is a, c, g, or t
  misc_feature (565)..(565): n is a, c, g, or t
  misc_feature (569)..(569): n is a, c, g, or t
  misc_feature (578)..(578): n is a, c, g, or t
  misc_feature (580)..(580): n is a, c, g, or t
  misc_feature (589)..(589): n is a, c, g, or t
  misc_feature (593)..(593): n is a, c, g, or t
  misc_feature (602)..(602): n is a, c, g, or t
  misc_feature (610)..(610): n is a, c, g, or t
  misc_feature (619)..(619): n is a, c, g, or t
  misc_feature (627)..(628): n is a, c, g, or t
  misc_feature (650)..(650): n is a, c, g, or t
  misc_feature (662)..(662): n is a, c, g, or t
  misc_feature (677)..(678): n is a, c, g, or t
  misc_feature (690)..(690): n is a, c, g, or t
  misc_feature (697)..(697): n is a, c, g, or t
  misc_feature (711)..(711): n is a, c, g, or t
  misc_feature (713)..(713): n is a, c, g, or t
  misc_feature (733)..(734): n is a, c, g, or t
  misc_feature (771)..(771): n is a, c, g, or t
  misc_feature (773)..(773): n is a, c, g, or t
  misc_feature (832)..(832): n is a, c, g, or t
agagcnaaaatgataggcataaaatctcaggtatcagaaagactcaaaaggctgtttttcactttgttcagatttngtntccaggnattaagtgtgncatacagttgttgccactgctgttttccaaatgtccgatgtgtgctatgactgacaacnacttttctctgggtctgatcaatttcccagtanaccattttacnncttacggcgtcaatnncananncctcaacatcatcagcnccaatcngaagtccttgctgnattgcgtcaaaagncctccccctatntnccnctgccatncccancaancccagncncctcattnnccccatattctgtncatgtaacaggccaagtgnatcaatgaagtctttattattctganaggnnnngggangnggggggaatntggggcngggaaaagngggngggngggggnggggggggggggggggggggggggggggggggntnggggnggggggggggntgggggggggtgggttngggtgggnggggggggggggaggggagcggggggcgggggggggggcgtggggagcantgtnctctgtgtnanttccgagcnattncaccatganttttggtnttttttcantcttcttnnaatccacaagtgcctcataaantagtcttaaaanggtgtgctttttttnnatggtgagattncagttanaaatccattttctnanttgatccagctcagttgggnngtactggatggcccacaagatgctgccactttataangntgcaatacactgtgtatcttacaggagtcttcttatcctcccgtggaaaaggttgcttnaacactgcagtctcagagacgggcgt

SEQ ID NO: 530963 - DNA, 1732 bp, Homo sapiens
cggacgcgtgggtccacggcccgggcacgcgcgcgcacggacccacaccccggcggcttctcacaatcgcacacacacatacacacacacaccagcaaacaaagggtctggacacccccggtgccagtatgacgctagcatcataaataagcacatcacgtatcagggacacacatatgtacaagcaaagactgggcaacgacgcatacagccaaagagagaacacacatcgaaggagaattactctcaccagacggaacgcacacaatacattatacacataacaacaagatactaataatacataaacacaactgtaaacaacaaacatcacctaaaacaaaaatctaaaacaaacacattatcagatacaaacaacaaacacacccacaaaaatttcaccacaaaaacaacacaacaaacaactaaaacaacaaaagccggctaccacaagatggcctcacacgtaatagacgacaagggaggagaacacaatcgaagcaacgaactcaatccatagaaaaccgtattatagaaatcacactcaccaccacaagccaactcaactacgacaagatctcatacaaaagtcactcacaatacacagccacaaacatcaaccacaactacatcgacccgcgaccacgcgaacggagaagcgcgaaaaaagaggaagaagaagagacgaaacacgtcggaccgcagacaacagagcgaagatacataccgaagagagcaaaacaagaaaaaacggaggaagagacagccgagacaagaggcaggcaaagctaacgactagtcgcaaccacaacgacgacgcacatacaagaagagcggaaacacagaactaagaacacaccaataagatgacaacatagaaagaagaacgaaaagaagacacaccactacacacaccggagacaacaacacgaccaacacaatataacaaaaataaaacatataaaattataacaaaaacaaaacatacataaacaaaaacacatcaaaaaagaaataatacacaacaacataccaaaaacaaagaaaaaacaaataaaaataaaaaataacataaacaacaacaaaatataataatataaataaactatatgacaacaataacacacaaatcaaacactacacaatattaacataaacacacatactaactaaaacctaaaacagaataaccaccagatatatctcacaataaacacaaacaaatcacacactcccaacctcaaaacactaaaacacagagcaaaacgataaagaacataaacacaataaaacaaacataccaacacatacacacataccatcatatacacaacatcaaacaactcaataaacatcaacacaacaacactccaacactcatacatacattacagcaaacaacaactacaacacatcaatacaagataaatttaaaaataatttacacacctcaataatctatatgacaagacacacaaattcaacccaatcacatcacaccatgactccaccaaacacatatacacactaaacataccactcacatcaattaaataaatcataacaacaataccattacgaacacagaccagcaacgaacaaagatcaacagacacaattccacaacaacccacttcacaattataatcaacaacatatacacaatcaccatacaccactcacaccacaacattcactctactaatgacatccaaacctatcccacacaaat

SEQ ID NO: 530964 - DNA, 613 bp, Homo sapiens
agggtattcacgcagagaatcgttctctgttggacgagggcaagagagacaggtggggccgaagggactggtgatgccgtgtctggggaaaaccttcttgaagaagctctgttgtctcgggagcatgtcttggaattggagaacagcaagggccccagcctggcctctttagagggggaagaagataaggggaagagcagctcatcccaggtggtggggccagtgcaggaggaagagtatgtagcagagaagttgccaagtaggttcatcgagtcggctcacacagagctggcaaaggacgatgcggcgccagcacccccagtcgcagacgccaaagcccaggacagaggtgtcgagggagaactgggcaatgaggagagcttggatagaaatgaggagggcttggatagaaatgaggagggcttggataggaatgaggagagcttggatagaaatgaggagggcttggatagaaatgaggagattaagcgggctgccttccagataatctcccaagtgatctcagaagcaaccgaacaggtgctggccaccacggttggcaaggttgcaggtcgtgtgtgtcaggccagtcagctccaatggcagaaggaag

SEQ ID NO: 530965 - DNA, 193 bp, Homo sapiens
cccaagtagctgggactacaggcactgcacctcacgccctgctaatttttatatttttagtagggatggctttcaccatgctggccttaagtgatccgtccgccttggcctccaaagtgctgggatttcaggcaagcgtcaccacacccgacccctcactagtatttcagcatttgggtactacgctttggca

SEQ ID NO: 530966 - DNA, 178 bp, Homo sapiens
cttcctgcttctgccgcttctgtcttctgcaaaagtggctgcttcctgcttctgcccctacttctgctgcttcctgacttctgcctccatgcggtctagttggatttagggaattgacctctcgtgacgagtctcactgactccacgggtcttggtaggggtacccgagctcgatatt

SEQ ID NO: 530967 - DNA, 549 bp, Homo sapiens
  misc_feature (28)..(28): n is a, c, g, or t
  misc_feature (33)..(33): n is a, c, g, or t
  misc_feature (338)..(339): n is a, c, g, or t
  misc_feature (396)..(396): n is a, c, g, or t
tacggtagaagaatcagagggaaaatanttttnggcttctattttgacaagtagcatttccacctttctcattctcctttttcctttctgctccaaaaattcaaagaggcaggtaattgaaatggacggtggccagtgtgggcagggagagaaatatgaatcctctttacatccttaatcctaatgtcctttaagggacatttggctatttattgaggttctttgtatatttacggacagtgacttggccaaaagacctgggcacttggctaacttttcaaacattatctaacctctgaatctggaataaccaaactgtaagttgacttaattcacannaaggcagtgatgttgaaatagcatgagtagagtgataagtgtgatgcaaatgaaagncatatcttcattactaggctttatttattaaatatagctaaagtactctaaaggtatatgtctacacttttttgaacatggataggttttacataactgtactgaaagaaagggcactaattactaatgcgctcttaaataagaatttaactt

SEQ ID NO: 530968 - DNA, 225 bp, Homo sapiens
gaactggtgcggaccgtgggaatccgactgatcaatttgtacacagcattgagaaggtccgtggcgcttgctgacgctatggacgctctgccctgtgctctcagtgttacagtgattaaattcaatgaagcgcgtgtaagcggcggaagctactatgactctcttaaggctgccaaatgcctcggatctaattagtgacgcgcatgactcgctgaacgagattac

SEQ ID NO: 530969 - DNA, 321 bp, Homo sapiens
ggttgactctagagtgatcccaatcgccacgacaaggagctgagaccactgacgcgcaccaccacgcccagctagttttttgtatttttttttggagatgaggttttgccatgttgcgccaggttgatctcaaacttctgggctaaagaaatctgcctacctaagcctcccagaatgctggggtaacaggtttgagccattggccctagcctaagtttggctaagtccctgtttcactacattctaaactttcaaattgaattcctgttttggggtactaagggtttttggttggttggtctgttttggtattggtttaag

SEQ ID NO: 530970 - DNA, 265 bp, Homo sapiens
  misc_feature (39)..(39): n is a, c, g, or t
  misc_feature (96)..(96): n is a, c, g, or t
cggcacgagaggaaacacaacgaggacagtgtttaaaanaaaaaaaaaaatgatggcaaggtttttttgtgtgatttttgttgttgttgttgttgnttatggagtcttgctctgtcgcccagcctggagtgcagtggcatgatctctgctcactgcaacctccacctcccgggatcacttgctcaagcccaggaggttgaggctgtagtgagctatgactgtgctactgcactacaacctgtgtgacagagcgacaccttgtatt

SEQ ID NO: 530971 - DNA, 342 bp, Homo sapiens
gcctcccaaaacactgggattacaccgctggtgtggtggctcatgccagtaatcccagcactttgggaggctgaggcaagaggatctgtggagcccaggagttcgagaccagcctggccaagatttaaaacgaaaacaatcatgggattccagatgtgagccactgtgctagcagaaagatgcctttttaacagggctcctgttcatgaacattatgagtttccgggtccacttggtttagcgtgccaatcatagcgcttaccttgccttgcttttcgtttctttccttcctttcccaatggttgtcaaagtttttaataggctttcgctcctcctttgata

SEQ ID NO: 530972 - DNA, 230 bp, Homo sapiens
  misc_feature (130)..(130): n is a, c, g, or t
atagccgacgaaagtgcaatatatataagtaatacacatgtaagctaacagtgtgactctgccattactctctaatttattaaggtaatagtaaaactcttaagagaggctgtagaaataactctctttnggttctggaaaggctcaccactgtagtaaaaactgaatcactttgttgtacagcagaaattatcacaacagggagttcctgctgtggtgccgtcggctaa

SEQ ID NO: 530973 - DNA, 333 bp, Homo sapiens
cgtaggaaggaaagagaaagaagaaagaaagaaagaaagaaagaaagaagaagaaagaaagaaagaaagaaagagcaagctgcagacttaaatgtccctgtctgacagctttgaagagagtggtggttctcccagcatgcagtttaagatctgagaacagacagactgcctcctcaagtgggtccctgactgccaagtagcctaactgggaggcacctcccagtaggggcagactgacaccccatatggccaggtgcccctctgagacgaagcttccagaggaagaaccaggcagcaatatttgctgttctgcaatatttgcttgttccgctg

SEQ ID NO: 530974 - DNA, 329 bp, Homo sapiens
tatgagctggcccgactttggtcaacgggcctgctgggacggccagtgcggcatacccccatcctctacactcatacccacacaagaccctgtggtggctaaggggcagaagtgtattgcaacacgttatggggaaaatcaagttatggagccagctcccaggaaggagaagccgtggaacattgccagagagaatactgaggatcagaggcatctaccaactccacagtcagggcttgaagagtaaggggctggtggtccttgaagccacagtcttggggcgagtcccatggagctaggaaggggaagacggaatccagggtgcaggc

SEQ ID NO: 530975 - DNA, 255 bp, Homo sapiens
aagggggtatccttggtgggccttagccagggttcatgcctgggaaatcatgctatgcaacagatctgggatggaagggattgtctagggaagaggggagaagtgacaggagaggtgaaggggacgagacaggtgagtgggcgtgtagacaggcaaacagacaggagcagagccatagggcagagaaaagggtggaagaggagagagagagagggagagggagagggagagggagaggggacctttggtcgacgc

SEQ ID NO: 530976 - DNA, 327 bp, Homo sapiens
cttaaagttgacttgaacttgagtggcaatgcacctggatttctgatgcttatgaaaacagccacaggggatacaacccactgcaaactttcttcctggcacagtctctttattactgttatgtatcttatcctgtggtgctctactgacagctgtcccactccaaaagagtaacaaaagcaggaagaagtgaggggagagccagacacctgagtgagcagttatctctggagccccctccctggccttctggaacactgagcacacaagatgtttaccaattctgccttgagtgatctgcaaggaacccacgcgggtaccgagctc

SEQ ID NO: 530977 - DNA, 534 bp, Homo sapiens
  misc_feature (85)..(85): n is a, c, g, or t
ggtgtgctgaggtctatctagaggatcccgctcacccggagggggttgggcacggcatggggagctgaggttgccatcgccgtgntgaatctttattcagctctgacagtggctagcagcaactaccgtggcatccggaaggggggtgtggtgatgctgatcttgagcaaggcccggttatttcgggagaacctcatcaggtatggcatccgggtggaccccatccaggtggtttctctgtccctgaaggatccctatagctggcccgccccatgcctggttatggcggccaatgtcttggctggtggctgcattccaggtagagaagcgcctggggggtgggtgccctgacggagcaggcggaactgctgctgcacgtggccaaccgggccaccattctgtgctccccaggggcggtggtctgacgggtgagagtctatcactccagggggctcccggtgggcgctgatggcgcacaccatcctcttcctcaagctcttctccaaccgagacgtcaactcatgggtggccgag

SEQ ID NO: 530978 - DNA, 647 bp, Homo sapiens
tggtacccactttgtgtgggggccgtcttgaccgcgcatatggtgacgagagttcagaaggcgagtatggaacaacagagcctagcatctaaggacgctccacatatgtttcccagtgtataacacgtttccccgcagggcgcgcaggtccaagcagacacagatcactgcaggttaacacaccaccatacaaggccgtggcctgttcactgtcctgcagtgctagcagtgtttcttgcagaacggatctgtaaaccaaaacacactgccaaacccctgccaatgacaaaacagacccacagaccatacataccctggtccccaggcaacccactactacagacagaggcatacagaccctctgggctgttcagatggtcagtggtacctaataagaccagggcagtcaactcattggattcacccagttaccagaggtgcagcaggtacatgccctctaacctttatcaggccaaccctcgacccaccaacccatctcctgtggcttcaccactgcaaaagcatccaaacctaaccaccacctgcgtgtgtgcccaccaggcttgaatcctaacaggtctaggcaggtcttttaacaggtgaaggatctagtcctcccacgggatccgtgcacgttaacgattact

SEQ ID NO: 530979 - DNA, 184 bp, Homo sapiens
cttcttctaccactccctccaacatacaaaccaccccccccccacaatctagctttgctattatgaagatgacacatggctgagacacagcctgattgaagatttgattctacttttggaagaatgcgacgccaacatcagagcgtcctaagggaacgcagtcagagggaaatacggtgtgtgt

SEQ ID NO: 530980 - DNA, 103 bp, Homo sapiens
ttcagttttcgccctctccaaaactgccccagcactgtgattagacctacacctcagtcttccattctgggcgtggcaatccacaatccccatcctcacaccc

SEQ ID NO: 530981 - DNA, 223 bp, Homo sapiens
ccccatcacagcgtagcagctttcttgtgggagggtcttgggccacgtgccctgggctggcctgtaggctgtcacaggtttattcttggtcctgcagacaatcatgacatcatctccatgaagctgttccagctgatggtggagcacacgcccagagcgagagagagcatcgagcgtggaccagagatctgagcccagcggtcaatcttccttcaagttcgcc

SEQ ID NO: 530982 - DNA, 207 bp, Homo sapiens
ctacaggggttggggttttttttgggggggggccctaatttttcccatacccctgggggaggaggggttacggcccgtgccccttgggggttgatggggccagtggaaaggggtggggttccctttctttccccccacccccaggaaggggggggggacacagggccagtaggggcaaaaggtttttaataaacagaccccccccca

SEQ ID NO: 530983 - DNA, 1414 bp, Homo sapiens
gagccatgcgtccgcgtacgcgtggtgtcgaaccatgcgtccgatcataatcgaaggcttgggcgaactgacgtaggttccctctgtatgtaaatcggtgtgtgccggagtatggcagtttcccctgcagtaatcaagattagagcattcttgactccttacgcgtccctcatctgcctactccatgcgtcgcatcgtgctatagtggaggccggagcaaggacaggcacggtaggaagcacggtctagccctcgcctgtaggcagtggacactacacatccacacacctggaagacgctacacggtagaagatctaaggcacagtgcttcgtgcacttaatcaccgctagtgcacgagtggtctcactgctagtcgtgtacgggggccaactcgaacttgtgactcagcgagacatgatgactcgaaatagtaaacgaccgccctgggacccactaatgacacacattaccccaatatcgactcccttcattcgtctactggaagtgccggtccttcgaatcatcggggaaggtgccctttacctctcgtcacattattcaatcctcgcactagggttccaataagcgaatgacatggtccatttcgactgaccttacattagcagtagaacaagaagcaccgggaagggccgtcgacatggacgccagcataagcgttatcggaaggccccggagtgggaaagagaggaggagaagccccccaattgttcctagttgccaaagccagcgtaattgcatggagtatcaggcccgggatcgagccactggaaaggttatgaatacgttgcgtcataatgccttagccgagaggcctgctgaggacataaactcatccccacaaatgagttcggtaacacatttaacataacatcacggggaaacgaatgccagtaaaaccaatgagggaacatacccttacggtctcatgccgatcggggcaaccatacgaaaataacagaagtgggacagtcccccacgagatagaatacggcgcatgaagacacaacccaagaatcattaaaacaagaaaggacaatcagaacggatagaaacacaacacagggcactattaacacaacaacccaactaaaccagaaacaagacgcaaaatccacaaccggaaggagcaaaggaaaaaaagcaagaaccacgcaccaacgcaccaagaacaggacacaatgaacacaaactaggggacacggaaccagaaccccacaagaatcacaagacaaaaaacgaaaaggtggcagagaggaccaagaaaaaagaagcaaacaaaaagacgagaaagcacaacgaaacacatgtgagcaaacaaaaaacacaaaaaaaaaccgctgacaccaagcacaaagacaccaaaggagacaacaaagagacgagcaaaaacac

SEQ ID NO: 530984 - DNA, 802 bp, Homo sapiens
  misc_feature (133)..(133): n is a, c, g, or t
  misc_feature (136)..(136): n is a, c, g, or t
  misc_feature (140)..(141): n is a, c, g, or t
  misc_feature (802)..(802): n is a, c, g, or t
gtgggaagctggtgagaaggcacacatctctccacagttagatttgtgagaggagtgcctgacttgggagagtgatccaggctcacacctgtcctgtcctgtgtcctgtctgcagacagcggaactgaaccgngangtgnncacaacagtgagctggtgcagagtggcaagagtgagatctcggagctccggcgcaccatgcaggccttggagatagagctgcagtcccagctcagcatgaaagcatccctggagggcaacctggcggagacagagaaccgctactgcgtgcagctgtcccagatccagggggctgattggcagcgtgcgagggagcagctggcccaggcttcgctgcgagatggagcagcagaaccaggaagtacaaaatcctgctggatgtgaagacgcggctggagcaggcacgattgccagctaccgactggcctgctggagggagaggatgcccacctgactcaggtacaagaaagaaccggtgagcacccgtcaggtgcgtaccattgtggacagaggtccactgatggccaggtcatctcctcccgcgagcaggtccaccagaccacactcgctgaggactcaagctacccctggcgggccagccattgaggcagtggaggcaggccggccaatactgccccaaaggtctcccgggccatcttccaggcactcgagaactcccatggattacagggtccgcttcccacaatggtctcacgttagcccttgatggaaaattagaagcttggctagacatctaataaacagtagaagaacgcaaacn

SEQ ID NO: 530985 - DNA, 296 bp, Homo sapiens
taccgtggaggtccacatgcagcttccctggagggcaggccggagccgtcccccccctgggcttgaggatgctgcaccccgtgggcttccaggcctgcccagatgatcctacaggcctctgtcctggcgccatcctcaggccgatttaacacagcaatgatagactcttcataaaccctatcaaaataaatttatacagtgggacagaaaggagaaaaaaaaacattttttaaaagaaaaaacaactgacccacaaaaaaaaagagatctgttttatgcaaaatacaaaatttttc

SEQ ID NO: 530986 - DNA, 449 bp, Homo sapiens
  misc_feature (12)..(12): n is a, c, g, or t
  misc_feature (32)..(32): n is a, c, g, or t
ctattctagaanaccaccagccacagtgcctnaaatcactggaagcatcagtagatcatttggcataaatagaaattagggggcatttgtcatttaaatatgtatttgaaagcttttttttttttttttacaaaaaaccattttgctttgttttataacagtattgactggcggggcatgatgctcatgcctgtaatcccagcattttgggaggccgaggcaggcggatcactgtggtcaggagttcgagaccagcctgaccaacatggcaaaaccccttctctactaaaaatataaaaattagccaggtgtggtggtgcacacctgtaatcccagctactcaggaggctgaggcaggagaatcacttgaatccggaaggcagaggttgcagtgagccgagatcacaccactgcactccagcctgggcgacagagtgagactctctctc

SEQ ID NO: 530987 - DNA, 1657 bp, Homo sapiens
  misc_feature (170)..(170): n is a, c, g, or t
  misc_feature (1184)..(1184): n is a, c, g, or t
  misc_feature (1187)..(1187): n is a, c, g, or t
tattggctccgtaacaaaaaaatttaaatggcaataagggcacaggtgaagagggcgggaatctcatttaaggcatctccctcaaacacaaaggggcccagcagcgctgacgcaaaaagaccaggacgacactcctcccttcatataccactggggcgccctggagacangctccctcctggaggatgtacgggggctacccatgttcttgtgggcagggtggcctgggggcgcaagagaatgtggattaacgatatgagataccacaagttaaccctcttcggtggagcaaatactggccaacacaaagaggcagatctctatgggtgccctggcgatcaaaagtgtcatgtgcgcaatatgtgtcccaggggtgttcaacacgcttctggaaggcgacatcggagggggtggcgccaacactgtgcgcccctaaagggtcctgtgcgcgacaagttctctctagaaaaacagggttctcctctcacaaaggccccctttactttggggggacaaccatatgtggtggggcgcctattcttatccattcgggcttggggagccacaaaacaaggaagtaaaagaggcggtcgagcctagtgtcacaataccaatcttagggtgagagactacggccgggaagaacaaaaataatagccacaacaaatgcgccatttccagaagcccccacgcgacatattttctccccacatgatttccaagcacacacggtccaactctttgtgtcgccttcttcaccaacagcggtgttaccaagtgagggctggggcccacacacaaggggtacaccaacaaaagaacattatctatgcggggacacatatatttctcaccaccacacgatgtcgacaaacaggtattgggaagatatgtgagggcccaccaaggtacatcttaccaaggcctcttctcacaatccgtacaccacgggagggacacccacccctgagcagcaaggagggccagtacattatgacataaacacacaagaccaagcagcgacaaataaaacgtagggagcgaccaacgggggcagtccacaagagacgtcggacacaaggtagcccccaagaaagctcacaaagaagggggggtagaagacaaaattctcgccttgcacgaaaccacaagcagcttcgggggcgaggaagacgtatccacgnccncgtccaacctggaggaccatacaactacacacacagatcaaacaaaaaatgccgaaacgtcggggaaacaccagggcgtacacaatagtactcctccgaaaagaacgacccagaaaccaacaaataacggagcgtcacacaaccaccacagcagagagaagaggagagataaggacccacacctactaaacgacacagagtcgaagaaaccacagcgaatatgaagaacacacctactatggcacagagggagaaagacccaaagaagcgacactcgcgaacgtcaagccacagaacgaccaaacaggagctcacgacctgaaataacaacacaaagtgtaggacgaagaacaccactacatacgaggggttatgacgacacaacaaacacaggcagagcaactccagaggagcccccaaaaaagaaatggaaaacagtcaaggagcacagactgtaaacaagtacagac

SEQ ID NO: 530988 - DNA, 1153 bp, Homo sapiens
accgttatggtaaatctaactgagtgccggaaaatctaagacagtaatggattgataacgtatgattccgggctatgatatcagagagataccttaaggtctgtctgaagctagagtcacacacaatcatgtttgacattgataatggagataagacaattgcaacacatgggcttttaacaggctccgctgtcatcctcatacgatatccgctatcggggtcaaaatgtttgatgcataggcattctgcacaggacgtgctcgacaggtaagacggataatccaagatgactcttggtctcgtaaggctagtgtctcgaatgtcactccagagatcactaatcatgtatcttaatcaccagtgaggtcgagtcttgaactgccattgagaggatcatgtcaaacagcgattcctttgagatattccgactacatagtagcgaatagttgctttaacagtagtcacattcaatttacacaacttatgttggctcattccaagaatgaagagtacgtccttgttcatctaatgtcctattccaaatgaagtgagagcgtgtcccactctaccaactcgaatttttaccctcattattatctctaacgcataattcacgcataaggatacaaaaatcactttacgcctataatcacgatatatcaacattagtccattatttcatacggacagaattaggctgcattgtcttacatccaaggctatattggtggcccatcaccggtctgcacctcgaacagtatgaatgcacgaactgaccctttgttgctttagccatctgaaggttctatgattcatgaggcgcgtcatcctattaatcttacgatgattatgtcatttaggaacattatagcgattccgggagtgctgtcgattctccgcagatgtgtctcattagtaatgtatactatctaaaaatatgttgtgctgttaggtggtctaaacctgaaatcctatcagtttgggcgcaaggtggatccccgaagccaggagtggaaataacccccggcgagggtggagccccccccttctacagtacccttagcggacaggcacaccctgtccaatacaacagagggggggaatttacaccggagaattagccttccaaaaaaaaagcggcaaattcgggca

SEQ ID NO: 530989 - DNA, 138 bp, Homo sapiens
gccctaggcgagtgaagtggactctgagggctcccgttaccccactgcgtgcggcaggggcgtggagggcagagggccgcggagggcgaagttgccaacatggctcagagcagagacgggggaaacccgttcgccgag

SEQ ID NO: 530990 - DNA, 774 bp, Homo sapiens
tcgaggcctggggttgctctactaaaaatacaaaaattggcggtgtgttggtgcacgcctgtaatcacagctacttgggaggctgagacacgagaatcacttgaacccaggaggcggaggttgccgtgagcagagatcataccactacactccagcctgggcgacagagtgagactgtctcaaaaaaaaaaacaaaaaaaaaacaggggattgggactctctaaagtggtccatgtgtaaatgtccgcaccaaccttatgggcttgtcctaggaagctattttggcagctaaggatggctggctcgccttgagaagccaactatcctggtggacctggagccggatggccggcctccaacctcccaagctggctccgggagtcacagtgggcccacccggtttatcacatttggactgggcagttctcccgagcccgccccaaaaagccatgacccacaggggtagattttttttttacactggattctataaagcacttttaactttaagtttttaaagagacaggggtctttctatggttggccaagggtgggtctcaaaactacgtgggtctcaagcaatcctccaatctcagttttccaaagtggtggggatacagggcatgagccacaatgccctggtctggtaaggcattttggagcttaaataatacattcacagcacgtggggggataatgctggtattccaagatatggtaaggctgaggggggaggatccttgagcaggagttgaaagttgagtgagttgtgac

SEQ ID NO: 530991 - DNA, 661 bp, Homo sapiens
tatcaggagagaagggtgagggaggagatccagggctggtcttagtcatcgtatctggtacatcttactcccccggagaaaattcttgcaaaaaggagaggatcctacacagaccaaaaatgctggtgtcagtgcttttacaaagtacctctggtgctgtagaacctgtagcaaggtgctcttggcaggcacccggtatagttctgccctgtcctcatcctcaaagtagacctccaaattatcagggcaatatttttgctctaggtcccaagagggtgtttcaccaaacatcaccattagatgatcaataaacctggagtcctcatgaaaagcagagatgaagtccgactgggcatactctgggtatagaaagagcacaggccagctcagcctgccctggccatctagactcagcctggctccatgggggttctcagtgctgagtccatccaggaaaagctcacctagaccttctgaggctgaatcttcatcctcacaggcagcttctgagagcctgatattcctagccttgatggcctggagtaaagcctcattctgattcctctccttcttttctttcaagttggctttcctcacatccctctgttcaattcgcttcagcttgtctgctttagccctcatttccagaagcttctctctg

SEQ ID NO: 530992 - DNA, 130 bp, Homo sapiens
gcaggacgtccagtctcaaaaagatagttacgaaaattagcgagggtgtgctggttgatgcacctgtagacgcagccacagactgaggcgggaggatcactcgagtccaggaagttgaggctgcagtgag

SEQ ID NO: 530993 - DNA, 170 bp, Homo sapiens
aaaaacagggagggaggggcatttgtggcagaaagatgcacaagaaatgctcaggccaggcatggtggcacatgcctgtaatcccaatcctttgggaggccgaggtgggaggactccttgagcccaggaattcgggaccagtctgggcaacatagcgagaccttatctct

SEQ ID NO: 530994 - DNA, 596 bp, Homo sapiens
  misc_feature (20)..(20): n is a, c, g, or t
  misc_feature (228)..(228): n is a, c, g, or t
cacactttctgggcactgcnggccagtcccaaaatggaacataaggaagtggttcttctacttcttttatttctgaaatcaggtcaaggagagcccctggatgactatgtgaatacccaggggccttcactgttcagtgtcactaagaagcagctgggggcaggaagcagagaagaatgtgcagcaaaatgtgaagaggacaaagaattcacctgcagggcattccantatcacagtaaagagcaacaatgtgtgataatgggctgaaaacaggaagtcctccataatcattaggatgagagatgcagttttattttgaaaagtaaatgtatctttcagagtgacagactgtgaaatggaaagaactacagaggggacgatgttccaaacaaaaaatggcatcacctgtcaaaaatggagttccacttttccccgaagaccttaggcagacttttcccttcatctttgggttcatctacgggaaagggtccctttgggccttggaagggattgtttccaggacccccttggggttacaaaaacccatcctttttaaaggcccttaagtttaaataaaggaaaggcctttgaaacgg

SEQ ID NO: 530995 - DNA, 153 bp, Homo sapiens
gtatatcctaaagcatgttctaattattgagaagcatagaggtagttaagggctataaaccagcgcatggtatctgcattagttaccactgttagccattaagaacatattgatagtgccattgcaggtcttcacacaagctatccagtgaaa

SEQ ID NO: 530996 - DNA, 922 bp, Homo sapiens
  misc_feature (20)..(20): n is a, c, g, or t
  misc_feature (284)..(284): n is a, c, g, or t
cacactttctgggcactgcnggccagtcccaaaatggaacataaggaagtggttcttctacttcttttatttctgaaatcaggtcaaggagagcccctggatgactatgtgaatacccaggggccttcactgttcagtgtcattcaacgcatagcatgcttgcgggtgctacgtgtacacgccagcagacaagatattgtcgctagtgacacatatgtgcaaggaagactaatagatattccagcactgcgaaggggctagttcccaaatatccacaagtcaanagcagcgaatcatgtcgcttgtaggattaatgtggctttggaaaaactctaagtgtaaagctccattccccttatatatattcctatctcagggctaatggccagctaaggaattggccgatggttttacttattatggtggttgtgcgccaaataccaaggcttttcaaagaccaatttgggtttttcatttctccccttttatttctttttcccccggacacaaggcgcgccaaaggggtttttgtggggtccccccccatttttaaagggggaaaaaaaaccttttgtgggcgggaaggggagaaaaaaacttcggggggcggggcaaaaaaaaacacggaaaataaaacccattaaaattcccccaaaaggcggcaaaggggggcggttaaacccggaaaagtgggttatctctcaatttaaaaatccaaaatacaattacttcggtggacatattctaacctccattggtattccattaaaatatactttgggggaagctgtttccccaagcttttaccattccacacccccgtacaatgataccccatttaacggggttcacagaatccctgtgtccctcggcattatgcgggtcgtatatgggtggtttccatttcttacccttggctatg

SEQ ID NO: 530997 - DNA, 380 bp, Homo sapiens
  misc_feature (178)..(178): n is a, c, g, or t
  misc_feature (298)..(298): n is a, c, g, or t
  misc_feature (311)..(312): n is a, c, g, or t
  misc_feature (324)..(324): n is a, c, g, or t
  misc_feature (333)..(333): n is a, c, g, or t
cctgatttcatgttcaaaggtcatgtcctctggggaggcttcccttgatgctcaaatgaggtcagtgtctaggggggtaagctcttgtggcctgtatggcaccctcactagagtcttaagtcccacagcaataagggctttgtctttgcttacagtatatgctcagtgcctagggagnacccctcaccaggtgagcatttgacagatatttgtctagtgaaggaatgagcggatgaatgaatgagtgaatgaatgtcaggcactgtgccaaggcaatttgtacacatctcatttaatnccgggaaaccgtnngaaacttgcaantctcaactngggggagttcaacccagagctgagcccaacaccccaaggcccgggtt

SEQ ID NO: 530998 - DNA, 182 bp, Homo sapiens
acgccagatggaagctcttcaagttttagctatttccttgcatatctgactcagcaacatgtcccaggcttatcttgttcacttcctaactcagacctggaactcagccatttctccacaacaatcctggttcttatacatgtggagacagtacatggcaaaccacaataggggcactggca

SEQ ID NO: 530999 - DNA, 240 bp, Homo sapiens
ccttaacacccctccccatatcattgcccgatgatatttcctattcgcctacacaattctccgagtccgtccctaacaaactaggaggcgtccttgcccatattacatatccactccccatcctatgcaataatcgcctgtgtcacgatgatggtggatccatctagaagtctgacctgtcaggctatgcaatgcttggacgtaatctatggtcgagtagctagtttccctgtgatgtaa

SEQ ID NO: 531000 - DNA, 631 bp, Homo sapiens
gctgcaggcgttgatcgacactcgggagttgctctgctacgaaccagacggacgccccacattcacgacctgtacggctgaacatacccaaagacacaagccatctgaagaaacatatgaccttgctatgcgatcgattatccaaaggtgggcgggtctggctaagtaccgatcgcgcgggccgcctgaccatgggcatcccacctccttgtactacaatccgagagccggacctacaagaaagatcagtgttacaagactctacagaactgtttaccatccacagacatctgactgtagagacaccaatgcctgtagctccaaccgtccatggagtctaggaattactcaagcacagacgttcgcctgatatgtacactcccatctcaaggccgaacctgtgtgaacctcatgccagcacaaattaggagtgggcatgtgcatcctaaagcctaccttcctgagatgacatgcatagaaagaggggttgcttctttccacttcacatagacaactcgtgacaacatggggatgtcacctgaaacttggattgctctgtcgaggaaaggtagtagcgtttggcattcatctgcttactaggcgcagaatacagtgctgacattttttgggg

SEQ ID NO: 531001 - DNA, 142 bp, Homo sapiens
ccccgttagtagtcacacaatacagctgacaatctgatagagtggtacaaccagccaaaggaatccaggtaaagtacaaaaacgccaccttttattggtacctgtctgatttgctcgggaaggagggttctactttacacat

SEQ ID NO: 531002 - DNA, 1416 bp, Homo sapiens
caggttgttaatccagctaatggatgaattgatagatgcagcgctatcttgtgatttaagtaaatagataagaacaaaaatgatcaaacgataatcgtccccttccgtttataatgatagatctaatgtctgccagtggcacatatcaagataccggcgtggcacctaactgcagatcctactgcagctcgcagtgtgacaacgtgacgtgctgacttcatttcaagttactgaaggctactaagagtagtattctcttcaataaactataaagcttgcaatcatcaagtggagcgtgtttggccacattctgccacagaattcctgcgcgaagaagctgaatgcgggaatacgagtgacattcgtgattatactttgagctggatgcatacctacgttacttaatgtacgtggtatcatgcgtgcatatatgatcatggccttacatgtccccgagatggttgaaaagaatgcacgaaagcaatgcctccactggtaagcagttagcgcgacacattaataatccaccgagggacgaagatccaatccattgggcatcctccgtttgtatcgaactcaatacatggacagaaccgatacaaatcagggaacatgtagtcctcaatgtatgtgcagagacctttttgacagtccatttattcaggaacctgataccgaaaatcctgggagcaccaagtgcagatggatggtcactggaaaccaagtaattggcagaagaaaagggacacacaagaagtgaactttattgggacattcgtcttacagagacccaaaaactatttactgtgaatctggcatagcaaacagcagaaggtagaaacaagggatgcagaaaatccgaaatccaggggtctattcacctgggatatgtgaacaccacatgtccaacggtttgactctgtataacatcgaattgacaacaccgtgaacaacaacgataaccccaaaaaccattaggaataaagaagaaaaacaccaaattgtgcacgcaaacatagcggggacaccacaatggggagaagagagccacaaaaaaagagcagtgctattaacaacaacgggaatatcacggtaagagaaaacatatgaacagaaacgccccacgcagtgaaacaagcgagggaccgaacacatgaaataaaatataagcaacaccaatcataaaaaaaacaaagtagtaacataataacgaacaacaccagaactaacaaagatagaaaaataccaacacaagaatagtacatatagatacaaaatataacaacataacaaaaacacaaagaacaaaacaacaacaagcataataacaccacaaataacaaaacaaatattaaaataatataaatatagctactcatacctcttctctcacccattgtagtataaaaagaaata

SEQ ID NO: 531003 - DNA, 473 bp, Homo sapiens
  misc_feature (459)..(459): n is a, c, g, or t
tcggtcgatgtactagaggatccctgcgggtctctatcctgagctttagaatacctgaaatttgtaaatatattttttttccagacctgtcagcaggaaataagaaattttgtaaatttagagttactttataccagatatgcaaccagaactaagaaaacaattctctggataacaattaagaattcagacagagaagtcaatcaataaaagggaaagggatatctctccacagggcagctgtgtcaatttacttcacctacagaggccagataggtccaaatccccctactcattaggttatcccaatccaacatttcctcatcccaaatattcccaaatccagtttcactaacgtaaccccttcccacaatgagcaagtactctgttctagaaacaagacttagttctagtagttcagaagggaagtaactgtgaaatgtagtaaaagagggtacnctagagggaccagg

SEQ ID NO: 531004 - DNA, 842 bp, Homo sapiens
aacggtccggtgtcgggtggtggaaaacctgggcgtctttcccctttttgatgtgccgctttcacagtccttgttcaacgtaccagtgtgtgctgggtcccctcgtggtgcgcttaggaagcggtctcccgtcccgccggtggtttgtgtccaggccctttcataccgcccgctgtttttttaactcacgggcggggtttggtgccgccccacattccaggactgcgtgcgtctctggcccgcctcttcaaggttgtactagtcacaccccccgcgtggtatgatggggggctcgcacactatttcctcgcagtttgtggcttgccgccccacaagtgtcgctctctctaatgtggtgatcttcgcgcaattgtgttcttcggccgcccgggtgtgtgagatggattctgctccccaccttgtgtagttgttttcagaggtagtgccagcgccgtgtggtccgccacatccatctcttccgtcacatcgtctgtctgttcgagtcgagttaatctttccggtctcttgattcgcgaggatactgtcttaagagtgagtctccggtcggttgggttgccaaacctaaacaaaagagaagttttcttttatatagcagagagcatcatacaatcatgcaaaaaatttctcttatttatctatgatggacagcggcgcgtatcgataatttctcgtcctcttttatctcactcccctcctcttagttgtgccctttagatcactcaggaggtgcccccttcttttctattatttctttcaaacaccctcactcactccccactcactccctccactaacaaccccccccccccccccacataaca

SEQ ID NO: 531005 - DNA, 850 bp, Homo sapiens
  misc_feature (2)..(2): n is a, c, g, or t
  misc_feature (62)..(62): n is a, c, g, or t
  misc_feature (90)..(90): n is a, c, g, or t
  misc_feature (286)..(286): n is a, c, g, or t
  misc_feature (400)..(400): n is a, c, g, or t
  misc_feature (404)..(404): n is a, c, g, or t
  misc_feature (546)..(546): n is a, c, g, or t
  misc_feature (556)..(556): n is a, c, g, or t
  misc_feature (733)..(733): n is a, c, g, or t
  misc_feature (735)..(735): n is a, c, g, or t
  misc_feature (757)..(757): n is a, c, g, or t
  misc_feature (763)..(763): n is a, c, g, or t
  misc_feature (847)..(847): n is a, c, g, or t
gntttgtgtttgtggaatttgttgttttttgggtttttttgtagggtattggaatattaaantgggatagttagtggggggtggggtggngggtgttgggaatgaagagaagggcccctgtgtttgtgttcctcagtacgaagatgaaaggctggttaaggtgatagtccagcgggaaggtgaggtgggcaggctgcagctctgggctgggggtggttcccgggccatcctcgttccaatcaaagcaagcacggtgtttcacctgagttagcttgatgggtttgcntgtgatcttgctaaagtctggtgaatcaaacaaggattgcagcttcatttcctgcagggacttggtgacttcgctttcataactcagcttcagcttggggacagtgaggaacgnttgnacggtttttagttctcggtctatgttatgaatgaactcggaggtgaggatctcctctatgaaggtgaaattatgggttacttttagggggaggaagaagatgatactcatgcttccggtcaagggcagctgggcaatcttgnagctgagatntgaattcaagccatagcgtaaaaaagccttagggttcgacatcatggggacctcacggtcctctcttcatccaagtagaaatcctcgagggaagtctttctggagtcaaactttgttacccactgccccttgaagtgcgccacaccgagaaggagaatgctgatctcatcgggaatntnctttgtggacctggcgagcttncctttnatctgcgcctgcactcagttgttgatctcttgcaggttcaagcgagggttgccggtcaggactctggggctggtcccatatganttt

SEQ ID NO: 531006 - DNA, 740 bp, Homo sapiens
ggtgtattcttgtggacaattcatgttcctagagactatcgccttcgaatcactcgtaaaggttggcagtgtgacaacgaagaattcatccatccgagatctattgaacgagtgagtggcagctattggtcgtcgatattctaagatcacagtggtcgccgtgctttaacaaatgtctacacagttcttttatccattatgttcacggcgatgtgatccaaacccagatgaccccctaggtgccaccgagattgcacggatctatagaaacagacagagataagtacaacagaatatctcgggaatggactcagaagtatgccatgtgatggctaccttaagagtcagaataagctgcatttatagctggaataacactttaaattactgttccgtttcctcttcgatgtttcttatccggctgcatcccactatgcagacctcatcttgtttcaagttgtgactttgttggtatacctcgcgctccattcattcacatgctcatctgagagacttaagtgcttccagcttgggacaataaggtgcttttagaaagctgtaaaggtagttacaaggaggaacagttgggccaagactcagaatctttttaaacaagaccaagtggagcatgtgtatcatggtggtgcaatggtcttcagtcttaactgtggttcatgagactagaaagcgttcctcactgcttctaacatgctggaagaaatcattgagggggaaggagc

SEQ ID NO: 531007 - DNA, 216 bp, Homo sapiens
ggaaagttcctaaaaagccaatgccccccccccccctttttaaataaacaggggtcacttggggaacctagacttcttcccccatggtcaagtaacaaaaccccgcccccttttcccatgtttgatgtcaccaaaacccaaatgggaaacctgggtttaaaccccccagggcagcaagggaaccccccaaataaaatttttgccatcggggcccca

SEQ ID NO: 531008 - DNA, 963 bp, Homo sapiens
  misc_feature (25)..(25): n is a, c, g, or t
tagactaggtagagacgcgtggtanatcaggcagaggcccgtaccgacttgcttaggcttgcgatacaggtacagaggcatccccaaagatgtcattcttccccaggatggccacgactgacgtcgccccgcaggatctcgatggagccccgggagatgaagtacagggcggtgagcaggtccccagcatgcaccagtgtgtcccctgtgcggtgcatgtgtggtcttgaacattcatggccagggcccgaatggcagcccttgtgatggccccgtcggaagggttttgcagtgctgcagcagtgagcggttcagtgtgcaggcagatgtccagccctgcaggcactcagtggaagcccttcagcaccgcgttcatgtcagatgccgattggtgtaggaccagagcgtgctggaagtactacctccgagggctgctggcagcacgggtgattggcggatcttggtgtgaagctggatgaactcccgcacccgcaagcatctggtgtgtggtagctgggctgtgcccgagtacagccgctggatgatggccgacactgttgccgaagatgctagccatacattgagggagccacatgagcatgacgcagaatggcgcaccgatcttactactgagctggtgtcggagagacgacgttggcctgaagcacacacactggtgaagggctgcctcgcaaggtgcaagtaacgcggccgacacaataccgagtcccttgaattggcagggggccgcccacgccgcagcagaaggtacgggactggccaacaggacgccacgacccggcacccaaccggaaacagagacccagtgtcgactgaccacagccgacgcgacacatgcacggcaccacaacagagaccacagagcataccacagacagcagacacactgacgaacactcacacccacgacacggcgtaacacaaacacaaaacacaacagag

SEQ ID NO: 531009 - DNA, 361 bp, Homo sapiens
cgcgtcagatagagcagggtattcaccatgtagcccaggctggtcttgaactcctgaccgcaagccatccgcccaccttggactcccaacgttctgggattacaagcatgagaccactgcctctggactatagctgtttacaaaatgaggacccaatcaaggagcacagtgagtatatttatttattgtatctctttaaatctcttataatttatctaaggacagttccttaaactaattatgtgtcttaacaggacattgacagtttaagaagtatccaggtcagtagttaaaccgaatatccctcaattcagtttagtccaacagctttctcatgattcagctagtaatacataggcaa

SEQ ID NO: 531010 - DNA, 970 bp, Homo sapiens
  misc_feature (1)..(1): n is a, c, g, or t
ngacaacacagagaaaaaaagaaccctaataacaactacaatcacgacgatagactatttaaatatctcctgcaaactttcactcggtttctcgcgatactctctctcaacgacctcctctcccccgtcccaactcttgtgggggaccccccttctgttagaacgttgccacaatcgccaacttctgggtaaatagaggtaatgtccaaacacaggggacaccaacagaactcccccgaacacgggtcttaccagccctctcccccttcccttgattggcccttcttttccgacccaggacggcgggtcatacagcgaagcacccgtcggcggtcgccattagagagccaaatcaggcggcttgtcacaaacggggtttcttgtaagaaaccaggccgaaggagtactttcctcggctgcaggtgcaaaaccacagatgatcccgcccgcccggggccccaccaagaggtctcgctgagtccccgccaaaagtttcgcacattccttctaagacaagggacacatatgctcgccccccgtatagtgctttaaaacaagccgcttcctatagatacagcagagatcaagaaagcctctcgggcccacagacacccccgcatgtagcagcgggctccatgggtgtacaacaccacgttgtcctcacaccccacacgcccgcgcggtatttctgcttctccaaaacaaatcgcccccgtcgcccaacaaaaacaatataacagtgcgtcccccccaagaaacgtcaaaccatgcttggccccacaaacgcaataacaccatgctcatagaagaagtcccccacgtggccccatcttccggaagaagaacccaacagacgttttcctcttcagccgcaagctgttcttattatgtaggatgtgacacccccctcaaaaaaaagttcttttggggcaccaaaaaaaaagggaccaaatccgcgaaaaacaaaaca

SEQ ID NO: 531011 - DNA, 779 bp, Homo sapiens
agcataggctaggtaggaggccgggtggttaccatctctctgcggggcgctgacagctggaagagccgaacggataacgagaagaggagtggcgcggatggctgtcggggcgccccgaggacctgtgcctatgctgcccatggtcgaggagccctgtgcggaggcagctgcgccgttgcctccacgacatcgcactggcccacagggctgccactgctgctctggcctcctgcgcccccaccagcaccacagccacccagtcccacacccagcccacccctggcctaccctgtgccagagaggacaacgaggagtgacgaggatgagcccacagagacaagagacctcctgtgtggagcatgctggtgcatatagtgataattggatgggctacttatgtgatggatgagtgacgccaccctccagtgaccttcccaccatatctagtgagtacagaccccgagagtacagcatgattggcaagcctgagcgaggatgacccccgactgccaccaacacaaacgataatacaaccacacaaaaccataaacaaatactcaaacaacataacgaggcaacatccacacgagatgcccttggccccagctcataatgcgaacacagttaatggatggactctcaagcgagcagctcacgggaaaagtttgctcggataactaacacatgaacgaagtagtgtagccagccccacactcgacacggaatgatcacaggagtattcgacaacaaatagtgtacgagcactgctgcagccagac

SEQ ID NO: 531012 - DNA, 103 bp, Homo sapiens
gctaccgcaagggtctagctggttgtggctggtgctggtgtcggtgttccatgcacctgctgctctgtctgtgtacttgggacatgctgcatggcagcgtgtg

SEQ ID NO: 531013 - DNA, 379 bp, Homo sapiens
atcgatgccactcactttttgcccaggctggagtgaagtggcatgatcttggctcaccacaacatccacctaccgggttcaagtgattctcctgcctcagcctcctgagtaggtgggactacaggaatgcaccatcacacctggctttttttttcttcttttgtagagacagggttttgctatgttgcccaggctggtcttgaactcctggcctcaagcagttctcctgtctcagcctcccaaagggctgggcttaaaggaataagccaccatacccaccataggaataattttttttaaaaaaaaggacgtacaggttgtataggaggaaaactagaaattactgataaaattaactgaagtagaccgtggaaataga

SEQ ID NO: 531014 - DNA, 425 bp, Homo sapiens
  misc_feature (408)..(408): n is a, c, g, or t
  misc_feature (411)..(411): n is a, c, g, or t
aaaaaaaaaaaaattttttttttgggggcgcgcgcccctcctcttttgggggtgtgtttctcccccccgggggtttaaaaaaaaatcttttctccccccccccctcttttttttttaacaccgggggtgtggggggggggtccctccacagaaataaaagggggggccctttttccgggggggggggaaaaaattttttttttccccccggggtataaaaaagaagggggggggaggggggtttaaaacaaaaaaagtgttggggttttttttttaaaaaagggcttttttaaaaattttgtgttaaagaggcaaagagatttgggggtttttttgtgtttttaaaaaagggggaaaaaggaggttttggtgtctttttgggaaaaaccttaccctgcaagcccgtanttnacctggtggcgaat

SEQ ID NO: 531015 - DNA, 214 bp, Homo sapiens
atatgctatacccctgggagtgcttcgtcttctgcctgactcatctttggcaacttcaccaatcagatccacacgtggtcagcccactgtactttgggcatgcatgctgtggtcaccactcctgcaggactggtatgtcatcctgccacgtacagaccatcgaatccatcatgtctcaccccacgagaactacttctgcatcaccagaggctgg

SEQ ID NO: 531016 - DNA, 811 bp, Homo sapiens
tgaaagggacctagtcactttaaagaggcctttatctcagcacgagatatccaagcgtgaatgctacggcttgatgtcccattaggatttagcatcgagattcagatttctaactagtcttgatgtgtatcggctgtattataacacatttaaagggaaactagctattcatggtttataaacatgtacgtcattttcataaaaatatccagataggtaaactggaacgaaacatagctagcattctagtccaatggttaccaaactgcaacgaggctgtctgacacaagtttgcttgtttgcatccacagaaagttcccttgagatttctcagctaactgctacggttgccctggacacttgagtacagttcagcctatactctgtataataacgtagtcgacgtagtcaattaccatcgcttgtcaaaagtcctgaatgatccttggagacttgggagaaaacacgataccaggcactaccttaagactcccacatgaacagattttcaatcaagtttcctcaatccatccctggcacaaagtacaccatggtccaacaaagcgaggccgaacaactaatgccggaccctgagacatacacaacacacatatcgacgcggatactggcgctgacacatttgcaacaccaacccaaagccacagatgggcaagggaagatggccccaaaccgacggacaatatcacacacagaaccaccctgaataaggccccaacatcaacactctgaccgcattggaactccaggacaacgacaacgccacgatacaactcaaaactacaagggacga

SEQ ID NO: 531017 - DNA, 1113 bp, Homo sapiens
  misc_feature (429)..(429): n is a, c, g, or t
  misc_feature (540)..(540): n is a, c, g, or t
  misc_feature (683)..(683): n is a, c, g, or t
tttcctgtgtgtgtgtgtggcgtttgggtttggtgtgtttgtgtgtagtggtgtgtagtgtagaagaggcgaggaaaaaagaaaaaagaacaacaaacaagtatggtggtggctggtgtgttccttgaggagtctcccgtcgtctcttctcggaggggtctctctctccgcgcggcaccctgggtggccctaactttctccggcggccacttcatttattggatgggggtcgtattatttctatttccggggccctgcggagcgttgttcgggcaccctggcccatggggccccttgaacacgcgcctgattgtccgtggtagttgcctccgccgggattttgctccagagggctttgctgaaagttgttctgcgcccctgggagccaaccccagtgcgtgaccggtgtcgacgtccgggggaccgtcnggtgacccagattccggctacctctctcgggacctccggccgtttcttttggttgacagaccccagggcgtgacccccccgcctgctctcgggaggccttctttatggtgnaccgacctgaccccttgccctgggggaccccgattgttgcctcctgccgcttattggcaccattggccctgccccatgcgaaccgccgcaggggagactcacctccaatgggtttgatattggtggatgctggctcgggaatntttgcggcatgcgtggcacccgtttccccggggaccacccctgggaggtctatgcctgatctgtacttgttaccgagatcctgaagagattgaaaatagaagacccaggctgtctgctgagaaggccagtgacccaggaggaatttcagggtgaatggactgctcccgctcctgagttcactgctgactcagcctgaggttaccagactggtctgaaggtgtcaccaggtgccctctgtggcctattcacgccaattccctactgaagactggagcgctccagcctgcccccggaagaactggtctcgcagctccccctgctcaggcccctgaatgggtaggacgccacccctgactggttttaacctgtttttgcataggctcttaacccgcctggaaaaatggttgatggaaaataaacatcccgttt

SEQ ID NO: 531018 - DNA, 90 bp, Homo sapiens
gtggacacagccacatattactgtgcacacaggggactggggtctttcattagctgggattggtgctactttgacttctggggccaggga

SEQ ID NO: 531019 - DNA, 1321 bp, Homo sapiens
gtgcctttgtgaccctaaagacatccgctcccacccccatgcctgccagtgagaggctgctgtgctgcagatggatgtgccttctacatgcccccactgatcccactgacatggcccagtgaacatgtgaatggctggtgagcagaactggcatctatgagttcttcctgatgcaaaaatgcgtggccctgtgctgtgagtgaaatgtgccaggagaagatgtgaacagatgtgaccctcgatgtgtctcgaggaggacagatccaacgagtcagacgtgtgcgttacttcactcacctgcatccaacgtcaaagatccatcaaatgtcttcatttgcatctgtacgtcaatggtcaatggatcgaagctcacgttgctacccagattccatacatcaccgaatcacagaatactaagaagatctggaagcaaggtcagaggcatcctcacagagaggcccgctcccctggtaccccagatacagaagagtcacacgagtcccaaacgtcgataattcaccccccagtgcaaaggaccggaccggccggggtcacacgggtcacataggagacccccaatacacgctgagcatttccctacttgcttggagtctgggacttacctaaatttccaggcagaacctcacccaatcaccctttgaactacaaagggattcgggacgacggagaaccataatggcccaatccaagaatggcttgaggtgaaaatcatttgtgcattgtaaagacggaaatcacaggcgggacatacaggctgacgacaagcgacgccaagggggacatccaggggacaccccaaaaacaacagcatagacgaaaagattacgaaaataacgatggcgacaccagcaaataacacggacatcggaacgatagagcaagacgaataagacccacaataagcaactaaaagaacgaaatatacaaccaaaatcccataacatggaccggcaaataaaggtacaaagaacaagagtgatacacgataggaaaccaaagacacgagcaccagccaagtgacgaaggcaccgatgttgagaaatactgaataagtaaacacagcacaaatgatcagccgacagaccacacacgactccaccgggggaggcacaacgaagacaagagacaagagattcccaaagaaagccacaccagaccgaggaccgacacccagacaaacacacaagagaacaaagcaaagaaacactacaacaaacaaacacagaaaagaaaaacgaagaacgcaaacaaagcagccaacgcagaatagatgtagcaacacgaccaaagagccaaaaca

SEQ ID NO: 531020 - DNA, 1296 bp, Homo sapiens
atgcccctcattgacacaaagtattatactagcatttaccatctcacttctaggaatactagtatatcgctcacacctcatatcctccctactatgcctagaaggaataatactatcgcatgtgcattatagctacatctcataaccctcaacacccactcccatcttagccaatattgtgcctattgccatactaggtctttgccgactgcgaagcaacggtgggcctagcccgtactagtctcaatcatccaacagatatggcctagagtacgtacataacctaaaccatacgtccaagtgctaaaaactaatcgtcccaacaatgtatattactaccactgacatgactttccaaaaagagacataatgagagatcaacacaatacgaccacagcctaattattagcatcatccctctgctgatgttttgaaccgaaatcaagaacagaactatctacgactgattcgccgcgaaccttttgccatccgaagccccataacaagcaccgccatcctaattaatacactaccttgacgtccttaaccacgtcacaaatacatggagaatgcaaacggacaactaatgccagtagaaccactcatacgcgacgacaagcaaatcagaacagtagacatactcacacaactatcgccctgacgaagtctccgattaacgtaccacacccgtgtgcaacaggcgcaaccgaaacgcgactgcaactacgaagagactagctactcacacggaaaagacacacgaggacatccataccctatggacagacgcagaatcagacgacaagaacggcagccgggccagcgaaacagaccgtgaacggaaaggcaacaataagaatgcaaaaagtatacacgaccacgtagttagaggcgaccactgcaccgataatcacggacacaaagttaacgagacaacagacgatagagacacaacagaacacatgcagacagaggtaaggagtaatgggaccagagaaaaggtaaagacaacggcagagccgaggagctcagagggcacgcgaaacaagaaggtaggagcaggaaaggaacatggatgaggaacgcaagtgagaaccagaaggaacggctaaggccactatcgggggaagaataccacgaagcaagtgacaaacagggggataaatgagaaatcaaccgaggcagaaaagaactagagtggcatagacgatacgcgaaacagcaagggcagtgagagagcagaacacgcctacgccatcattggacggagacggagcatatcgacagggagagaat

SEQ ID NO: 531021 - DNA, 688 bp, Homo sapiens
ccgagcaatgagtgggctggatcggaacgcgaacctataacagcggtaatcactgatctgctgcctgtgatgatgactcgcgatggtgggtgtgaagacactgctaacggccaaggtctgtggatccatgtcaagaagaaccgatggccatctggatcctgggcacaacctgaataccagccgcacactgtgattctccagcactagatagatacatgtcaaggacacataattgcactttgcggttcacaatctgaactgcagagacatgagctctggtgactgcaaacacagactcatgtgatcgatctggacactatacatagtctcaatataggttggcattgcatgtatagcgccaacatatatgggaatacctgaagctgaagttgatacagaatttctacacgacggacatgctgatcgcgatgtactgacctatggagacacaattgacgtaagtatcgacggtgcttatatagaatgcatgatcaatgcatgtcgactgcattctatcatcgtcatgacatgcctctgtgggatgatgatatgtgtctagatactgaaaatgtgacatagattcagtttcataggtccagacacgaatgggtgacaggacgtgtaaagaagatgcctgctgaagctgatgtaatactgcatgatttgaatgacaatggactttgtccct

SEQ ID NO: 531022 - DNA, 1017 bp, Homo sapiens
  misc_feature (805)..(805): n is a, c, g, or t
cgccccggcgagcacagagcctcgcctttgcccgatcctgccgccgtccacacccgccgccagctcaccatggatgatgatatcgccgcgctcggtcgctcgacaacgtgagtccggcatgtgcaaggccggcttcgcgtggacgacgactgtccccccgggcgcgtacttacccctccatccgtaggggcagcccctaggcatcacagggcgatgattggttgggcaagtgagcgctcagagaggattccgtactgttgtggcgactgagtgtgctcagaaggcaaagagaggtctattccttcgagcccctggaagggaaccccaatcgtaaacatgggcgatccggtcgacccacatcatggtaatcggacatggaggagaagaatctggcccacccaatagcttctacaagtgaggcctgcggtgtggttcctcgtagagtagcacccctgtgctgttcgaacgcgaggaccaccaactggaatcgcgccaagggcgcaaagtctgctgtgacagatggacacccatgaatcattgtttattgtaccacgcctatacaattaaccctcagtactaagtgtcctgctattgctaatccaggggctgttgcatagtccgcccgtggttacgccctcttggtctggtaagctagctggggcaatcgttggattggacttccgggatgaacgggggatcgactgccatacgtggttgccccgatcgtatcagcaggcggggttattggtcccccttccggccgtattggcccattcccctggcagctctgggcacctgtggggtntgggcccggggggcctctttggccgtgacgttaccgtcggtggagaggaatccgttcgaagcgcagtcggacgcgcttgcgggctttcctcgcggccactgtggcgctccggggaagatcgctagcgtgactgtttacgccgaagctgggactagggtcgcccctggacttccggcacgggggtggcctccgcttggttcatccccctcgcg

SEQ ID NO: 531023 - DNA, 361 bp, Homo sapiens
gtggaggattactattgccatgtgctcacttagtgactctttgtccctttttgttaattctcatattatttcacacattttcattattatatctgttatggttatgtatgatccgtgacctttgacgttactgtgaggtgaagttaataaatgttgtatgtgttctgactgctgtaccagctggctgttccctcatctctctctactctccttaggcctccttgttccctaagacacaacaatattgaatgtaggccaattagtaaccctttgacaaggtacatagtcacctaagagctctgttgaagatgtacaagaaaatgttcttttcatacctgctaacaacatccatcctgcagtc

SEQ ID NO: 531024 - DNA, 345 bp, Homo sapiens
  misc_feature (81)..(81): n is a, c, g, or t
  misc_feature (120)..(121): n is a, c, g, or t
  misc_feature (123)..(123): n is a, c, g, or t
  misc_feature (126)..(127): n is a, c, g, or t
  misc_feature (139)..(140): n is a, c, g, or t
  misc_feature (142)..(143): n is a, c, g, or t
  misc_feature (225)..(225): n is a, c, g, or t
  misc_feature (244)..(244): n is a, c, g, or t
gcctctaagaacttaagtggaatcccccagggctgcagggaattcgagcaccgaggttgtttttgtggcaagtacattttngaaaagaagggccttgttggaagcccaggttgtggcatnncnggnngctgcgggcccnntnnccgtctgtgagcatccctgctcgcagatgtggctgcaggcagttgctctcgggtttccttccaggagctgggaagccggagnaaagctgcggttcctgttncgccgagcttctgaccttcctctgcaggacgtgtgctactattactatcgtaaaagaacacccctgtctacctcccacaaagttagaagcaaagggcattc

SEQ ID NO: 531025 - DNA, 1443 bp, Homo sapiens
  misc_feature (416)..(416): n is a, c, g, or t
  misc_feature (1034)..(1034): n is a, c, g, or t
  misc_feature (1090)..(1090): n is a, c, g, or t
gtggaagcggggttagtcagtgtacttgaattttgatggcttataagacctagaatggagactgaagctcttaatactatggatggctagaggtaaggagcctaatggatgtgcgcctatgaattaatactatactcacgaagctgccgagagaaatatacggggggaagaatgccctctggtacgagtctgaatacgaagatatcttatcgtagagttatcgcatttatcaactcatgaaatgtcatccctacgaaggatgtgcaaactgacgtgcataagtcgcgctggacgtccagtagtcaagaggtttggaaatgtgttacgttgcgaggccattatttacccttgatcgctgcgcattgtgttgttgtgaccggaaagcagttggagtaattcatctaacataaacaggntacaatgcaatattgtggatactaatcatgatcttgatgtgatgtgggtggcgcccatggtattgcttgcgtaagtattgtgaggcgttccccaggcctctgtccatagggctgtccactctcattctcttggaagtcccggagaacagtcgcggcggcaataggcgccatagaggcacataggcagtctcaattcagttgcctacacaagtagccaggacgcaagttgtgacaacaatagggggtgtcaatcgcggtcagaacctacgtcaacttgagtcgtcagactatagtggttgaatagacaatctctctccttctccggagtgaggtcaccattagccgcgacatcacattacattcggcgcatggggcatgtctggtggatagggcataagaggttgacggctctacggcccccagttcagaggttacgacgtacaagggctggggcccgccgcttgaacttagtgtgaggccgattttgcgcacaccgaccaattataccatctcccaggcaatttcagaggccctcttcatgtgaatcggtcttttataggccttagcacactttcggtgccttgcggttaagtttcgccttgggcgatgctgcacaanttcgtttgctgtaaataaagggtcgaggattggggccctggtggacagatcgcacntttgcaccacagggcggttgtggaacacacaaggctcattagaggacggtcctcaccatttacgttcaacgggttaacacccctatccggtagctatcacccacggtttggtgtacggcccctctttcaggtaaaaggaacccccttagataggcgaaattttttttcttcccgttttaatatacgtctattaacgtaaaaagcggtatgtacgataccattctggaattgcgtaacaaagtggggggcacaaatctacaaacgatattcaagttcgagacagaaacgacgggtatgttgaacgggatatctcaaagaaatcccccgctttggtcggatatataaccatctaa

SEQ ID NO: 531026 - DNA, 1309 bp, Homo sapiens
gccaaaaattcaaaaattagccgggcgtggtggcaggcgcctgtaattccaggaggctgaggcacaagaatcgcttgaacccgggcagcagaggttgcagtgacctgaggtcacaccattgcactcctgcctgggcaacagaatgagactctgtctcaaaaaaaaaaaaaaaaaaaaaaattatttcataatttaggcccaaatatttaattatttttaaccaagtgtgggtgtgggtaacaggtattttttttggcccattggctgggcaaattcctggttttggtgcaagattttcccaataactctgggccacaaggtgtggcacccttggatgtgtgggcaaacgttataaacaggtcctggggaataggggtgttctctaggaggtcctcttataacttctattaaggactggtatttttacaaaacattttttttacccactattaaaaatctttggggagtcccgcgtatatataggagtctcttttgaaaaaagcaagatcaaaaacaagaaaaacactatcgagagagggcaaaattaatatgggtgcagagagagtggagagagaaaaaaaaggaggagtaaagtagacatggggggcacacttgtgggtcataagaggatagtgtgaacacatgatagaccacgaaagatgattcttttgtggaccacaaataggggtgggcaaagcattatggaagagagggatacaacccaaatatataggaggagaggaccagagaaaataaaaagttcacgagagttaagcacacagaggtttaaacaacggtgaagttaaaaaatagacactcgggggaaaaaagagacaagcaacgaagcaagaacagccagaaaacacacacgcagaaccaacagcacgcaagacaacaggaaagaaagccgccgagagcgaaaaccaagcaaaacgcactaccaagagagcagaacacaaacagagaaacagacaagaaaacaccgagacacaacaccaacacgtgaggaaggaagcaggaaagcaaggaagaggggagaggcagagagagggagagaaggaaaacagagaggagagggtgaaaggcgaggcagaacaagagaaggagaaagaaaagcaaagacagaacaacaaacggaagagagaaagaaaagaaagagacagaagacaaagacaaaggaagaaggacaggaaagaggagagagacagcgagtaggcagaggcgcgaggcgagaggagaaaagagagagagaagaggaaagagcagaggaaaagaagagaggaaaagaggagcgagaacgaaaaagaaa

SEQ ID NO: 531027 - DNA, 375 bp, Homo sapiens
tgcccaccagatgagatccagctcggagcgtgcattttcaaacctcccctccatgtttctctctcctttttcaggcccagagcatgattcccatcaatgagccctatggagatggtaagtgtgtgccgggctcttcaggaccctggagatcctgggcggctgtgtgggtgtgtgtgaggggacaatattatgtctccggggccagaggaccagtggcaactgctgtgtggcatccacatgtaccccagtctagatgccctggtgtggggtctggggagggggtcaggcccaccaggggtgggcatgggtagaggaggcagctgaaggctgtgcagactgctccctgcagggtagcttgcagaccctagtcgacgc

SEQ ID NO: 531028 - DNA, 242 bp, Homo sapiens
tagccgacgagtgattcagcatttcgtcggtatttcaagactcggttgatgaaggggtctgagtgtatgtctcctatggagcatctataattgatcatgtgacgaatagtgctacgggacatgcatattactgagaactagtctattttccagctacgagagagttctacggtctgtagggttattcactgtcagtctgacctgattgatttcttggcctgtgggtattatatattagtaag

SEQ ID NO: 531029 - DNA, 183 bp, Homo sapiens
taaaatttggggggaaattttaaaaaaaaatttgccgggtttttgggaatttggtttaaaaaaagaaaccctttgtccaaaaaaaatccaattttcctttttaaccctttaaaaaaaaagggaagggggggggtaaaccgggtttttttttttccccccgtttaattaattcttaaaccttga

SEQ ID NO: 531030 - DNA, 834 bp, Homo sapiens
cgcagtggctctcacctgtaattccagcactttgggaggccaaagcgggtggatcacctgaggtcaggagttcaagaccagcctggccaagatggcaaaacctcgtctctactaaaaatacaaaaattagccaggtgtggtggcaggctcctgtaatcccagctactcaggaggctgaggcagagaattgcttgaacccgggaggcagagtttgcagtgagccaagatcacaccactgcactccagcttggacgacagagcgagactctgtctcaaaaaataataggccaggcatggtggctcaacgtctgtaatcccagcactttgggaggccgaggcgggcagatcacaaggtcaggagttcgagaccagcctgacgaccaacatggtgaaacctcgtctctactaaaaatacaaaaattagccaggcctggtggcacgcgcctgtaatcccagttacacagaagactgaggcaggagaatcgcttgaacgcaggaggcagaggttgcaggagctgagatcgcgccattgcactccagcctgggcaacagagtgagactctgtctcaaaaaataataataaaactaaatgaacacacatgctgctgagtccgcagggggggcagagcagaggacagcgtggcttagtgtactgttggaagaatggctcctcctgttcagcacttctgagcccttgtgcaacgcactggcacgggcaccatccagttcctggccgtgtgaacaaccacagctgactggggagcaggcacaggcctaaccgagcaagccggaatgggtcgcatgactccagctgaggtagctgagtacatttcc

SEQ ID NO: 531031 - DNA, 475 bp, Homo sapiens
  misc_feature (110)..(110): n is a, c, g, or t
  misc_feature (196)..(196): n is a, c, g, or t
  misc_feature (263)..(264): n is a, c, g, or t
  misc_feature (267)..(267): n is a, c, g, or t
  misc_feature (272)..(273): n is a, c, g, or t
  misc_feature (354)..(354): n is a, c, g, or t
ttctgacacgcgctatgtgaggggaaagagttgattggccggtgcagacggacaggctccagctcttggcggtgcagatggacaagctccagctctcgctgaaaccctcncctgtctttgcttgcggggcacactgggtgctgtgagatttggagacgtccccgaagactcagagcctccaggagcctccctgaanccacatgtccttcctgactgctctcaccatcctcctttaggatttattcctcagtgagtgagctganngcnttggnnacgaaaacagggtgttgagtgtgcttctggggactgtgatggactccgtcagtcctggttcaacatccacaccgatccggnctgcccttgcatggattccaggttgcgggaggaccccgggctttgtgcaataccttccaggcttggtggaagcttctcagtgggtggtgggctggctgacccttggccccaggaattcatg

SEQ ID NO: 531032 - DNA, 829 bp, Homo sapiens
catcatccaggctcaggtttggagttgatcttaaggtgaaagtggaaacagaaagaacagatggatccatgtaatacaaacccaagcccatggcctccatgactttttcaaacaaaaaaaaaacaaacaaaaaaaaaaaaaaaaaaaaaacaagagggggccgactgagaataattcgccgcgacaggcggggccacctccgaaccacgcccaccgagatatgtgttaccacgtgggtgcgcccctagaaagtggcctccttgtataatcgcgagcaatcagggggccagtctccataacaaaagcagacgtgaccacgtggggcacaccggacacgcagcagtagtgaggcttcgtgggaagacaagcccgtgcctcgtgcggtggggggacaaagcagcggccaacgtacgccgagaggacatgtaagaggcttcgcgggggagcccaattgacaagctgacagctgggggtgagagcgcgggtccagcagccgcagcgggcttacacgctgctgggggcggcaaaaagacactcgttgcgtggaaccgggcagccaggaggcgcctgcaacattttttgcaacccgggaggcttggatgaaaaaaaaagaagttgggtggccccaaagggacgagcgggaccgggcctccgcggaaagggccctgatgaagaggcgggtccgggcgccacccgaacggttgaagccgacaacgggccgttgggcgggcccttggcaaggcgcctggacaggcgcccccgagggactgggacattaaaaactctgaacctcaccttccttccatataaataatacatacatacacgc

SEQ ID NO: 531033 - DNA, 501 bp, Homo sapiens
agtcgctctggctggtcttgtgagatgaacaggatatgctagacgtcttcctcacagtttggattcatatcccgtgaagactgagtagtataaggagagtatagatcagttccttgaacaggaaattcgaggccctgtgagaagagtagggagataggacgtgtcggagccaacaataagatttcgcccactacggggaatataagtatggcagagaaaatagacaaaccacatggacacggagcaggtggaataagatacctgaaaaaggtgtactctgatgggcaaaaatattgggtaagctaagagacgacatgtagaatagaccagagttgttactcgtcaaagaaagtattcggccagtacattttaactttgtaaaatagaaaaacagtagccaactccgggaagccaaaatgattaagaactagctttcaaagaaaagagatgcggaagacatcttatccaagagcgactgacaggccaagagcgactgacagg

SEQ ID NO: 531034 - DNA, 114 bp, Homo sapiens
ttagcacgtggatttctgtgtctatactacatggacataatttatttaacaatcccatattgcaagatatttagatcttgtttccagtgttccacttttatcaataattgctat

SEQ ID NO: 531035 - DNA, 257 bp, Homo sapiens
cacgaggacgtccacaccaatcccaacttcgagactctgaagtgtcgctgtgacaactgcgatgcttttttcactgctcagaagcgatccagacaggatgatgcaagacatactgaaccatatggtcaccaggccagcaaaattggttcatcaagttttttgcctcccacgttgggaagtcattagatgaacaactttcacattggtcccccacacacggcactctcttccctttcctggtgcactggggaaagaga

SEQ ID NO: 531036 - DNA, 359 bp, Homo sapiens
tgaagaagagaaaaagagaggaggaaggtaagaaagagagggaaaaagagaggaagaaaatagaagagagagaaaggagaagagaggagaaaggagagagtgagaagaaaaaaaggaggaggaaaaaagagaaaaagagagagaaaagaaagaatgagagaggagagagagagagagaagagagaggaaaggataaagggaagaagaggagaaggaaaaagagaggagaaagagaagagaaaaggagaaaagggagaaagagaaagacggaagacgagaggacgaaatggggagagaggggggcacgtctctaactctctctctctctctctctctctctctctctctctctctctctc

SEQ ID NO: 531037 - DNA, 110 bp, Homo sapiens
ggcgctggtagcgcacccctgcagttcagagtgcatccaccccacgcacgccccgtgttgtgtttctgggccctgcccatggcctcaataaactttctgcttggtgtgta

SEQ ID NO: 531038 - DNA, 439 bp, Homo sapiens
aaattggggaaagttcacacagacctgtttaacagtgaccttcattcagacttgcctccctccagcccccagccactgggattatttgccgtatttcatggtagcctgccttttcagagttgatcagaatgtaaatgtgtgatttgaatcatgcttggctaccaagcttctttacaactttgcagaaagcatcgtctttactgcgagctcagtaaagcctgggcgggtaggcgggccggcagccacgctccctgtggacacggaagcagcagcgttgacttcccccgtcagggacagttgactgtccgagggaagggcactgtggtgaaataaacctgaactgttttattgcagtagtttttttcatatctgaaattgtattatttaatattttgaataagattttaagaaataaatggtaaaggtataaaaaaaaaaa

SEQ ID NO: 531039 - DNA, 328 bp, Homo sapiens
  misc_feature (194)..(194): n is a, c, g, or t
  misc_feature (227)..(227): n is a, c, g, or t
  misc_feature (253)..(253): n is a, c, g, or t
  misc_feature (280)..(280): n is a, c, g, or t
  misc_feature (313)..(313): n is a, c, g, or t
  misc_feature (315)..(315): n is a, c, g, or t
taatgtttgagggcttgatctgatttctcttagaagttcattgctggccaggcacagtggctcacacctgtaatcccagcactttatgaggccaaggcgggtggatcacccgagttcaggagtttgagactagcctggccaatatagtgcaaccccatctctactaaaggtacaaaaattagctgggcatggtngcaggcgccggtaatccccgctacttgggaggntgaagcagagtaatctcttgaacctnggaggcagaggttgcaatgagctgagntcatgccattccacaccagcctgggttacaagngnaaaactccatctc

SEQ ID NO: 531040 - DNA, 254 bp, Homo sapiens
  misc_feature (16)..(16): n is a, c, g, or t
cccccggaactgcttnggatgtgggcattgatgatcttgtgggtgaacaggcacaggatggtctgccgaggggggttggccctgtggttcaaccccccggaaaagatcttgagtaagacatcttcataaaccggcacccccagggcctgggggaccaaaacgccatgcttgtccagttgggcgctctgtaccaagcggtactccacgccctgccaagagctctcaatggggaattccccgggtgagtggaactc

SEQ ID NO: 531041 - DNA, 106 bp, Homo sapiens
cgtgtggtgatctagaggatccctcggtcgcgaatcaggtggagcttgtggcccttcttggtgcctccaggtgcactttgtggcaaagaagtggcaggaagagtcg

SEQ ID NO: 531042 - DNA, 268 bp, Homo sapiens
ccctttttcaaaagaaaaccccttttttccccaaaaattttttttttttagggtcccaaaccggtttttatgattaccccccatttccctatggttctgaatttgaaaaaccttttttaaattccacccgtcccctttttttttttgtaagggttaaatgggaaaaaaggccctttttttaatttttttccgcttttggaaaaaccccccaaaaaacccctaatttggggggtttttaaaaaccccggggaataacccccccctttta

SEQ ID NO: 531043 - DNA, 276 bp, Homo sapiens
aaggacctgtgtccggtcagttcaccatggctctggccgcacccagaagttaccaccctcaccctgaacatgtctgcatagaactgccccttcatttgacatataattaaaagtggatacaaataccactgcagaactgcctctgagctgctactgtgggcgcaccgcctgtagggcagccctgctttgcagagagcagcgcctctgctgctgcagtgcacagccggccgcttccatacaagtttgctaacaccagtggcttgccctttacgtcct

SEQ ID NO: 531044 - DNA, 432 bp, Homo sapiens
  misc_feature (41)..(41): n is a, c, g, or t
  misc_feature (179)..(179): n is a, c, g, or t
  misc_feature (220)..(220): n is a, c, g, or t
  misc_feature (241)..(241): n is a, c, g, or t
  misc_feature (282)..(282): n is a, c, g, or t
  misc_feature (351)..(351): n is a, c, g, or t
  misc_feature (357)..(357): n is a, c, g, or t
  misc_feature (382)..(382): n is a, c, g, or t
  misc_feature (390)..(390): n is a, c, g, or t
aacaagggggacaggcgcgccgccggccgcctccccggacnggtctcccgccgtatcccggccgggatgtgccttccgtccgcgcggggagtgcaagctcgccgcgcctgtttttgtcagttctgcttgcccggctgtcggtatccgccgacaggcgcccgcgccgccgtcccacttgngatgccggtgggcggcaactatgatgcagactgggtctggnccaggcgttcgctgtcgttgntgtcgttcgccgatgttcgacctgcacgccaacgccacggnaccctgaggaaatcgccatgatcgaaatcggtgcacgcgtgcccgacgcgacgctgtacgagtacttcnaaaccnaggcgggcggctgcgcgttgggtcncaacgccntctcggtcgccgagtatggcaagggccgccgcatcgtcgtgt

SEQ ID NO: 531045 - DNA, 286 bp, Homo sapiens
  misc_feature (100)..(100): n is a, c, g, or t
gacaccccatcaagtttattgtccttaagggctgggctgcttattccagcatctcttccaacttttcaaaaggaatactgaaaacaaaggctaacttttnaaaaggggtgctcctggggggagcatggaggactcccgcagtaccccaggagcccacatttccctctccaagtagggaaacagaatcctagagtcacaagctaggaactacagatgagagagaaagcgtgctgactgtccttctgggtctggggtaaacgcccccgcgaatttagtagtagtaggc

SEQ ID NO: 531046 - DNA, 703 bp, Homo sapiens
  misc_feature (3)..(3): n is a, c, g, or t
  misc_feature (77)..(77): n is a, c, g, or t
  misc_feature (86)..(86): n is a, c, g, or t
  misc_feature (89)..(89): n is a, c, g, or t
  misc_feature (97)..(97): n is a, c, g, or t
  misc_feature (133)..(133): n is a, c, g, or t
  misc_feature (137)..(137): n is a, c, g, or t
  misc_feature (146)..(146): n is a, c, g, or t
  misc_feature (152)..(152): n is a, c, g, or t
  misc_feature (155)..(155): n is a, c, g, or t
  misc_feature (169)..(169): n is a, c, g, or t
  misc_feature (178)..(179): n is a, c, g, or t
  misc_feature (183)..(183): n is a, c, g, or t
  misc_feature (189)..(189): n is a, c, g, or t
  misc_feature (194)..(194): n is a, c, g, or t
  misc_feature (198)..(198): n is a, c, g, or t
  misc_feature (200)..(200): n is a, c, g, or t
  misc_feature (633)..(633): n is a, c, g, or t
  misc_feature (647)..(647): n is a, c, g, or t
  misc_feature (669)..(669): n is a, c, g, or t
  misc_feature (674)..(674): n is a, c, g, or t
tcnggggtcccaagggaacccctagtcccagcctccttggcttgttgacttcccctatttgctctttggagccaacntaatctaanagngatatcanaagagatttcctgcaaggcctagaggctgtgaacantacnttttattcntttggntgntctcctgtggtgtnctggacccnnttcnttgganacacntttntntttttttttttttgtagtgactcgtgctctccaacctgtcttcctgaaaaaccaaggcccccctcccccacctcttccatggggtgagacttgagcagaacaggggcttccccaagttgcccagaaagactgtctgggtgaaaagccatggccagagcttctcccaggcacaggtgttgcaccagggacttttgcttcaagttttggggtaaaaacacctggatcagactccaagggctgccctgagtttgggacttctgcctccatggctggtcatgagagcaaaccgtagtcccctggagacagcgactccaaagaacctcttgggagacaaaaaaggcatttgtgcccagctcgattttctacttgcctgtggggaggggagtgacaggtccaccccccacactgggtccccctgtcctggatgcctttnaaaaaagggacagnccgtcagaaactggagagtttntattnaaggtcatttaacccctgaaaaaaaaaaa

SEQ ID NO: 531047 - DNA, 133 bp, Homo sapiens
tagactcatgtggtctatcgatcatacgtcatgtgaggcgtcttgttagtagtgcaggtataggcatagtcgtgtggttctcagaggcagtaggctgaccacaatgtgtgagcccataattagctcagttcat

SEQ ID NO: 531048 - DNA, 126 bp, Homo sapiens
acacaaatattaaacacaaacaatactcaatatgtgatcatggacttaattgtgtaagagtaaatcttccatgtaaaagataaatcgagaaagatcttcatggacccagacatctaagcaggagtt

SEQ ID NO: 531049 - DNA, 204 bp, Homo sapiens
  misc_feature (86)..(86): n is a, c, g, or t
  misc_feature (163)..(164): n is a, c, g, or t
  misc_feature (179)..(180): n is a, c, g, or t
aaagcattcaagtaagaatatggcaataaaaaacaaaaatatcttctcagcattcaaaacaaaacgcataagtcattcctaacttnagagctttatagcattttcctagacaggaagggaaaaaacagttagcatttaaaagtccggaaagctttttcgttgnnttaattacatcaacnntctgcctttgtccaaatcccttat

SEQ ID NO: 531050 - DNA, 334 bp, Homo sapiens
  misc_feature (1)..(1): n is a, c, g, or t
  misc_feature (216)..(216): n is a, c, g, or t
  misc_feature (247)..(247): n is a, c, g, or t
  misc_feature (271)..(271): n is a, c, g, or t
nctgctgctggcttcctgttccagggtcttggctgccaccaccacggctgggccccagggctgaggcacacatggaaggactgccttgctgggagcctgggtgggccaccgttcatcggccttccccttctgggccttcgatttccactgggtgaatggggaccgctcctctgccaacctgctcctgggaggaggcatggtgctgggcagtggctnggcggccacctcggccctgaggccttctgtngctggtcaggcaatgctgttggtngtcgcagtgaccatcctcattgtagctgtcttcacggccaacacttatgggatgttggggggg

SEQ ID NO: 531051 - DNA, 115 bp, Homo sapiens
gatagaaccaggacgttatgttagtgcacggttaacagaactgggtgtccccatgtcggtgacagtgatggtgatgttgtacatcggactatgagatctctcatgtccagatgtt

SEQ ID NO: 531052 - DNA, 1148 bp, Homo sapiens
agcgggtgagcggcatggctggctgtgccgggaggaggcggctgcctggcgccggggcgacctgaggccgcggggctcctgatgggcctctgtgtggcgctgtgtggtggtgcaccccagctgtcttgtcaccggtgcccccgcgccagggacttggactctcgcccctcacgggcctgctccgtgttgcctgtgccgaggccccttgcctcttggctcgcgccgcccgccgtgaaacgcgagggcccaggccggttttcactcaccgtggccacaacccttgcgctgcagcctggtgttggggcctcgctggactcgggggctgccggggacccctgaaggctgcagggccagaggcagaccgggggagcccggggtaactgaggtcagggcccacagggagggacaactcgctcctggacctcggggacacgccaagggactttccctcttcaaagccgtttcccggtgggaagtcggggacggatggatccgtaggggccgggaggcagagcagggaaccgggcgtggggaaacagggcttgaacgggcggcaggggaacgtcgggtccccggggggcccggggagtgacatagcggaacggtccccctgggaagacccgagacgttccagcaaaggaggagcacgttgaacaaccgggggagcaaagggttgcggccccaaggagagaggcaattggacgaagtgccgagaggtatcccttgagaggacagggtcgccaacgtatgggcggttgcctggacaaacaaggatggcacaaaagcatttggagagtgccacgaaaggggaaaacttcagagagggggtcgaatggtgggacagaagccccattgggtgcacacttgggggttgggcgcgcatacacgcagggggagtcacggcgtagactgtggcccaacacttcggcaggagcatcacaaggaagtgcaccccgtgtccagagggagaaaggacacccagaaaaggggccttgtgactgagacagagccacttgggaggacctattgggaccagcgagggccacggcaccccagcgcaggctatgagtcgatgaggcacacagcgcaggagcacccacttgggggagacgccgctaccacggaagtctcccagtagtagcaggtgg

SEQ ID NO: 531053 - DNA, 106 bp, Homo sapiens
gttgggactacagggtttgcggccaccacttcccagcttaattttttttatttttaggtagagacaggggttttgccattgtttggtcaggctgggtctcggaact

SEQ ID NO: 531054 - DNA, 524 bp, Homo sapiens
ttggggctccatcagcgggtcagaaaagagtacttatttaaaggttggtgctcgtaacaaaggtggcccgggagaaccggcatatgtggatgaaccggtaaatatgtcaactccggcaacggtacctgacccaccagagaaggttaaatggagagatcgaacagccaatagcatcttcttaacatgggatccacctaaaaatgaggggggttcaggcatcaaaggatatatagttgaaagatgtccaggtggttctgataaaggggtggccggtggagaaccggtggcagaaacaaaaagggaagtgacaggtctggaggaaggcaaagggtatgcctacggcgtgaaggccttaaacaggcggggggctagcaaaccaagcagacccacagaggaaatcggggcggtggacacacaagaggccccagaaatcttcctcgaggtgaagctcctggctggtctcacggtaaaagctgggaccaagatggaacttcctgccaccgtaaccggaaaaactgaaccta

SEQ ID NO: 531055 - DNA, 390 bp, Homo sapiens
agagcagagacggaatccacatgtcctcccctcagggagctttacattctagaaggggaagaagatctccccctcagctcaaaaaaaaaaaattggaaagaaaatggccaaactcatccataagctccaatctgagctgagccctcagggctgacccggacattatggggattcctgtagattctcctattcgggacagcaccaatttcagactgagcccactcttctcaaaatttgtcacctccgcagaccttgatattcctgctatccgcagaaatttccgggcaggcgccttacagaacactcaaatgcattatggccagaaccaactccatgttgttcctatctgggctggcccttcccctgggctacatcttagggatagcacca

SEQ ID NO: 531056 - DNA, 195 bp, Homo sapiens
tgtaggttcagtagagtgtttttattgttttcttttttttatttcaataggggtgagagttcagtatatgtgggattgaggtaggggtgtgagcttgaacgctttcttaatggtggctgttaaggcctactatgggtgtaaaatggggaatctggatgggcttaggtgagggaggtaggtggtagtttgtgttta

SEQ ID NO: 531057 - DNA, 159 bp, Homo sapiens
gattgaagcctatgcaatagcgatttaggtctgtctgtcgtaggcgcatgagcttgtaataattatgcctcatagggatagtacaaggtaaggggtatgctatgtgttttgtcagggggtctaacagatgagtgtgaggcgtattataccattagccgc

SEQ ID NO: 531058 - DNA, 293 bp, Homo sapiens
  misc_feature (16)..(16): n is a, c, g, or t
  misc_feature (46)..(46): n is a, c, g, or t
  misc_feature (62)..(62): n is a, c, g, or t
  misc_feature (68)..(68): n is a, c, g, or t
  misc_feature (85)..(85): n is a, c, g, or t
  misc_feature (222)..(222): n is a, c, g, or t
  misc_feature (231)..(231): n is a, c, g, or t
gagcgacagtcccgangggcagcccagcacttgagccccagctganggaacagcatgggcangtgcangccccacctgccagggncatggacacctgccacctttcttcaacaagagtcccccaatccaggctacccttccagagaacgctacccacccagccagggttctctcggggaagatcttcgtcttgctcaccttagctttcttgccttggagcancgggctcgngaaagaaagcacgctgggccagggaggcaggggtgcccaagccacagggagccctgggggaa

SEQ ID NO: 531059 - DNA, 125 bp, Homo sapiens
ggtgcatgcaatggtgtcaggaagtcgtggaaggtaagttgggcatgttccaccgactagtttcaactgtgtccattatcatgcttgtggtgactctctgagttgaaaatgtggagctcattgtg

SEQ ID NO: 531060 - DNA, 1508 bp, Homo sapiens
tcacaaatttcattttcacacttgtgggagtctggcttgttgagaaggtgggccgcagaaagcttacctttggtagtttagcaggtaccaccgtagcactcattattcttgccttgggatttgtgctatcagcccaagtttccccacgcatcacttttaagccaatagctccgtcaggtcagaacgccacttgcacaagatacagttactgtaatgaatgtatgttggatccagactgcggtttctgctacaagatgaacaaatcaactgtcattgactcctcctgtgttccagttaataaagcatctacaaatgaggcagcctggggcaggtatatcactcattttaccatacgaatatataataatatttcaaaacgaggcttatgtttaagttttcagagtgcttgcacttatagcagttcttttaaactggccttcataactacattactttgcagcatatactggtgatagtggatgcaaagcattgcaattgtgtgtttcacacagagtagaaagcactcaggcctagacttttggagacccagatttctctaataaggtataggagtttggatctttagttttaggcagctattcacaaatactgccaaggcaatttctcccactgcatattgtttaattgtactgtatttccaaactcccaagcttttaaatgaaagaaaactgtaaagtcaaaatgaattactatcacgttaggttgggcacagtgcatcacgactgtaatcccagcactttgggaggctgaggcaggcagatcacttgaggtcaggagttcgagaccaccctggccaacatggtgaaaccccacctctacaaaaatacaaaaattagctgagagtggtggcacatgcctgtaatcccagctgctcaggaggctgaggcaggagaatcacttgaacctgggagatagagattgcagtgagctgagatcaaaccactgcactccagcctagacaacagagcaagactctgcctcaaaaaaaaaaaaaaaaaaaaaaaaaaggattttctttacccttttaactttctttttcgggggaaccttttttttttttaattctctaaaagggccttccccgggggtccgggggaattcccgcaacttggggcgctacacttgggcgaccccctcggggtatggaccgatggtctcggcagagaggtaaaaacccctctaattggggttcgggcgggctgggggacacacatggccttaaagagggcaactatttcgcgtcgttaatcaatactgtttgtcttgccgaaattttgatgaccccacgcttttatttcccccagaccatctacaagccgggggcacacggcgtcacagggagacggccacacccctacactgggtgccgacagctctcatagaaaaagaattcttctttgtgccaacccacaacacggaagaggcacaacacattgtgccacgctggggctgcttctcaaaagaacaaacaacacaaatttgggcgc

SEQ ID NO: 531061 - DNA, 87 bp, Homo sapiens
cctggggatacaccaacctagtgggtgtctatggatttattggttctgactatttcctctaaatggaagcataccggttggaccttt

SEQ ID NO: 531062 - DNA, 225 bp, Homo sapiens
ccagatacacaggtgtcgtgaaaactacccctaaaagccaaattgggaaagggaaaagactcatataaaacataaaaaaaaattggacacgtggattccgaggcaagtcccaccactactggcccatctgtatctataaatgcggtggcttccgccaaaagaaccattgaaaaatttgagaaggaggcctgctgagtgggaaagggttccttaaaggatgcctgg

SEQ ID NO: 531063 - DNA, 321 bp, Homo sapiens
caggaagatcccttgagtccaggagttcaagaccagcctgggcaacatagggagacttggtctcttaaaaaaaagacatgataagaaaactataaaccaatatcccatatgaatgtagaaataaaaatcctcaagaaaataacagcaaactgcaaactggatccaacagtacattaaaaagattatataccatgaccaacatttatcccaggaatgcaagagtggttcaacataaggaaatcaatcaatgtgatacaccacattatcatctcaacagacacagaaaagatatttgagaaaattcaatacccttttaagatt

SEQ ID NO: 531064 - DNA, 759 bp, Homo sapiens
cgtttctgacacaatcccttggagtcgcaaattgtggtcattctccgtggttgaaagttcccttcgaacacttcatttgagaccttattcccttatttgccatcactgtaatggtcgtggccgttgagaatggtgatttggactcctaacgctctgtgcccttcaatcatggggtaatggtatttatgggttcactcaaccacgaatgggaactggtgggctttataagaagaggttaaagagctttgagctagcatgctcagcccttcatgagatgcctctcactagagtgatgtctaagtggacatttgaggaggcaactgccaccggagggccccctccacgggcaatctctagtgtttaatggatcccggccccctgagagagtgccttgtggagcgctgggagcagtgacctggaccaccaccaggaccccagaactctggagtcagatggcagcaatcagcgcccccttgggtaagctatataggcaccagacctgcaacccattcgacgcagccacgctaggctgcagccccgctttagccacaggcacggggctacctgaggccatgggggccccatccctgctccagaggtccgcggaggcagcacacgaagtccaaagagattattctcttcccacagatacctttttttttccaagacccgtttacagcatctgcttcatttccctcacctttcccggctgatttgaggtaaactttgaagtaaataaaagctgtgtttgagcatcca

SEQ ID NO: 531065 - DNA, 139 bp, Homo sapiens
tccatagctagctcgggtctccagtcgagagatgcgccgccctaggtctcgatttcctcggtcaggccgcgcaacgcgtttatggtcgtgatgatggtgcccgcgtccacggtttttctggttacgctccattcgggcg

SEQ ID NO: 531066 - DNA, 800 bp, Homo sapiens
  misc_feature (166)..(166): n is a, c, g, or t
  misc_feature (197)..(197): n is a, c, g, or t
  misc_feature (226)..(226): n is a, c, g, or t
  misc_feature (243)..(243): n is a, c, g, or t
  misc_feature (447)..(448): n is a, c, g, or t
  misc_feature (473)..(473): n is a, c, g, or t
  misc_feature (648)..(648): n is a, c, g, or t
  misc_feature (712)..(712): n is a, c, g, or t
  misc_feature (719)..(719): n is a, c, g, or t
  misc_feature (770)..(770): n is a, c, g, or t
cgggcgcagagactttacctgaagaatgggggcgctgaaaaacaaaaaccaccacatcaccgggtcaagaaaccgagaccaaactggccaacatggcgaaacctcggctctactaaaatttacaaaaataatataatgaacaaccactgtctctaacaaaaggagnttaaacattactcgtgggggggagggaaccncacccccccacaaaaaataggggacaaancggatgacggggggctngtttaaaccttatactataaaaatactgggataaaaagagaagacaatcttaggtaatcttggggtagcgaaaaaatctctacatacagacacaaaaggcattacgatataataacctggaaacacagcttaatcaaaaagtaaaccttgagatacccaaagacaccgagaaatagcgcatgcgatccatagccaaatcctgcnntacatgtatctgacaaagggccttnatataaaatatatacaaggaactttgcgttctattgaacgggcccacttccagccacgtcctcatggctcacacccataatcctaataaaaccggagacaacgatggttgtccttcagcttaagaactatagacagtcctaacacatggcgggcggtaggcagagttaaacgcanccccggcctcaaaatgggaacacaggccgatgcttgtcccaaaaaacaaaagattataatccgncggcttncgcctgcttgccgcggggctaacaaataaacaactacacatcggcgcaatncaacaaccgtctatatgcagtaaaggatag

SEQ ID NO: 531067 - DNA, 563 bp, Homo sapiens
tggttgtaagcatcgagcgaggagggaatgggagagggaagccgctcctactgtcaagaaaggtaattgtgctgagataagtgctcctgggggcacacactcccactcaaagcctgcaggctcaatgttaggtacttaattggaacaatcccatgacagccttttgacaccggaggtgctaggaatcctgtctacccaaccagaagtgaactctcgagtgggaggacagtagggaaaaccaaccagacctctgtttgtacgacagatgctgtaaggttggggcctggctggcaaactgtcagtgaatctaaacacaaacatccatatggggactttgcctgacccactcacttacaagtgcttgggaaagggccaacctgaggatggcaactatataactgtggagacattcaggcccaatctcccaacataagcaaacatctataataggctccttccaggccaagtctagtcgggaccacatacccaatatactaacaggaaaacaacttggagggggcccagggagaaagctgatcatgactcttaacttcgagaactcc

SEQ ID NO: 531068 - DNA, 602 bp, Homo sapiens
tcaggccatagtcaaaatagagattgcgatgggaggaccagtaaaggtctgccctccctgacttcgctggtggaaaactggagagagggggcattgagagctggtgcctttgaaaagacaagttgatcatgacattgggatggcgccttcgaggtgtaccaaagaaagctaggaactgtccacaacaaatacagatgtggtgagttcatggaagggtaaggagaccaactgtgactgtgtgttactgaaaacaattccatattgaactctgtatggctgcctctgtcactgaatatgggctccaaagaccttatagcaagatttcttcatatcagtacaaggtaacatctgagggctggatcctttctctgtagtgggggctgtatagtacattgtagggtgtgtagacagcatctctgatctctatgtacttgatgccaatatcaccccatctccacaccttagttacacaccagaaaagttccaagacattggcattgtgtgggacaaatcccgctaggtgagaatggtatagctgctctcattgcaaaaagaatacttagacggtgatataaggaagggatatggctcactgtcaaagc

SEQ ID NO: 531069 - DNA, 489 bp, Homo sapiens
  misc_feature (40)..(40): n is a, c, g, or t
  misc_feature (193)..(193): n is a, c, g, or t
  misc_feature (196)..(197): n is a, c, g, or t
  misc_feature (230)..(230): n is a, c, g, or t
  misc_feature (252)..(252): n is a, c, g, or t
  misc_feature (254)..(256): n is a, c, g, or t
  misc_feature (295)..(295): n is a, c, g, or t
  misc_feature (336)..(336): n is a, c, g, or t
  misc_feature (365)..(365): n is a, c, g, or t
  misc_feature (387)..(387): n is a, c, g, or t
  misc_feature (465)..(466): n is a, c, g, or t
acataactttataccaaccataattcagccagtcaaaatnccaaaaacaatccaaataacttccaacatactagcggtcaaactaccgaataaacttgatgcagaccagtattcccaagttgcaatagtatccaatgactttgctgaaatgcataaaatggacaagcctaggtatctgcgcaaccagcaggcnttnnttttttttgtaccaaggctagagaatgcctggnaaaagcttgaccagaaaactcncnnnagtaactgttactgccctactattcttaagatacttaanatttggttaaagaacctactggctatgtaacattctaaggnctaccagatgcaaccaaaaaatattagcnacatggggtgttgctaaatatngctggggtttacaaaaccccttttgtctcgttgtcttttctgtttggcttcttttttttctttgccccggcctggcannttagagggttgttgtggttgggg

SEQ ID NO: 531070 - DNA, 262 bp, Homo sapiens
tttttggggggggggggggggcccaaattttttttttctccctcccccttgggggctttttgagggaaaggggaccccttagggaaaatatttttttttaaccccgcccccggggtttttttgggggttggggccccctttttcgggggggcccccccctttttgggggccccccccccggggctttcgggggggggggggccccccttccccctttggggggccggttcccccccctttttttttcccctgttccccccca

SEQ ID NO: 531071 - DNA, 229 bp, Homo sapiens
cacattttaagttcacctagggataaaaatgactccagaaggactaagacagtcataggcatacccagcacccgaggtcatgtctgctctaagcaaggggcctaaatgcacttaattattcactaagagatggtgaaggtactccttttaaagtgggatgtctaccaatgtacaatcttcttatgaaaaaatacctagatgtggggctaagacaaactacaacctatgt

SEQ ID NO: 531072 - DNA, 486 bp, Homo sapiens
ccgtgtcatccccttcgtgaggagggcctggagagtggtgacgctggactccaggtcatcatggcagacagtgagatctgtggcaccaagggacccaccttccagcggcatctcctggacacgcgctttgagctagccttagacattcctgaagaggaagctcgctactgagccaagaagctggagcagctcaatgctatgcgggaacaggatgaatattccttccaagatgagcaagaaaagcctctgcctgttcccagcaaccagtgctgcaactgggaattattttgggctggggtgagcagcacaacgatgaccccgacagtgcagtggatgatcgtgacagtgactaccgcagtgaaacgagcaacagcatcccgccgccctattatactacgtcacaacccaacgcctcagtccaccaatattctgttcgcccaccacccctgggctcccgggagtcctacagtgactccatgcacagtt

SEQ ID NO: 531073 - DNA, 250 bp, Homo sapiens
cgcggatgtgcaccattacacccagctaatttttaaattttttgtggagacacgatctcactatgttacccatgctggtctcgagctcctgaccacaagtgatccttctgccttggcctcccaacgtactggtattataggcataagctactgtgcccagccttttactaagtaattatatgtggaacaacaggtccagggcagaggaccaacgtcgacccggccgcgaatttagtagtagtagtcgacc

SEQ ID NO: 531074 - DNA, 122 bp, Homo sapiens
agatctggctggcaagtatcgtcagatcctggaaaaagccattcagtttatctggagcagaacaactagaagctttgaaagcttttttggaagcattggtaattgagattttcagtttcgtg

SEQ ID NO: 531075 - DNA, 950 bp, Homo sapiens
gggctgcactcagcgccggaccgtgagctagcggcgcgccatgtcccaccagaccggcatccaagggaagagctgggacagtggaggcgactgggcttcagtacgctgtcgagcaccagcaagtgaagatgtaaagagatctttgccagagcagacatggaacgtacagacttctgaaaatatctatttgacaaatgagcaaactgtgtgatgggactcatataagtcagccttcagattcctgggatacagggattatgattccttgtgttttaccccctgttggaggacaaacaaccatgctatatatactcaggtaagattctcagaatgcccaggatatgacatggctattcatgtgcatggtctccagatcattctcatgttcgtcaaaaaatgttgtatgcaagcaacaagagcaactctgaagaaaggaatttggaggtgggcacattaacgatgaacgtattgggccccagtacaggaagatgtatcatttacctggcatctacaaaaaatacttgcggtcaacaattcttcccctgcccccaatgaactgcagctggagggaagaaactacggacagatttaaactcactgagggtccagactgctgtggcggttggcccctacagcattccaacactaacaggagtagcatttccccatttctcgagaagccttcagcgtggggaaaacttgatcatcggcagccaactaatgtgcgggtgcatcagctttacaactgcattctattgggcacacaaacatcgacatggagttggcacgcgttcagggttagtcgtccatttgttgttaacttccgtgggcacatacagccacggaaaataaggcgggacagcgataacgggtgtcacagcaacgggcaatgagacaacgttaacatacgagagagacctagacagcgcaatagacggaagacacgcgtt

SEQ ID NO: 531076 - DNA, 549 bp, Homo sapiens
ggcctctctatagtgtgcaaaattgagtggactggtaaaagctctatcttacaaggtgaaataagaaaaatccaatacaaaaagtacatcaatgccttagtggtggtagatcctttactctgtttcttgaacgtggacatattggaggtctgagagaaaatgaaagaacacctctgggtccttctgtccagttttcagcactagtcttactcagctatccattatagttttgcccttaagaagtcatgattaacttatgaaaaaattatttggggacaggagtgtgataccttccttggtttttttttgcagccctcaaatcctatcttcctgccccacaatgtgagcagctacccctgatactccttttctttaatgatttaactatcaacttgatacataacttataggtgatcgtgctacttcctgattccaagaatgccatttgctcacaacgcatagcactggacagtgggactgagagggagtcagcaggcatgctgcggtggcggtcactccctctgacaatatccccaggaaaggaaaggt

SEQ ID NO: 531077 - DNA, 209 bp, Homo sapiens
  misc_feature (56)..(56): n is a, c, g, or t
agactttctggactttaatagaaaaatgtgattttaagattgctttttcttttgtnttagcgtaatttttccctttatattcccctcatcaatgtaaataaacacacacacacacacacacacacacacacacacacacacacacacacctttcaccacaatggtaatgcttctgtaaatgcctctatttgtccagttggctgaaaatg

SEQ ID NO: 531078 - DNA, 882 bp, Homo sapiens
  misc_feature (639)..(639): n is a, c, g, or t
  misc_feature (690)..(691): n is a, c, g, or t
  misc_feature (821)..(821): n is a, c, g, or t
ggacagtcagccgcatcttcttttgcgtcgccagccgagccgcatcgctgagacaccatgggtgaaggtgatggtcggagtcaacggagtttggtcgtattgggcgcgtggtcagtcatggtctgcttttatactctggtatgagtggatatagttgccatcaatgacccctgtcattgacctcaattacagtggattgtacatgttccgagatatgattccacccatggcaaattccatggagaccgtcagaggctgatgaatcggtgaagcttgtcagtcaatggaaatcctcattcaccatcttccatgaagcgagatcacctccaaacatcaagtggggctgatgctggcgctgagctacctcgatggagtgtctcactggacgtctttctaccgaccatgtgaagaaggcctggggcatcatgtgtgcacggcgtgtgacgccgataaaggggtccatccattcgtcttgactcccccatcatgacttgatgtagcctcccgattggtctccgctcagttgtggctgctggaatcccattgtaagatacggtaggtgagcaatcgatggtccctctatatgaatctatctcgaatgcgaaatagcgctatctcggttgctatcccaatctccangatcgtagtcttactaagtcgaaccgctctttggggcgcactatggtttcnnatcctagttgatcatagcgttagagcgtgatacggttgggaagggacttcagttgaaccatcaggtcgcagtgtccagtacactggcacaaccccgaagaaagactgtgtggactgtgcgcccttccggnggaaagtctgtaggcggtgactgggcgcgcggtgtgcttctcgcagaagcagttcatcccc

SEQ ID NO: 531079 - DNA, 255 bp, Homo sapiens
gggcattacacccactgctctatttggccgccagcctttatgtcactctcttcagcatatgtgcggcggataccctttcctcggggacgagaaatccatggttatgttgccctatccagtgacaaaaatattggcagaagtcgagtggcaccgctgttgccataagtatcttacacgtaaaccacgtcgaaagatccagggtgcctctctctataggtgatcacaccagttcttcctaggtaagcacctccggtt

SEQ ID NO: 531080 - DNA, 647 bp, Homo sapiens
ttaccctatcgtcgacccacgcgctccggaagaagaacggcgtcgctgcttagagatgccatggcagatggcgtaaaatagtggtcatataaatgatgtccggcatgcaaacatctggaggtacagccacttcacgttgcagctgctaaaggctatacggaagttttaaaacttttaagtacaggcaggcgtatgatgttaagtattaaagactatgatggctggacaccgtcttcatgctgcagatcattggggtaaagaagaagcatgtcgaatttgagtggacaatctgtgtgatatggagatggtcaacaaagtgggccaaacagccttagatgtagcagatgaagacataacaggatatttagaagagttgcaaaagaaacgaaaatctgctccatagtgaacgaaccgggacaagaaatctccactaattgaatcaacaagcaaatactgggacaagtaatcaggcagcaggaaggaccggtcaagaagacagaacgcgacgctcgacttatgggacccagagaacacaagcgcagtcgccgtaatggaaatcacagggaaacccggaacacgggctagatgaaacgaagaagaagggcacagcaaggactgagcctaggcggcgccagtgaaaggaggat

SEQ ID NO: 531081 - DNA, 385 bp, Homo sapiens
ttatactggaagggtatctgttcactcagcggctcaaggaactaccaaggtaaggaacatttcaggggcgctccattcaactcctaccaattctgggaaatttaagtgaaaggacagcgtatcccagggtatatagccttatgggttagaaaacatcacaacgattataaaaagacaggcgcaagcagcactcaactttggaaagcacttatttccggtaatctgaaaatgagaattcttttcccatagaaataggtggcaatgaggttagattccaataactcataaaagcggattaacatacacggtagctcaaatatacaagatggtcagaaagatcctggtacatgctcgcttcttttcaacacatgtgcccttacggaaa

SEQ ID NO: 531082 - DNA, 143 bp, Homo sapiens
tgatgaattaagggtgttagtcatgtagcttgtttcaggtagcaatagtatagggtcatggtgctggagtttaagtttagtcctcagcatgcggtagtagttaggataatataaatagttaaattaataatggttatgttagg

SEQ ID NO: 531083 - DNA, 291 bp, Homo sapiens
  misc_feature (111)..(111): n is a, c, g, or t
  misc_feature (245)..(245): n is a, c, g, or t
cagcaaaccactcacagagccaggaagaaatgaatgctttggtattaccagggggggaggccggcccggctgaaatacgctatgaccatagccaggagatactgatggagnaaggaacacagagagggagaggtcacatcttgggagaggaagattgtggatatagtggaatgggggtctggggaggggttgcccatcagagaagggacctcagtgttggggtgactgtcctcatgtggaaattncggggtggaggggtattcgaaggtcggatgcaaatccgagaagccg

SEQ ID NO: 531084 - DNA, 833 bp, Homo sapiens
agtgaaaaccttatggctgatgaacgtgggatggtgtagaccccctaacaatgctgtccgacctccttctctctcagcatttgctgctcggatgtatttttccgcttctttagtaattcaaaggattttctctccgatcaaagaggttagtttaaaagttaaatgagaatatgggaccagaagataaaatcattatttttaaacaggggaagttctttcttttaataaggacttctattagatattgtttaactttttagcttcctgtgcttcaattgagttccatgaaagcatttttgtgtctacagaggagtgtttgggacttgtcttgtggttgacagcagcagtttacctgatgggggtttcataggatgtgatgccctgtcaccaggtgatggacttgatgtaggaagtgccaccagcagtctctgccacatggcatattctcccaagtggcccttgccattccagaggatgttgggttgcattgtctgactcattaatttacaaaggattatttattttctaatgctctatagcttcttcgccttcaggatgtgggctgtgctgctgaacggagagggggtagagcttgtaagccgtgacttattctaatccggtccatgttcatcttcattcatgcctttctcctgtttctcctgttatatgggaattggttcgatatatttgggttgacatgctggttctgggtttggttgaccctatgttctgtgcccatctgtttggtgcccgggccggcgcttaaggaatacccccggggggcggcccttgtcccctggagcgggggttggctaccggggaagccccacgtg

SEQ ID NO: 531085 - DNA, 86 bp, Homo sapiens
ggaaggtcccatggcctgctgggctgtgctcggcgcccccacaactggctaccttgtgggaataaacagacaaattagcaaaaaaa

SEQ ID NO: 531086 - DNA, 634 bp, Homo sapiens
tggcaaggaggaggggtgggggtggtggtgaaaaaagggcttcatgcagcaagttttttttgaaaaactgcgtgtgccggaccctgtgctaggtgttgcaacagatggagtccctgctttaatggagcgtaagagtctagaggaacacggtactaaagaactccagataatggcgccgggccgcggtggctagaggcaggaaaactcgcttgacccagggaggcggaggttgctgtagacgccgagatcgccgccactgcacctccagcctgggcagacagaacgagactcctcaaaacaaaacaaaacaaaacaaaacaaacaaaaaacaattacaaattaatggccgggccgcggtggcttgaccgcctgtaactcctagcacttgtggagaggctgaggcgggcggactcacttgcggctcgggagttcgagaccagcctggccggcgtggtgacaccccgtctctactattacaaaaaaaaagatttggccgggcgtggtggcgcgtgcctgtagccccggctgcttggagaggctgaggcgggagaatcgcttgaacccggaggcggaggttgcacagtgagccgacactgcacctctgcactccagcctgggtaacagagtgagactc

SEQ ID NO: 531087 - DNA, 379 bp, Homo sapiens
cccttattccaaggcctgaaaaagtgccccccatggatgttaagtagaaattcaagaaagtaagatgttttcagcaacccagtaaacccctacccccccttttggtttgtaaaaggttttttatacatttccaacaggttgcccaaaagttaaaaaaatggggtcttttataaatccaaaggcctgtgaaacccttttacaaattttttaaattttcgggccaagggtaacgcgtaatttaattaaatttcaaccagttcctccagtaagccttaggaagggaatatgatatcccaaatagtttataaagactctatagtttttataattttttttacgggcaaatgtcatgccccaataataaatttttgttaactta

SEQ ID NO: 531088 - DNA, 1135 bp, Homo sapiens
gggcggaagtcgtggaacgcgtcgtgcgacgcatcgcgcgatggcgcgggcagggacagttgcttgtgaaccgtgaacacaacaaacagttatggatcatgggaaaccaacatccttctattagtaggcttcaggaaatccaacaggacagtacaaaagtgtagaacagcaagtatatcggcttcagtgggtctgtccagatgaccaagaattacactgaaacctggcagaggattctaacaaaacagctttttgacactagactctgtagactactggaagagaacacacggcgacatatccagcaaagactaggaagcgggcagccacaggagaccagaaccgtcttctcaaaaagagtaggcagcagaatgcaaaacccacccaacaccgggatggaagcaatacaggcaacataacgggcgggcaaagccccaggcacactcggtgagagaagcaaacatggtcgcacagtgtgattaatgggagagacacatgcggtaacctgatgaagtaggaagaacggcaattccaggaatattcatgctggacggcctgacacaaatggtcaccaaactggggagggaaaacatcataccttgcgggacatagccaaggtagtcacactttaaccccaacaatcaggatggcgggtgcaaagagacatcaatcggaaggactggcatgacacaaagagcaggcacttcaccggtgacgacataacagcaaggaaaatgaagaaaaacactatcaaggtaggacaaaacaacacactacggggaaagggaacaagcagaaaaaagggcaccgaggaggaccaagaataggacacacaaagaatgagagagatcacaaagagatgaaaaacataaaggacacatcatcccgggggtgccccgagggacgtgacaccgagtcccaggagaagcccaaaaaaggaggagagccgcgaaagaaacaccaaacatccgggcgagaagcacaagacaagaactccagacaggtgtacaaacggaatgcgagaggaagcaaccaacacaagactgaggagcaagagaacgccacagagacaaaacaagacagagagacaaaaaacaagcaacagcaaccatgagtggacgccaaacacgacaga

SEQ ID NO: 531089 - DNA, 415 bp, Homo sapiens
  misc_feature (77)..(77): n is a, c, g, or t
  misc_feature (84)..(84): n is a, c, g, or t
  misc_feature (86)..(87): n is a, c, g, or t
  misc_feature (169)..(169): n is a, c, g, or t
  misc_feature (172)..(172): n is a, c, g, or t
  misc_feature (184)..(184): n is a, c, g, or t
  misc_feature (227)..(227): n is a, c, g, or t
  misc_feature (229)..(229): n is a, c, g, or t
  misc_feature (266)..(266): n is a, c, g, or t
  misc_feature (314)..(314): n is a, c, g, or t
  misc_feature (341)..(341): n is a, c, g, or t
  misc_feature (350)..(350): n is a, c, g, or t
caaggtaacgtggaaggtgactgatgtaataaaggcaaagtagcaaagatagcaaggtaacaagttaacagctgtancaatgangnnggtgtggggtccctcaggaggttctgctcctcttacaaagtcactgtcctgattgctggtccctgactcttggttaggctgnatnaagcttcctganctcatcttttatttctcagggttgaatgtgcagagcctgcctntntcttctctactcctcttctccaggtcctctgcacctntttcttcatgaaagctcctcagtccagtcctaggcactcagggagtgnccatttctgggcccacttggataattngcatctttngagggacattctccataacagtccccaaccttatggggcagtctttttgaagtatttcttcatgg

SEQ ID NO: 531090 - DNA, 113 bp, Homo sapiens
  misc_feature (26)..(26): n is a, c, g, or t
  misc_feature (93)..(93): n is a, c, g, or t
gtacattaggggtaggtgtgttggcncccagcactttgagaggcctaggtgggcagatcgtgtgagtctaggagttagaatccagcctgggcnacatggtgaaacctcgtctg

SEQ ID NO: 531091 - DNA, 1135 bp, Homo sapiens
  misc_feature (196)..(196): n is a, c, g, or t
  misc_feature (531)..(531): n is a, c, g, or t
gaaccacatctacctactcgcaagtttcctcggtctccatatgctgatcccaactacgcgcctccccaatagcccttggaggggcgggcagagcggcagtgctaggtgaaatggcaaggcatgtcttactggcactgtctcctgggtttctgacactgcagtctgtgtatgcgtgcacatagtcagggctgatgtnccggaaacatatcagtctggaagagtgatatggacctgagccaccttctggggactttggtggtgatgaagagagaagccgagagcgatgagaccaacgagcctaatagtttgcgagagagtggacgcgaacgcttctaatcgcttattgggcacaaaatcctctgagctcgggatgatggctcgcgagcggcactccttcaagcactggtgtggacgaagatggcgccacggttcacctatctttgagtcagggtggtcgtggacgttccctttatcggatacaatgagcctttcctctcgtggaggacgctgtatggactgtcgcgaagaatnccttgattttaatccggaggctggttcctctgcgggaagcttattcggccttcagagagtgggaacctggggggggtaaacgcaaggctccttaaggctccatcacgaccaaaggaaacggcccgaagactccttttactagtaccgaatgggcactcacagacccctttggggcacagtgctcaagcggcgtccaagtgcctgtgatgcgcggggctccgatcaaaatctccacaggcccaaagggccctacagagcgatccccgttgaaagttgctgtgcgtgcaccactacggggggcttcactcaaaagtgtgtccacgtgtcgtggaacgtgctgaccggcgaaacgctttcgctcaaacgggatagcgcccttcacaagtcgttctgaccccaaccctggtctccgtaggagttctgccccatggaatgtttatcaccagcaaaaacggggcaagtctattcccctttatacaccactccagaaaacgggggttaccaacgacgcccgttgggaaccccctgtgaacgaagtcccccgttgagaattccacgggaaacaccacacggctgcccttccagggggggcccaaaagcccat

SEQ ID NO: 531092 - DNA, 112 bp, Homo sapiens
ctgcctctgcctccagagtagctgcgactatgggcatgtgccaccacgcctggctaacatttgtattgacctatttatttattgtgatttatatctttttttattttggaga

SEQ ID NO: 531093 - DNA, 151 bp, Homo sapiens
gacgaagaaggcagaaggagccacgagtgcatcatcgacgaggactgtgggccaagcatgtactgccagtttaacagctaacagtaccacctgccagccatgccggaaaaagaggatgactctgcacccgggacagtgagtgactgtagga

SEQ ID NO: 531094 - DNA, 246 bp, Homo sapiens
gtagggaatttcccccaaaaccctgacttcccacctcagcctcctgagtagctgggactacaaatgcgcaccaccacaccaagtaaattattgtatgtttatgtagacggtcttgccgtgttgcccaggctggtctcaaactcctgggctcaataacctgcctgcctcagcttcccaaaatgctaggattacaggcatgagccatcgcgcctggcccttcccatgttttcaatgtgcctctttgtg

SEQ ID NO: 531095 - DNA, 277 bp, Homo sapiens
tccgggctcctcatgtatgcgtggggagggagtataaagccccaggttggtaagggagggcccagaccgaagaaggttgggtggatagcagaaccttttggtctccctctgattgctcctaagcctcacgctcccttgcccctgggtgttcctgttgcttccctagatcttctcctgtgaccttgtagcataaacctttccaccgagcgcttgagacacttacatttgaaccgggatccattgaggaccccggggttaccggagctcgacattcgta

SEQ ID NO: 531096 - DNA, 787 bp, Homo sapiens
cgaagtggccgtggtagaacatcggaaaatatctgggggactttaatttggacttatgtctcaagacatacaatatccccacataaagtacaagcagccaccgtaaaacatatttcctggatgatatctctcattacttcaaatccgtggtgtggaggaaggaggttcaagaaatccatctcacaataaagacctcgagggtttgaagaggatcatcataaaaactatcagtgtgacaaccagctcttacaccgtggctctaccaccacaatataataaatagtttctctaagtgaaaacaaaaagtggattatcaggaaccagtgctgacaattattaattggccgtgattggtatcacaagggagctcactcgtgaagtggtctcgtggtgataagggttggatacaaaacaagaaataaggctgctatagctccagttagcattgtgaaaactcgtgccaagcacgaagatctcctcccagctcggcatggatggcaaccggggaacaagggaccgacccagggatgtgtgcaggtcccaaggcacagagggtcagagaggctggacgtcactggcacctagtcacggaggactggaatagtacatcaaaggtccaaatccgaaatcacaagagtgagtgtcccagtaaaaactcggtgtcgggggttctggaaaccctgtatatagcgccctaattccaaggtccctgtcctgagaaaaaggtaaatccagcagcgagatgaggtagggcttagaggtccaagacaaaatgttgcacaggtgc

SEQ ID NO: 531097 - DNA, 199 bp, Homo sapiens
tgtggcactgcggaggagttgaggcagtctattgtgtccagatgctgtcttcctgggaggagagctaagggagtgcctggggcccatttcttaaaacctggctggggtagtttggagaaggaggtgttgagtcagttgtaccgaggaggagaagcagcagggtaccgagactctgcaatttcgttaattcttggtccat

SEQ ID NO: 531098 - DNA, 1205 bp, Homo sapiens
  misc_feature (337)..(337): n is a, c, g, or t
  misc_feature (518)..(518): n is a, c, g, or t
gctggacttgtcttggttgcctgacacctgacgacccggacgacggcgacgatctctttgtgactaaaacgacagggtccagtgctccaggcctagtgagtctactggggaccgccctcccgtggcccgcccactctgatgcacctaacttctcatggctcaactgcgcaaaatccatccggatcggcacatacttctgaggcaattagctcgaaagtgcttgggggtgaatgtgatgcgtgaggaagatcgcgtagtgagctgctcgtggtcactcgccgggctggtggtagatctatatatatggagggaggtacatctttcgtacgattcacanaaagcatccgaccagcccgatgccgcaaccgagcacgtagggaattacacctcttccaccgcgattggcgaggatggcatgtccgcaagggaagcgagcatcgtgctgtcatgggagatggacccctggtccaggcagccctgtgtgggacttgggggatgcactgatgagactcatacgnattgcgtccccttgctcgcacactggaaaaaggtcgtgcgcatgcagaagggggcattcacgcgcggaaccgcgaatggcattctgggtgagtatcccgaattgataacagcatgtgatcaggacgtgaatggctgtcacaccgttgcgtcgcgttgagagcgcaatgaaggccgaagcgcactgaacatgctaacgtgagtcgcgagcccagtgggcgtcctcacgcgtcccacgggattcgctcgagggtcgcgctcgaggccccgagttacgaagccccgagggcccctgcaagagcgcgcattccgaatttgggccgcttcgttggccttcgaggcctggactgcgtgggctttccccattgggcccgcgcattgcctgtgtgactttgggccccaccgttcgccacttgcggtaggtccaaataggccgttgtggcgcccccctctgactaggctggtgtgtcgcggtgtgccttgcgggaggggtcccacaatgggacgattttaacctagtctcgggcaagtggggcgttctggcccttcccccatgacgccacgcctgggccttgcttttccctcggggacccggggaaacattgttccgtgattccgcgccttccccttggggtgccccaggggctttcgccctggcggcctttccctctcgcttgaagccctcctcg

SEQ ID NO: 531099 - DNA, 1051 bp, Homo sapiens
  misc_feature (121)..(121): n is a, c, g, or t
ttacttttccccctaccctgctcctcctcctccacagccgtctattctcttatgcctcagccacttccttccttggtctcaccctccccagtgcactgaagaaggtaacgcgggtccagancccacgacggcgccatgttctccgcgcgcggaacggcaacaaccgcgccagagcaggcagcacatgaactgtggactcaccgacggttaaccatctctagtggaggaaattcatcgtttgggttcaacaacatgctgactgcgaacgttacgcgctcacaatcctggggtcctcttccgtgatgatcaatgtgccaacctcttcgacagcatcgctacgaactcttccagctgcacacaacgaacgcgaagactcgctaacatactccagcgacagctgcttctgccaccgtgctccatgactgatgctcgacatctactatcacctgcaacccttaactgtggcttcacatcctctcccactgtacctgcccacttctctcgctctcctcgcgtacaacctggcaatataaagtgacaccaacaaaccatctgaacatcaccttcatgcactcccccctaccaaccctcctcaacccccacgccattcatgctccccgacactctgctcctctcctcatatcctgcccccaaccctctatgtactgactgctataccctacatcccactactccccctcccgcactcctgctcccacttgcccccaccccacactccccgccggcccccgccgcacccgccgggcctcactacccccaccaccaccccaccccctcccccacacgcccaccccaccccccccccccccccacccccccaccccccaccccccacccacccccccacccccccaccccccccccgccccacgcacacgccccccgcgcccccctcccacccccccgcccccccccccaccaccgcccccacccccccccaccccacaccaccacaacacgccccctccacaccaccccaaccacccccacacccaccccccccccccaaccccccacacctcacacaccg

SEQ ID NO: 531100 - DNA, 302 bp, Homo sapiens
ccagcgttggggagtagccccaacgttgagaacaagtaagcgaacaattagttgtatgaaccacttattacatgactgctgatcataaacaacctgtgtgtaatattatttccctaaacacgtagcacccttcagcaggaccctataaaactttcctccagcccttgcctctttgcaggtagccccttctctgctgagctgcccactgcaacatattttcacaatttctctaataaatctgcccttctttacctacaactatcttggtaaatggctttaccacctgcaaaactgaccctagg

SEQ ID NO: 531101 - DNA, 1175 bp, Homo sapiens
  misc_feature (359)..(359): n is a, c, g, or t
tataaaacggggcaataactttattcaaaacccatcacaaaatgggccagttggggtcgtgtaacaaagcatttcaggtgttttagaagcatgaaggtcagtaatggtatttgagagcatacagcgggctacatacaaattaacggatcagaccacaacttttcaagtggtttaacaacaggaataagtcttcccggtaaaagcacgcaccttgggtgacgtttaaactctagatattttccatcctccttatctttcctgtcagcccttctcctttcaagcaaggaattcgcaggagcacaaccctccttcatataattcctgtttcttcaaggggggcagccatgtgtccttcaggnggccctctgtgaagaaagcttcagccttgtccttcgcattccccttcccacaagggttacccaggtgaaccaaagggcaccgttgggcaataccattcaggggttcaaacacttggggggctccagggcagacgcccagggccttcagcaatgtggcttggtgaggtgatctgctctcacgcatgtgcacaccagcctctctctgtgttaccttggggccagggttctccaccagggcgaccacaagctgggagaagggcgcggacaagtgtgaatggcacaaactcttgaaagggccactgtggggggggcacaccaatatccaacaacactgggtatggtggaacacggctggggtccttgagaatgggtggggccacatgggggcaaagcatttcgaacatttctttgggggacaaccaacgtccccccacgggtcaccaacacaagggcaagacaaagccattgatacttcacccccagttgcggggacggggctccccatttttacagccatttcagtgggtgggcggatgggccctcacaaagacaaggggcatatgggggtgaagtccctcgtggcttaaccagaaaaaaagcctggtcaccagtgggatagaggccttcccacaagaagaacgatattgacacggggggcccacttattgggccccagaagggacacgatggtgaatagcaggggagaataaggcgacccccgaggatggtgcgatggggaaaataccagcgacgggtaccaacaactacgagggctccccaccaagcgcacgggaagagccacgtatgtagggaccc

SEQ ID NO: 531102 - DNA, 544 bp, Homo sapiens
  misc_feature (529)..(532): n is a, c, g, or t
gccccagggctgaaggcaggccagctccagccacctgctgagtctcctaagtccagagtgtcagagacctcaagagactctcacccactgacccacctggggactctggaaatcgggatgtgaccagggaagaccctgtcacggggcctctgaattcagcctcatcccaagtccccactctatacttgtgtctgcagaacagcctgcttggacacagctcggtggaagatgcgagggcaacgatggagctctatcaaatctcccagagaatccgagcccgccgagggctgccccgcctggctgtgtcagactgaagccccatccagcccgttccgcagggactagaggctttcggctttttgggacagcaactaccttgcttttggaaaatacatttttaatagtaaagtggctctatattttctctacggccaaaaaaaaaaatcggcctcgtggcctacagcggggagtattcgtccaagaggccatttttttggactttattttatattttctcttttatttcttnnnntaatctttataa

SEQ ID NO: 531103 - DNA, 805 bp, Homo sapiens
  misc_feature (43)..(43): n is a, c, g, or t
  misc_feature (96)..(96): n is a, c, g, or t
  misc_feature (114)..(114): n is a, c, g, or t
  misc_feature (116)..(116): n is a, c, g, or t
  misc_feature (204)..(205): n is a, c, g, or t
  misc_feature (235)..(235): n is a, c, g, or t
  misc_feature (237)..(238): n is a, c, g, or t
  misc_feature (255)..(255): n is a, c, g, or t
  misc_feature (273)..(273): n is a, c, g, or t
  misc_feature (279)..(279): n is a, c, g, or t
  misc_feature (283)..(283): n is a, c, g, or t
  misc_feature (300)..(300): n is a, c, g, or t
  misc_feature (315)..(315): n is a, c, g, or t
  misc_feature (348)..(349): n is a, c, g, or t
  misc_feature (374)..(374): n is a, c, g, or t
  misc_feature (387)..(387): n is a, c, g, or t
  misc_feature (446)..(446): n is a, c, g, or t
  misc_feature (465)..(465): n is a, c, g, or t
  misc_feature (476)..(476): n is a, c, g, or t
  misc_feature (487)..(487): n is a, c, g, or t
  misc_feature (548)..(548): n is a, c, g, or t
  misc_feature (558)..(558): n is a, c, g, or t
  misc_feature (579)..(579): n is a, c, g, or t
  misc_feature (643)..(643): n is a, c, g, or t
  misc_feature (803)..(803): n is a, c, g, or t
aaacagagatttcactcagtgacaaagatggagacagccagtncaccgtgtccccccatctacttagaaaatcccctgggggaggggatgcctagngcatacagcaccccattngngtggggctgtgcacaggtcataaagactctcaacttcctttaccatccaaacaggaaaacaactgtccagatgacagtaagaatccannatctgtaatcctcatggagccaggactcananngcatctagggcaatgangctactgcaagtttatgnagttanacantcaagtctgtgccaaangaggtcccatccggnggccaggtttctgttcagtctggggagcaatgnnaactggcgtgcccccatagcctggnatgagctgatggnccagtgcaatcccaaagcaaagaagggcagaactgggccaagaagctgtggtaatttgntttttttgttttcgaaagngtcgtcctttncttttgtaggnccaaaagaaggccttctgacctgagggtctgggctagggagttggattgtttttctaagcncccatatccncagagtgagagacatggaaanagggatgtgagggttctgaaaaacaggcatcaggcagctttggagatgctctcagcccacaggnagagtgctgtgtcaggcaaagatggtctcttcccggcgcttcttggtgaggatggtgcctggcttatgctgggcatctgggtggttggctagttcggggggacaggaagacactgggctttcaggatagcttgcttcagctcgtaaaacacagcagagtnct

SEQ ID NO: 531104 - DNA, 859 bp, Homo sapiens
gatccactccacgaacgtcaaatgcgtcatctgaggagggggagggccggggcaaaggaggggcaccctgacatggagcctgccagctccgtcagccctgactcggcccggagctgagctccccacctgccggtagcccaggagatggagcagcccagcccacgtgcccggccttccgcccctgacttcacttgataacaaactagaaactgaaacagggtcgggatgccgatgccggcttggagttagagatgagtcaccgctgagagcagctgcagtagctgagcagtggcagcagagaggcagacgtgagctgagggcgcagaggcaggcagcatctctgagggtccccaaggaacatggctgggagccgtgaggtggtggccatggactgcgagatggtggggctggggccccaccgggagagtggcctggctcgttgcagcctcgtgaacgtccacggtgctgtgctgtacgacaagttcatccggcctgagggagagatcaccgattacagaacccgggtcagcggggtcacccctcagcacatggtgggggccacaccatttgccgtggccaggctagagtgagtgaaggccaggccagcaggggctttggaaataacccctctcccacttccctggcccctcttccctggtgcccatctgtgacctgtgaccccacttgtaagatttcccacactgctgttgggagaaagccggtggtgtctccatcacatcctggagaaggcttcctgtcttcagagaaccatagactcacatctggaagccgcctttggggcatctatctggatctggtccaacttgccggtcttaaaatggggaaactgagttccccc

SEQ ID NO: 531105 - DNA, 328 bp, Homo sapiens
  misc_feature (313)..(316): n is a, c, g, or t
agctacgactaagctagactgatcggcgctgaggcacatgcctatcaatctccagagatccgagccgcgaggctgcccgcctggctgtgtcagactgaagccccatccagcccgttccgcagggactagaggctttcggctttttgggacagcaactaccttgcttttggaaaatacatttttaatagtaaagtggctctatattttctctacggccaaaaaaaaaaatcggcctcgtggcctacagcggggagtattcgtccaagaggccatttttttggactttattttatattttctcttttatttcttnnnntaatctttataa

SEQ ID NO: 531106 - DNA, 599 bp, Homo sapiens
gagagagagagagagagagagagagagagagagagagagagagagagagagagagagagagagactgtgcttacgtaagaaaacacgtggagaagatcaaaaattccatggatgggaagaatgtggatacagttttgatggaacttggagtacgttatcatcgacttatctatgagcatcttcaacaatattcctacagtcgtatgggtggcatgttggccatttgtgatgtcgccgaatataggaagtgggccaaagacttcaagattccaatggtattacatctttctgatactctgcatgctctttgcaatcgtctggtagttgccccagataatttaaagcaagtttgctcaggagaacaacttgctaatctggacaagaatatacttcactccttcggacaacttcgtgctgaatatagaactgccccgccttgctcgacactttagctgagattgaatttacaaagggattcagcgccaagtcctttacagaggaatggcttatacttaagcccccctctggtggatagcaccacgagatacctttggcacaggcaacattttgggccatggcctggaccagccccttccttc

SEQ ID NO: 531107 - DNA, 368 bp, Homo sapiens
gttttgggaaagggccttttttgaccccttggggttccccgccggccctttttatgggcatgtcttttaggccccaacccccccccccaaggatgcgggggggtctttccccggaatttataaggctttgttttatattaaaaccaaaggggcccccccccgggccgggggaaaagtgaaaaaccaaatttttgttccccccttccccgggcgggccgctccaaagactttgggggaagggccctaaaaggtttttttaaagaacccggtttgaatttgggggggatgccccccaaaaaaattggtaagggggaaattgataaattttaaaatggggatttttgaaaaaaagttgaattttttattta

SEQ ID NO: 531108 - DNA, 137 bp, Homo sapiens
tgtccatccccctgcgtgcagcaccccttataaaccaccctatgggaagctactattacctccaggcacggatgggggcatagaaggcccgcgagtcctgaatggcaacccacagcaggactgaagggggatggaca

SEQ ID NO: 531109 - DNA, 181 bp, Homo sapiens
gatcccctgtaaagcacaacccctcccaggagtgctgggattatagggcatgagaccactgtgattcagcactcgtggccagcatttttaaaaatgtctgtacatgtcgcttccttgctcacaatcctgaactgacttccccattgcattgtaaatagattctgaacctcgtccaaccaat

SEQ ID NO: 531110 - DNA, 444 bp, Homo sapiens
acccattgactacctcatgaagatcctcactagagcgaggctacagcttcaccaccacggacgagcgagaaatcgtgcgcgacaatcaggagcacgctgtgctacagtgccccggacttcgagcaggagatggccaccgacgaatcctcctcttctctggagaagagctacgagcttgccgatggccaggtcatcaccttggcaatgagcggttccggtgtccggaggcgctgttccagccttccttggtgggtatggactcttgcggcatacacgagaccagcttcaactccatcatgaagtgtgacgtggacatccgcaaagacctgtacgccaacacggtgctgtcgggcggcaacaccatgtattcgggccttgctgaccggatgcagaaagagatcacggcctggggcccagaaccatgaagactcagatcatcgcaac

SEQ ID NO: 531111 - DNA, 330 bp, Homo sapiens
ttatcacaccaaattttagaaatatacttcatattatcatctagccccattctctctcttccttatgtataagattcctattccattgcatgctagtcctatttattttgtcctgcagatcaccaaggctctgttcatttatattttattttttttgagacggagtttcattcttgttgctcaggctggagtgcaatggcgtgatctcagctcaacgcaacctccgcctcccaggttcaagcgattctcctgcctcagcctcccgagtagctgagattatagatgggccacggcaccaggccggttctttctgttttgtttttgtgataa

SEQ ID NO: 531112 - DNA, 969 bp, Homo sapiens
  misc_feature (1)..(1): n is a, c, g, or t
  misc_feature (570)..(570): n is a, c, g, or t
  misc_feature (610)..(610): n is a, c, g, or t
  misc_feature (614)..(614): n is a, c, g, or t
  misc_feature (669)..(669): n is a, c, g, or t
  misc_feature (674)..(674): n is a, c, g, or t
  misc_feature (683)..(683): n is a, c, g, or t
  misc_feature (705)..(705): n is a, c, g, or t
  misc_feature (708)..(708): n is a, c, g, or t
  misc_feature (716)..(716): n is a, c, g, or t
  misc_feature (722)..(722): n is a, c, g, or t
  misc_feature (736)..(736): n is a, c, g, or t
  misc_feature (752)..(752): n is a, c, g, or t
  misc_feature (764)..(764): n is a, c, g, or t
  misc_feature (804)..(804): n is a, c, g, or t
  misc_feature (807)..(807): n is a, c, g, or t
  misc_feature (828)..(828): n is a, c, g, or t
  misc_feature (839)..(839): n is a, c, g, or t
  misc_feature (844)..(844): n is a, c, g, or t
  misc_feature (871)..(871): n is a, c, g, or t
  misc_feature (873)..(873): n is a, c, g, or t
  misc_feature (876)..(876): n is a, c, g, or t
  misc_feature (894)..(894): n is a, c, g, or t
  misc_feature (959)..(959): n is a, c, g, or t
ngtaattataattataatctgtatatctaaacagtgcctttgtaaaaaccctttccatcatcttcaaattcagtctaaaaataattgtacgctatacttttcaagtggggtttaaactattgtttcatatttaacataaaatattttcctatttaaattaacatacttttatgttcacagtaaacaaactgcataggttttcactttcattttcttctgacatcttctgcaaaagaatgatctgcccattttttggataaaaaggctagaataatgtgaccggagctgggtgaggtggctcatgcctgtaatcccagcactttgggaggccaaggcaggcaaatcacttggagggccaggaggttcggagaccaggcctgggccaacatgggtggaaaccccggtctctactaaaaatacaaaaattaggccaggtcggtgggtgggcatggtgcctataattccaggctactcagggagggctaagggcagggaggaattggcttggaacccggggagggcaggagggttggcaggtgaggctggagggttggtggccatatggcactnctaggcctgggggaggacagaggcaaggactcacattctncaanaaaaaaatggaaaaacatgaaaaaataaggaacaatggtggactggggggggagnacttnaaaagtggngggaaaaaatggaatggctggnaangaaactcngtgaanactggggctggaangatggggaacaaactncccccaaagtcntcccaggaggagggcaggataaagggggactgttaaaacncangcaaaatggccaacctggccntgttcattctnagctncaggaaaagggggcacaccttctgggnangcnagctggaattttaaagtnccagtgtgggcacttttcaagaaaatgggcatcaaaagggttgggaccattaaatcttttcttanttctcccagt

SEQ ID NO: 531113 - DNA, 120 bp, Homo sapiens
actagatcgtgtaaatgggtgctggtatattgttgttgagatgaggtgcgattcggtcctcctactgacgtttaagacttagtggtattcacgtagtacgttgtgcactcgtcaatgcga

SEQ ID NO: 531114 - DNA, 257 bp, Homo sapiens
  misc_feature (27)..(27): n is a, c, g, or t
  misc_feature (89)..(89): n is a, c, g, or t
  misc_feature (103)..(103): n is a, c, g, or t
  misc_feature (212)..(212): n is a, c, g, or t
aatgctggtctcatgacagtgagtganacctgaaggttttataaggggcttttcccctttcgctcagcacctcctgctgccttgtgaanaaggtgccttgatncttgtttgcattcaccatgattctaagttttctgaagccttcccagccatgctgaactgtgagtcaattaaacctctttcttttataaattacccaggctcgtgtatgnctttattgggagcatgagaattaaccaattcactctgtctctatt

SEQ ID NO: 531115 - DNA, 777 bp, Homo sapiens
  misc_feature (39)..(39): n is a, c, g, or t
  misc_feature (122)..(122): n is a, c, g, or t
  misc_feature (141)..(141): n is a, c, g, or t
  misc_feature (146)..(146): n is a, c, g, or t
  misc_feature (158)..(158): n is a, c, g, or t
  misc_feature (169)..(169): n is a, c, g, or t
  misc_feature (185)..(185): n is a, c, g, or t
  misc_feature (195)..(195): n is a, c, g, or t
  misc_feature (199)..(199): n is a, c, g, or t
  misc_feature (240)..(240): n is a, c, g, or t
  misc_feature (262)..(262): n is a, c, g, or t
  misc_feature (372)..(372): n is a, c, g, or t
  misc_feature (394)..(394): n is a, c, g, or t
  misc_feature (398)..(398): n is a, c, g, or t
  misc_feature (409)..(409): n is a, c, g, or t
  misc_feature (412)..(413): n is a, c, g, or t
  misc_feature (416)..(418): n is a, c, g, or t
  misc_feature (428)..(429): n is a, c, g, or t
  misc_feature (444)..(444): n is a, c, g, or t
  misc_feature (454)..(454): n is a, c, g, or t
  misc_feature (457)..(457): n is a, c, g, or t
  misc_feature (463)..(463): n is a, c, g, or t
  misc_feature (465)..(465): n is a, c, g, or t
  misc_feature (479)..(479): n is a, c, g, or t
  misc_feature (484)..(484): n is a, c, g, or t
  misc_feature (488)..(488): n is a, c, g, or t
  misc_feature (490)..(490): n is a, c, g, or t
  misc_feature (517)..(517): n is a, c, g, or t
  misc_feature (529)..(529): n is a, c, g, or t
  misc_feature (545)..(545): n is a, c, g, or t
  misc_feature (565)..(565): n is a, c, g, or t
  misc_feature (574)..(574): n is a, c, g, or t
  misc_feature (587)..(587): n is a, c, g, or t
  misc_feature (613)..(613): n is a, c, g, or t
  misc_feature (625)..(625): n is a, c, g, or t
  misc_feature (631)..(631): n is a, c, g, or t
  misc_feature (641)..(641): n is a, c, g, or t
  misc_feature (651)..(651): n is a, c, g, or t
  misc_feature (665)..(665): n is a, c, g, or t
  misc_feature (709)..(709): n is a, c, g, or t
  misc_feature (714)..(714): n is a, c, g, or t
  misc_feature (745)..(745): n is a, c, g, or t
gcggtgggaggtacagcctccccagccttgctccaagtnggatgcctggccccaaacccccagtttcagtgaggtggagaaatgtgttgggaggaactgcccctagggatccccggcctganccttcatagggcacaagantggantgtcagcaagancggcacaagtngcgtcaactccagganaccacctggnaggngctggcaccatgggctaagaatcaggcaacttaggttctantcctggctctaccatgtagttnctgtgtggccttggacaagttactgaacctctctgagcctatttcctgatctataacatgcagctcatactaccttttagggctgtttttaattcaatggcacatagtangttttcaataaacattaatttnatanagatacttcancgnnctnnngtgttgagtnnttagttaattttatntagttgcttnatntttttntnatcccacctttgcnatgcnttantnctgttacttattgttatttatattttntctctctgagcnttagtttacttttgtnaaatggaagcaatgcttatntcatgaggntattttaaggaangggttaaataaatgaagacttctgtnaacaggaattancattanaggcaaagtntgtgagtggnctcccctccctttnctgggacagattgaactttggttcaaataaaacctaaacagggncaagntaggacccatctctccaaggtttcaaataanaaaccgaacgatctattctctccatgggctga

SEQ ID NO: 531116 - DNA, 237 bp, Homo sapiens
tatgttactagttgccttaatctgtagctattggctatattacgcgttcttcatttttcctgctcacattttgtatgagcaggatctgtggcttatttgtggtgattttcaagttacttttactttgtgtataattaacacttaaaagatcgctgctaaacttgtctagatgattatcatctatcaaagttttttgtctttctagtaaagattgatcatggttcaataatcgcaaat

SEQ ID NO: 531117 - DNA, 288 bp, Homo sapiens
atagcgacaccgtaccaaagagatcacactacgcctgtggagcctgcggcacggtgcaggatgtactgaccaccgtcaaggccactggcaagacaggaccgatggcagcctatgcagtgcaaggctatgcgcccaaacgcggtgcgtcaggtaaaccttacaatggacgctttttcgcagcctacggcacagcgcaggcacagcagcacgacactgcgcttgctgaatgggaagcgcgcaaagatgccgatctgaaagaatactggccacgttcggagcttccctacg

SEQ ID NO: 531118 - DNA, 113 bp, Homo sapiens
  misc_feature (28)..(30): n is a, c, g, or t
ttttggactccgcccaacaaccgctgtnnnggccaacaaccaggatacaacggtaacatcaacgtgcgggacgtggacatctgaggctacgactgggacgtgcgggacgtgga

SEQ ID NO: 531119 - DNA, 762 bp, Homo sapiens
gtcatcggaactctgctcgagtgccgtccgcgtctcgtcgtctgccggtctcgatggaagaggagatcgccgcgctggtcatgacaatggctccggcttgtgcaaatgctaggtttgagtggggagctgacgctccaccgagccgtgttagctttccgatcagatctgggcggccccgagacaccaggcgtcatggtgggcatgggccagaaggactccatacgtgggcgacggaggcccagagcaagcgtggcatcctgaccctgaagtaccccattgagcatggcatcgtcagcaactgggacgacatggagaagatctggatcacaccttctacaactgagctgcgcgtggcccggaggagctatcccagatgctgctgaccgaggaaccccctgaaccgcaaggccaacagagagaagatgactcgggattatgtttgagaccttcaaaacccggcaatgtacgtggttcatccaggccggtgctgtccctctacgcctctgggcgcaccactggcattgtcatggactctggagactggggtcaccccagcacggtgcccatctacgaggggctactgccctcccccacgccatcctgcgtctggacctggctggccgggactgacctgatacctcatgaagattctcactgagcgaagggtacagttcaccaccacgtgcgagcgggaaatcgttgcgcgacatcaaggaagaaagctgtgctacgtcgcctggacttcgagcaggagatggcaac

SEQ ID NO: 531120 - DNA, 111 bp, Homo sapiens
  misc_feature (91)..(91): n is a, c, g, or t
tctgttttccccgttagaatatcagattcaaggctgttcttgtcccctgcatctcgacaatctagcgtctaaacaaataataaaagttacntttattaaagatttccatca

SEQ ID NO: 531121 - DNA, 671 bp, Homo sapiens
agtctcgagctgtctgtcctttcatttttcctggaaatggagtctcgctctgtcaccaggctggagtgcaggggcgcgatctcggcacacctccgccttctgggttcaagcaattctcctgcctcagcctcctgagtagctgggactataggtgcattgccaccattgcccagctaatttttggtattttatagtaagaagacgggggtttcaccattgttggccaggatggtctcggatctcctgacctcatagatccacccacctcggcctcccaaagtgctggagattccaggcgtgtgtacccactgtgcgccccggccagcccttgtgtggctcttttcaaaaaaccttcggcccccaggtgagtggcgtgaatttcacctcccacgtggtttcgctaaacattacacctcctctccgtggggaatcccatctttccatgacacgcctttgctccactgtgggagatgtcaacagggggaaagttcacctgtgccaggggtagacctctgtgccccccccaatagaccccgtgtgcgcccaaggggccacggagcaactgactcccccaaagaacgcccccagaacaccgtggagggggagaccaccctctcccacgtggacccacgccccaaggccccccaaatccccggaaaacccccaagggg

SEQ ID NO: 531122 - DNA, 885 bp, Homo sapiens
atttgatgtgaacaaatccaccttacagagaggaagacataccagctcccctaattttgtttggcataacaaatagtttagatggatgaaaaggctgtcctgggagaacaatgctagggagctgctgttttgaggattcctattctgtatggggacatgttgacaagctcgaagaaagtgctgtgactgtaatgtttgataaatgtgcatgttcaagcaaccatattcagcaaagcatggtagtcatgtggcacgtcagaggtaccccagcacatgtcaaagatgtggccaactgtgtgccggcagcatagcagagaagagaactgctggatccactcaatttaagggatacctttcagctggtctggcaactgaatcagatgactaaggactgaaatggcatgtgccaatttgcgacgatgccttctaaccctccgccatgcagtcacgtcttaagacctattactgatcagccctgtcctagtgagcgcaaaggtccgagaaatgctcaggcttgactgctccaagattggagaccttgggcattggttcaacgaactaccatttcgaattggaactctgagaatcactttggcctttcctcattgaccaaagagatggagacacacacggtcttgtcattaggttcatgtgtagctgggtactgaatatttttctaaggtgacaaaagtcatagttatgtggcaccctttttagcgaacccagcgaacatgggtttgtaatgagtacgttacattgtgactccttgggggaatcttccagggaaactgaaggtccttgcaccagtgacaattgtcttaaggaacttaagggggcgcgtgccccgtttgccggaattgctttaatccactggtggcccggcaa

SEQ ID NO: 531123 - DNA, 129 bp, Homo sapiens
atagcccccggggctatggaagagcggtagggagtcacggagaagatgcagtgaatgcttgctatgcattcactacgtgtgtgtgtcccatctagttcactcctttcgccgtgcatgataggaggggcg

SEQ ID NO: 531124 - DNA, 1324 bp, Homo sapiens
gcacatgacacagggcaaaaagtaaccgtccttgacagggagtcttaactagagccggaaactgggactaaactggcgtggctcctgtggaagcgtggccgagcagcgtcccggacgacggagatgtctttgagttggacttgggaaacgaggttgctagaagcagcaagaaaacggccaagatgatgaagtgagaacgttgatggcaaatggagccccatacaccacatgactggcatatggaacaatcaaccccatccacctatgccagcctcaattatggtcatataattccacagcagacagtacattccattcgagcagcgtattaggcagaggatgacccgagaactaaccagtaagacagagaccaccactatgacaacataggcatgcaagaccgactgagcacacatgcgacacatacgtggagaactggacttgtaacaggaaaaaggaggccacgactgctgaacattgcccaaaggaacattgactgcaaagactgaccagccatatatgcataggagagaccaacaagaacagcagaaccaccaatcgaggaatgcgacgtacacagataactataatccacaaaactgggacgctagaatgttcacagtgccattttacaagggagcagattatgaatcacaagtccatgccctagaggacccattaagcttcatgggaagaacaagaaaacatggcttgacgaaattaatagagtacaaatacttgccagtggaaagcacaatgcaagagtaacttcaagagttgcacagggttaaaaatcaccagcaggaggaaggccaacacaacattgaggaacatggaaaccgaggagaggaccatcatggggcagagaacgcaaaacgaatcctaaaaacgacacgcgggaacgaagggaaaggaaaaacccatctcaaaagagcccaacaatacctacaaacccacaacaccaaacaaaccaaacccacaagggggaacccacaaagtgccattaaaacacggtaacagcaatatcaaaaatatcttacaaaccattaaaaggatagatatatccacatgaaagaaatactataacaaaagcaacttgaatggaccaaatatataaaagtataaaagaaagtccagtgcaaagcaagtagggacattgtaacaaggaacctccggagacattcctacgagagcacattggggaagtgaaaaccacaaggtactcgcaagcgaaaggatgagaccagagtgcagatgaaaatcaaaaacgaagaaagtgtagacaatgaaactgaaataacaatatatgcatagtagagataaa

SEQ ID NO: 531125 - DNA, 224 bp, Homo sapiens
caccgagtccttaactgtcttatcattctcgacggcctcagccttctgtggcagcgtttccacaacggagtgctcatagacacgaactccaggtgcctagcggccataatatagccaactgagcggtctaggtctgagtggcagggacttgctgagccgcagccttcagcatgtctgcaagctgagccagcagaccacctgacaacaggcgatatctgtaacaa

SEQ ID NO: 531126 - DNA, 543 bp, Homo sapiens
  misc_feature (28)..(28): n is a, c, g, or t
ctcaaaatgtcgcgccatgtgctagcantacagctgtgagctctgtgaaagccctatctcttaaaatggttgttacatatgagatctggcaatgttgctcgaactgtactcacactcctgtgtcaacgtgttatatggcttcatcttacgaacacaatagttaataggcataagcatcagaaccatctagcagatcaaagaacatttaaatattgttaaagtatgttggcttaaaacgtcatgccactagcaagttcgtgttacataacagaacttaatttcgaccaggcatgttggctcactcatgtactcatatctcttatataggccaatgtggactcatcgctctagcccagaagttccagaccaccttggaccacgtgtctcactctctgtttttacattgtaaaataaaattgcacaagggtggtggagaacatctgtagtcacacccactttgtagcataaagtggtagttgcgagtaagtcctgtacgacagaggcttcggtaatctgagctcacaccagtccactgcagcctag

SEQ ID NO: 531127 - DNA, 116 bp, Homo sapiens
tttactgagtgttatgtaaaggatgcgtagggctgggagggcgatgaggatatgatcatggcgggcatgatagttcacacggtttctatttcctgagcgtctgagatgttaggggt

SEQ ID NO: 531128 - DNA, 1222 bp, Homo sapiens
gatgacccatgtggcagtactgcaagtggaatataggcgataggcagcccgaggaacatccagagttactgtgtgacttggtcctgccattgtatagactttgaaagtcacaggcattgggctctagttttagacaccattcattaggcactgcgggcaccacgtcatctcctttacgcttcctctctttgcagcctggctgcagcacgacggaggaccgcacgcgcgcagagctcaacgagacaagcctcccacaggccctactgctcagcccctccttcctcccttgcgcgctctacgcgcggctgcgcgcttagaaactggcgttcccacgctcgtggccccagcataggcgcttgcctaggcctgcaactaggagcggctgcacttccttactcacgacagcactggcgcctgccctagtcgggtacccagcgcaacacgggggccataaacccaggtacctagggaactacccacccctttacccccagaatccacccctaaccttctcacacgggacccctacgtaggaaaacactagggggcttgactccccaactttcaaaaacgcgcgccctagcgcgggccaaaaccccccttagcctctctccggggcccagacccccgttcccattttttacccacaacgcctttccggcgtatcgggcgcacgcccttcagggcgcgttttaccctaggttcctaccaccttttcccccaccacggcctttttccaccgcattggcgcaccgcccacggactagggacccaccaaccccctttcttcaaattttcccttacggtcggtcctctggctcctaggtcccagcatctgggccacgggacgggcccctggtaagtccaggcctacacatctctcgcgcgcgaccacactgcgttcctcctcccttgtgtgcccaaggcgcgtcacccaggcctttgccggtctgcgcgcttcgctgctcgggccacctctggttccctcctttcgcgggccctttcgtccttggcccctgtggtgaactcctcttccccaccctccccgcgtgggcgctttacacccccgggggaaaacccccgcttctctcctcctaccccacgcccccaccccttttttcgaccttgtctcccagcccctcacggcgctgcgcgccgctctgccccggtgctctcccccgcgctcccgtgacgaccctcccgccgtcgtggctccccacta

SEQ ID NO: 531129 - DNA, 114 bp, Homo sapiens
cttgttacggtggcatatccttgagaagacaggttaacatgcatgaatatatcctcataagccacggacacaggtctagtagtatgcaagaaacttctgaggctttgcatggct

SEQ ID NO: 531130 - DNA, 480 bp, Homo sapiens
cagatgtgggagtggcgttccgagtatggtgaccatattctagatgagtgcagagaatttattcaagccaggctaagaaagctacgtggatgcagatgatgtgcgatggaaatcagtgccgcgctgatcagtctttaacctctcctcccccaagagatttattattagatatagcaaggcaaagaaatcaaacccctttgccattgatcaagccatattcaggtcctaggttgccacctgatagatactgcttaacagctccaaactataggctgaaatctttacagaaaaaggcatcaacttctgcgggaagaataacagtcccgcggttaagtgttggttcagttactagcagaccaagtactcccacactaggcacaccaaccccacagaccatgtctgtttcaactaaagtagggactcccatgtccctcacaggtcaaaggtttacagtacagatgcctacttctcatgtcatac

SEQ ID NO: 531131 - DNA, 2459 bp, Homo sapiens
tgagacagagttttgctcttgccgtccaggctggagtgcaatggcgcgatctcggctcgctgcaacctccacctcctgggttcaagcaattctcctacctcagcctccagagtagctgggattacaggcacctgacatcacgcccagctaatttttgtatttttagtagagatggggtttcaccatgttggcaaggctggtctcaaactcctgacctcaggtgatccaactgcctcggccttccgaagtgctgggattacaggcctgagccaccgtgcctggccttttattttgtgtgtgtgtttgatttctgacttggcctttttaaaaaaatcacaaaatatataatacggccgggtgctgtggctcacgcctgtaatcccagcactttgggaagccgaggtgggcagatcacgagatcaggagatcgagaccatcctggctaacacagtgaaaccctgtctctacttaaaaaaaaaaaaaaaaaaaaagatagctgggcatggtggctcgcatctgtagtcccagctactcaggaggctgaggcaggagaatcgcttgaaccggggaggcagaggttgcagtgagctgagagcacgccattgcactccacactccagcctgagcaacaagagcgaaactccatctgaaaaaatatatatatataaaacaaaatttataattttaaccatttttaactgtaaagtggcattaagtacatccatattattgtgttatcaccataagtggtgatattccactatcaccgtaagtggaataatataatatttattcattcattccttttttttttttgagacagggtcttgctttgtcacccaggctggagtgcagtggtgtgatcacggctcactgcagccttgacgccctgggctcaagggatcctcccatctcagcttcctgaggagctgggattataggtgcatgctaccacgctctgctatttttttattttttgtagagacagggtttcaccgtgtcgtccaggctggccctggactcctgacctcaagtgattctcccacctgagcctcccaaagtgctgggaatacaggtgctgggattacagatgtgagccaccaagcccagccaatattaatcctttcacttagcataatgtcttcaaggttcatccacattgtagcatgtgtcaaatatctttcttttttttttttttgagacaaggtctggctcccctaggctgaggtgtagtggcgcgatttcagctcattgtaacctccatctcctgtgctcaagccatcctcccaccttagcctcccaagcagctgggactacatgtatgtgccaccacacctggctaattttttttttttttttttttggtagagatgttgtttcaccatgttgcccgggctggtctagaactcctgggttcaagtaatcctcccacctcagcctcccaaagtgctgggattacaggtgtaagccaccccgcctggccttcacttattttaaaaggctaaataatacaattattattattcatatcatgtatgtattatatgtaatacaataatacagacaatttcattgtatagatatacctcattttatttgtccattcatccgtagatggacacttgggttgcttccatttcttggctgttgtgaataacactgctacaaacatgggtgtacaaacatttcttctaatccctgctttcagttgttgtggatatatacccagaagtggtattactggatcatatggtaattctgtgtttaatttttttttttttttttttttgagacggagtttcacttttgttgcccaggctggagtgcaacggcgcgctcttggctcactgcaacctccgcctccctggttcaagcgattctcctgccttagccccctgtccatgtttaattttttgagaaactgccatactgatttccatagcaactccaccattttatttatttattttttattgcttttttagagagggagtcttcctctgtggcccaggctgaagagcagtagtgtgatcatagcatcatagctcactgcagcctccaactcctgggttcaagggatcctcccacctcagcctcccaagtagctgggactacaagtgtgtgccatcacgtttggccaattttgcattttttataaagatggggtctctatatgtttcccaggctggtcttgcactcatgcctgtaatcccagcacttcgggaggccgaggcgggtggatcatttgaggtcaggagttcgagattagcctggccaacatggtgaaaccccatctccactgaaaatacaaaatttagccgggcgtggtggcacgtgcctgtaatcccagctactcgggaggctgaggcaggagaatcacttgaacacaggaggtggaggttgcagtgagccgagatctcgccacttcactccagcctgggcaacagagactccgtctg

SEQ ID NO: 531132 - DNA, 718 bp, Homo sapiens
gggactgcaagtagctactcgtatatctagcggcatcttacgagtgccctactacctatatatacgtatccggaaacatggcctccggtgctggctgtacctactgatggtgtacactcaaggtgttcaacgacatgaatggtgcgtaatgtcttcaacgccagaggaggtgaagaagcgcaagaatggcggtgctctatctagcctagagaagaggacaagaagaacatacataccatggaggagggcaaggagataccatggatgggcgatagtagggccagactagtcgacgataccctaacgaccacctaagtacaagatagcagcccagaataaatggaacttgcctgcttaattggaccctactaatagcatgctaaccctaatgcaggtacacaatggaggactgcacatgcaagtggagtgatactagagttgttaataatactatactaggagaaacacccacggaagtactagacggacaccccacatataaaaagcagcgactcaacgacaatatggcagagttcataagtcaccaaggacattccccaaaagggggaagtgccccatatcgaaagcgaacgaaatgtctaggacgatggggtgcattccaaatgctattaggacactaatgccgaaggccaaaaccttggctataatggaaagggatgaggttcacatgtggaacctggctaatgacaaccccctg

SEQ ID NO: 531133 - DNA, 102 bp, Homo sapiens
accccgctacggagccgtgcatagaggtagcaccaggcggactcgctcgagagctcacggaggttcgtggtgccctcccggagcaggttgtaggtctcgaga

SEQ ID NO: 531134 - DNA, 169 bp, Homo sapiens
cagaatatatatatacgtatgctagggtgagtggttgaagtaggacataggatgagtatgagtaggtcgtcgcgggactcgggggtatgctgtgcgaattcataagaacaggaaggttagaagtagggtcttggtgacacaaatatgttgtgtagagtacaggggagag

SEQ ID NO: 531135 - DNA, 288 bp, Homo sapiens
ctgaaacccgcgtattttttggatttaaggcacaaaaaaagacgtccgtggacgtctttagatgatgaagtggtggagccggggggatttgaacccccgtccgccagtactccgctgtcggtactacatgcttagccgtttctattaagttaaccctcagcgacccgaagggcagggtgctttgggcgagttgtgtaagttttagccgcttcgtccacaacgtactgcacggcgattctgttctatatgacaatcactttgggtttacagacatcccctggtgattgc

SEQ ID NO: 531136 - DNA, 339 bp, Homo sapiens
  misc_feature (77)..(77): n is a, c, g, or t
  misc_feature (91)..(91): n is a, c, g, or t
  misc_feature (103)..(103): n is a, c, g, or t
  misc_feature (158)..(158): n is a, c, g, or t
  misc_feature (168)..(168): n is a, c, g, or t
  misc_feature (199)..(199): n is a, c, g, or t
  misc_feature (202)..(202): n is a, c, g, or t
  misc_feature (204)..(206): n is a, c, g, or t
  misc_feature (213)..(213): n is a, c, g, or t
  misc_feature (222)..(222): n is a, c, g, or t
  misc_feature (228)..(233): n is a, c, g, or t
  misc_feature (258)..(258): n is a, c, g, or t
  misc_feature (265)..(265): n is a, c, g, or t
  misc_feature (267)..(267): n is a, c, g, or t
  misc_feature (273)..(273): n is a, c, g, or t
  misc_feature (277)..(277): n is a, c, g, or t
  misc_feature (282)..(282): n is a, c, g, or t
  misc_feature (305)..(305): n is a, c, g, or t
  misc_feature (312)..(312): n is a, c, g, or t
  misc_feature (327)..(327): n is a, c, g, or t
  misc_feature (330)..(330): n is a, c, g, or t
gctggagcaaacgcggctgggcacggtggccctgctgcagttgatggaaacgccaaagctggcggggcaggaggacnctgtacggatgcancagctgaaaatnaaggtaattaaaaccatggaggcgatcagcgaggttttccaggaccttaggtttnatgcggaatntgccgagtgatggcggctccccagggatgcnccnannnaaatggnaaacggggnggatgnnnnnnaacccagccctaactgccagctggntggggtngngccccnctgngctgntgaccttcctgcagttccagacncctcccncaataaaaagctccnccnctgtaaaaa

SEQ ID NO: 531137 - DNA, 196 bp, Homo sapiens
gacgctctcttctgtggtggaaggggcggaggcctggtaagacccctggactcgttcaagggccctagagtcggtcctggatccaaaccccattcatggtttggctggtctgggtgctgcatgggcatgcctgctgtgttgcacatgtgctcggtgtcagtgaccccgacggtggccacctgtggtgcacctgcac

SEQ ID NO: 531138 - DNA, 645 bp, Homo sapiens
ttgggcatcccggggcccccctgtggtagtcgccgctgtgggtgccccccgtgggataattgtgggccacgagggaatgccctcttaaggctttgcctctcctgggctgtgacagtgcgcacgctgtcaccccccgttcccccccgtgtttgtggtagctgtgaatggtcgctctgtcgtgttttcgacaaaggggggtattttttccttgccgcgttgctcgcccccaggagttctgtaatataacgtgttgttttgaaggctcccctgtgcccagttcataattaaacacgcttataacgcagttctcttctgataatccctatgcagctgaaatagggtagattgtagtggtagttattagcgcgcccaagagttgtttattattgtgctgtgcaaagcccggcggtctaggttacacacgcgggagtgccgcgccttccgtagccacacaagagaaacaccccccttttgttgtttttaaaacaccaattttcttcattatgtgtgtattctcccctcccaaacataactgtgggcgcacacacattccccctactccctacatgtaatatatataaaacaagataataaacacccaagcagagggggattctttctccccatcaatatacaaaacaacta

SEQ ID NO: 531139 - DNA, 315 bp, Homo sapiens
  misc_feature (219)..(219): n is a, c, g, or t
cccctcacactttttgcactttctggagcttcttactgccttttcctgtcccctagtcaacggcatccatcttcctggtaggaggcttcttgcattctgtgtatcagtttgttcagcttctcctcctttatttggacagtgatcaattgaaccatgagtgtttatttacatatgtgtttccttcaaaagaggaagaactactttgtgggtctgtatgtnatgaacatgtcacaccatatatagactatgatgcttttgttaagaaaggcttcatgttttagatattttccgtgtccctatatgattttcaataat

SEQ ID NO: 531140 - DNA, 228 bp, Homo sapiens
ttggtcgaatcctgccctggcccattggtgagagcgacctgatcattggcgccaataatcgctcagcgtgttgccaccactggtctgagcgtactgagcctgttatgtaattctcgtccaagctcgaagcccccaccgcagagtgcggcgacggaagccattgttagggaaatgttccggattgcgccatccctatttagaaaccatgacgcattgactcaggcagcg

SEQ ID NO: 531141 - DNA, 342 bp, Homo sapiens
ccaatttaaacttttgttttgtcatatgcaatgattttattacctgtctttatttcagagcttatgaatttttaattattctaagggctaacatagaactttttcatgttttctactcttcaagagtaggtaagactttagtttgtaatacattacaaaaggaatcctgtggttctctaagagctaatttgtcttggcaaaaggccttagcgagctgggattacaggagtgagccaccacacccagcctctagtagtacttttatcaaaagtaaatgggaaacatgaaattaattttcacaatacattttatttaaactaatatgttcacaatgttaaaatt

SEQ ID NO: 531142 - DNA, 82 bp, Homo sapiens
gcggccgcctactactactactgctcgaattcaagcttctaacgatgtacggggacatgtatctgtctactttctcttgttt

SEQ ID NO: 531143 - DNA, 148 bp, Homo sapiens
cccctgatcgaggtcttcatgaagacaataggaagatatggaagtcaaaagagaaggtgaaatgtggtcacatctgctttgtcttggcagccaggcatttgggcacccccaccagcctaatcaacatggagaaaccgtcgaattcgag

SEQ ID NO: 531144 - DNA, 766 bp, Homo sapiens
gggtttccttggtgctccggatcctctattgcccaatccccgatgggaccatcccccctttccctggggaatggggtatccccgtccctttgggttgatagcggtggggcaacagcgctccgtgcctattcccccctttgccccctgggtcgttcctaagacaccccggttcacctggacgggcgctctccgccagcccctgggggacggccgcttgcctcaccggttcccccctccaggcgcaaaacgggggtcaccggatgcattttggtggactttctgagctttgcaatgctcgctcaaagcgcgcccccggccagcaacgcccccacacgggttttggttccaacctccctcggcggaagcccaatcgcgaggccagcgagccagggcacgtccctacacccactcctgcccgcgccagggctgggactgggatcggaggccagtgagcactccacggcccctgcgcagaccacgtacccatgcactggctcgcgctcgcaccgcccagccccggggcctgagtccgtcccctgtaaggatgccgggaagtgatcagctaccccggagtcggcgggacatggcctcagcgggatggggaccagcgcactggtccggccacggggactgtgggccgtggcgcattttccgactgcttgtccagctctcactgcctatccttggttcccaggtacccccaagccatccgcaatccccagcccgtggtcaggtagagagtgagccaatcccgcccagggaggaa

SEQ ID NO: 531145 - DNA, 905 bp, Homo sapiens
ataccagcactgtgggaggcccaggagggtggatcacttgagcccagtgcaattcagagactatgcctgggcaacatggtgaaaccctgtctctacaaaaaatacaacagaattagctgggtgatggtatgtgcatgcctgtacgtcccagctactcagggaggctggggtaagattccttgagcctgggaggtgggcacgtggcggtgagctgagatcacaccactgcattccagctctgggcaactagagtgagaagaaagaatcatggaaactctagagtgaagtcaaactgttattatgacgattctcttgagaagccaaggtgttaagtagagaacggatgctaataatttaacgaataattacacgcctgtaatcccagccactttggtcaggcccgggtggatggattgcttgagcccatggagttagagaccagcctaggcaacatggcaaaatcccagctctatttaataacaataagaagagtgtcatatgtgcccgtttggaacaaggtatctatagagacatcatatccatctcggccatttcgagataacatcttacagctgtctatggtaacattagggtgttcctgagtgcaaccaagaattctctagcggagcctagatcagtcctcggtataatgatcggcgtggcccaaatgagtttgtaaaccacaatagcgtcagcttaggaggcacgacaaatggctgttgcagcgtggggtccacccgtacccccactggaggcggacggtgggtccgaattcgggcggacaccgccgcaaaggaaccgcccacaccaagtgggacggccgcgacccccatgggggaacagatagaaccagggcgacagaacaacggaaaaaaagcggcaccacgcgagaacgagcacgcgac

SEQ ID NO: 531146 - DNA, 467 bp, Homo sapiens
gatctcagattcactgctagacttctggctcccggcgttcctagtgatactcgtgcctcagcctcatgatgtgctggcgacttactggcatgctgcaccccgaccccgtctgatttgctgatttttagtggatacggcgcgtttccccatgttggccaggctgctctcgaactcctggcctcaagtgatccacctgtttcaacctcccaaagtgctgggatcacaggcgtgagccaccgcgcccagcctccaatagtggcctggttctgagactacttggatagtccagacgtattctgatttaacaaacttagtgtgaaacaccacttcactaagtgtatttctgaaaatttcagacaaaaatccagctcactcttgttaaagttgccttgaggaacagtatgtgttaatcttttacagatgcttactgtctagcacaggctcaaatttaagtcgattatcttttc

SEQ ID NO: 531147 - DNA, 593 bp, Homo sapiens
  misc_feature (241)..(241): n is a, c, g, or t
gttgggtttatttcaacagtaaatctgaaactcttgcttaaggcaagagtttcagatttacggtgtgaaataaaccaaactctccatgaaaaaaaaaaaaacgagaagaaaaaagagacaaagccactaaaaaaaaacacacggggcggctgtccagagcgaggtaaacgctgagatactcgtacgacgctgcgccggaccagtgtcaacttatatcaacaccatcgaacgccacggttcnggtcggctattcaacaaacaaaacgcttgtcttctgcgtcagacaccactctcgtaacctaaacgacatcgtgttgagagaagcccaccacacaccaccttctttgagcgggggctagcacgctatcatggggtcgaaactcactatcccccccttgaactccactacacccgcccccccgcggccataccccactataatactacttagccagggactactgtcgtattcgaacaccaacactcgctcatttctaccctgatcggtgaaaacagcgttagtcatcacatccgacatttcattagtcgtccaccactcttattacaaccacggagagtatgtaataaggtgc

SEQ ID NO: 531148 - DNA, 220 bp, Homo sapiens
aagcgttcagagtccacaagcacacctatgccattacgcccatgaaacgcccaagtggaggaggacggggaggagaagtcgcccagcaaaaagaagaagaagattcagaagaaagaggagaaggcagagcccccccagagctatgaactgccctagatgcgtgttgaacacagctgaacgccagggactgcacgtacagagctgtgtgtcccatgactgg

SEQ ID NO: 531149 - DNA, 840 bp, Homo sapiens
ggccttatttctctgctggttgagcgaagggatgtcttccatggtctccgagatcccgtcccagctcatgccctagaattctctgagtccttgatgcactttgccttggcgaggaggcaggacagtcaggcgtgaggctctttaggggtcacccagagactctggagacagttgtgaccagttcaagcacctgaagtcagaggacgagatgaaggcgtctgaggacttaaagaagcctatggtgccacccgtgctcaccgccctggtgtggaatccttaagaagagggggcatcatgaggcagagatttaagccctgcacagtcgcattggccaaccaagcaaagatcccgtgaagtacctggagtcatctgcggaatgcatcatccaggtttctggcagagcaaggcattccgggaacttgtggtgctgatgccagggggccaatgaacaaggcctgagctgttccgaaggcagtggcttcaactacaaggagctgcgctcccggtctagggcccctgcgggtccacccccaccatgtgtggccggttccaagagagaggggggtgggatcccgtggagcataataaaggggccccggaggtgccgctgggcaagaagagtgggcgaagaccaggagcctgggctgggtgtaaagttggttggatgccacggatggcccctggggatgtctcaccggaccggagggctggtaacggtcggagggggccaaaaagggcttaaaccccgattgccaccacgggtggccaccagacaaactcgcagacgtgagcagcgaaaaactctaaagaagggggagcaaaatgtcgcgcggggacaac

SEQ ID NO: 531150 - DNA, 964 bp, Homo sapiens
agggcggcgcctccgcctccgccgcctaggactagggggtgggggacggacaagccccgatgccgggggagacggaagagccgagagccccggagcagcaggagcaggaagggggagaggcggcagaggcggctccggaggagccccaagaacggcccccgtgagggggtcgcagggggcgacctgcagggaccactagcagggcgcggtgcgttgaggggaggatcgggacccgaggcacgggccggtgcgggcgacgccggcgcagtgcatgtgttccgaccggaggaaggccgatgtaatccccgacggcgggatggagccagccgccagcgtccatggcctcccgagcgttccgcgggcaggagccccagggcgcgaagtccccggtctccagttcatgggcaacgataggagtccgggacctcgctaatgcatacgaagaaacacgtaacatgctgataacagagtcccgaggaacgagacagaggaaggaagacgatttctggaccatcccttcagagaagtttcacaatatgctgtgtctaagacactagacccggggcgtggctgttgataggtcggactagtctgtattcgtcgtccatgcgttgatacagagaagcgcccgaatggtcttcggtccgacgaaccggttgcattcgcccgcatcagttgtgcactggcaagaagcaaagattccgaccaacctgttgctgagtagtgtcgggggaaggagcatggggctacacgcggggttagataggggaagaaggcggagcgtgggggtccgggcaggtgttaatcagatcaaggatcctggccaattagtgaggcatgccctcccaattttagacggagttaagcacgatataggggtccggcttgtcgcggcggaagaacctatagaagatgggttgccgtcggggggcaccggtagcggggcgtaaaggacaagtgggtt

SEQ ID NO: 531151 - DNA, 120 bp, Homo sapiens
gaacgcagccggcggaggagttcctgaaccagagctcgcccttctacttcttttttaatggcgaccgcatcgactccctgccggagaacgaccggcagcagacgcacatgctggatgtca

SEQ ID NO: 531152 - DNA, 489 bp, Homo sapiens
gcggcgagggtcccggcgggagccaataaaggtggtgaaaatcaaaaaaaaaaaaaaaaaaaaaaaatgaaaaaaaaaaaatacaagaaaaaaaagaaacaaaaaaaaaacaaaaacaaaaaagttgttggcgggcgcggcgcgcgcccgcgcccccgaagaaactgttctataaaaccacacatgaagatcgggggcggggggggggcacccgcaggggtctcagatgagagactgatgtgggcaaaatgggcggttgctgccccgagaagaaaaacacgacgcggggacaagcagcagtgtggggtgggtggtgtttctcgcacattaaacaacaaaagcgcgcggagggcacaggacgagatttctgcggaacaacaatcacgaaggagggtcgcactgggagacaccaaggggctcaacatagagacgacgaggacacgagaggacgggacacttaaaaataataccccccaccggggagggaga

SEQ ID NO: 531153 - DNA, 283 bp, Homo sapiens
  misc_feature (11)..(11): n is a, c, g, or t
  misc_feature (30)..(30): n is a, c, g, or t
  misc_feature (73)..(73): n is a, c, g, or t
  misc_feature (145)..(145): n is a, c, g, or t
  misc_feature (183)..(183): n is a, c, g, or t
ccccaaatagnttaaaaccattttagaaanagaagaatgaattggaagtagtctgtccacccctattttaagnctttctttttagtgacagtaatcaagactgtggtattgacagagggatagacacgtagatcaatggaacagnataaagaacccagaaatagactcacacaactatgcccnattgatttttgacagaggtgcaaaagcagttcaatggaggaaggatagtttttttgagaaatggtgctttttagaactaaacatccataggaaaaaaaaa

SEQ ID NO: 531154 - DNA, 227 bp, Homo sapiens
  misc_feature (39)..(39): n is a, c, g, or t
  misc_feature (84)..(84): n is a, c, g, or t
  misc_feature (112)..(112): n is a, c, g, or t
  misc_feature (117)..(117): n is a, c, g, or t
  misc_feature (193)..(193): n is a, c, g, or t
attcaaactttaatctcatccagaaataccctcaggganactcccagaatagtgtttggccgaaagtctgcaccccatggcccngtgaagttaacacataaaagtaaccatnacatnaccctagactactgctctcccacaccctccacatctacgtgacacaaaatccagttggtttcaccttctaaatatntctcttgtctgtcatgtctgcactccagcctggg

SEQ ID NO: 531155 - DNA, 153 bp, Homo sapiens
ccccccccccctttttaaaagggggggggggggcaaggcccccccccccccccccccccgtcccccccggaaaaaaggggttccttggggggggttttttgggggtggggggggggttttttaacccccttttttaattttttggcccgggga

SEQ ID NO: 531156 - DNA, 1047 bp, Homo sapiens
  misc_feature (111)..(111): n is a, c, g, or t
  misc_feature (704)..(704): n is a, c, g, or t
  misc_feature (809)..(809): n is a, c, g, or t
gtcactggggccgggcccccggggaggacgaggaaccctggggagcggggtggagggcggtgggtggttttgggatagggtggcggtagataggtcgtcgtcgcgcgcttnctcaccgcaaaacacactgcaggcgcacccacgaaagagaggaagacacacaataaatcaaaaaaaatgaaaccacccgccagccacagtcatgaaatctctatagaaagagtcttccgggctttgggtgagagtggcggtgtggtaggacggagggtcggttgtgcgaagccgccgccccgcaggggaaagggaagggaggtagaagaaagccacgaaccacggaaccgggccgaacgaagaacagaacgtggaacgtagtgacacacccgccacgcaccccaccgcacaccatcacaacgacaagataagacatagagggtaaagagtccggggtgtggtggggggacgccgcgtatgagtgtgcgggtaggcagctactacttatgcagacggggcgatagtgaggtatgtaggggtatttcaatcgtataaactcaccgaatatctatagaagagatagagatcaggtgcacaggttagatattagaataacaattagaggtagaagtaaagtgtgaaatacgcaggtgtcaccgaggtgcggcggacgaggatagagcccagtattaagctacatctccgcagaagangtatttggagaagatggagcgcgaaagtgtccttacgtggcgcgggactggcaactcgatatttgtgaagtgatacgcttgcgttgagagacttactgtccagtngatgtttgatatatagtagcagaagaataagacagcgatgaaaggcagaactgcaagagtgaagagcgcggacgagcggggcgtcggggcgggcgggtcgcgcggaccgacacgcagacgtataagcggtggatgtaggagagggtgaacgtgggtggtgagaggcgggggtagggaggataaagcaccgaagggcacgacgcacgcgaggcacaccgatggctggatacacgtgtag

SEQ ID NO: 531157 - DNA, 519 bp, Homo sapiens
  misc_feature (64)..(64): n is a, c, g, or t
  misc_feature (96)..(96): n is a, c, g, or t
  misc_feature (102)..(102): n is a, c, g, or t
  misc_feature (133)..(133): n is a, c, g, or t
  misc_feature (161)..(161): n is a, c, g, or t
  misc_feature (234)..(234): n is a, c, g, or t
  misc_feature (267)..(267): n is a, c, g, or t
gtcccttaataacagttgcaaaaaagcgctgtccggtggattcccggattgtcgaccccggcgncgatgtttagtacttttttttacacctttccnaacatnataaggtaagggttaaaatttttaattgacnaattaatgatatgttatgggtacatggntagttttatacataatatttttttaaatgatcaaaataggctattaacatattctcaactcagacttactatnttttaaagtgtttaaaatgttgtggttacaggncgggcatggtggctcacgccctatgtcccagtactctggaggccgaggcgggtggatccctggggtcaagagtttgagaccagcctggccagcgtggtgaaaccccatattctactaaaaatgcaaaaattagccaggcaaggtggcgtgcacctgtcatcccaactacttgggagcctgaggcatgagaattgcttgaacccaggaagcagaagttgcagtgatcagagattgcaccactgcactccagcc

SEQ ID NO: 531158 - DNA, 179 bp, Homo sapiens
attgaacgcgctaacaattacccgacagtcatttctacttgcaaaagggatgcgtaagcaaagcgagtataattttcttgtcatggtatcatgcttgttaaattttaatgcagcatcttcagaaactgtgtccgtgatggtgtcttattgtgtcagcaccaaatatttgtgcacttagt

SEQ ID NO: 531159 - DNA, 214 bp, Homo sapiens
acgtagttctgaaaaaccgatatcactaacctttatgatttacaggggaagcttgaagaggaactttgctttctacacattagaatttcttttttctctttttttttttattggaaacggagtcccacccggccccctaggctgaaagtggcacaatctgggctcacgtgaacctcacacttcccaggttagaagcaatttcttgtgcctcagc

SEQ ID NO: 531160 - DNA, 427 bp, Homo sapiens
  misc_feature (5)..(5): n is a, c, g, or t
  misc_feature (390)..(390): n is a, c, g, or t
tgtgncctaggggcccaatagcccgaaacaaagtagtatcctaaagcccctctagacagcctggtcctgaaaatgatggagaacacctgtttccgcaaactttaatgtgagctgtttggaaactgagacccctgagcttgtcctctgatttatcgcccaccggtttttgcatgcaaggaccacttaagcaatgcttctccaactttcatatgccccaggaatcagctggaaatcttcttaaactgcagatttggattcactaggtggaagggtccgccagagcatttccatttcttataagggctcatgtgctgctgctgatccaggggtccactttaagaaggaaggctgttgagatgatgtgagaagaaagacgagaggcagaaaggnagagacagagataatgaatgaatgaatgaatgaatga

SEQ ID NO: 531161 - DNA, 1023 bp, Homo sapiens
  misc_feature (1)..(1): n is a, c, g, or t
  misc_feature (625)..(625): n is a, c, g, or t
nggcctcggtcttggcccgacgtgtgtcggacgaccgcgcgtttttgtggccccagcgacaggaagaaccccttcccgggtggggggtgccagccggagaggggaacaccaccagcgtggttgttattcttccaacacaccgatggggggagggcccaactcaagggaggggtttcacccgcgcttttttgacgccgccctctcccccgcaggctggaacctgtccttcctgcagatttgttagagcgactgatatagagtttcttctgtgggaccacgccctcacctgtggtggtgatcgatcacctctctaaagcagagccgcacagaccacaacacggtgggcgaccacggggcgctccggcgcagacggtgtggttcacatatttacttacaagggcgccccaccaccctggggcgacaacactcatacaaggaattttttttgtccgagcgggcctgcttcattcatacgccgcggttgctcagtagttttttttaatcaggatagtgagggaccaaccaacgcgcgggtgtgtggtgaggcagcacccgccgcgctgctatcgtatgtggggcgcgggggttggtgtttctaaacgacttgtttctcgcacacacggtntggccccccccctggggttcttctttcacataggagtgggggagggctgtgtcgtcaccaattgtgtgtggtgcggcgagtcagaacgtgttctcttcgatgatgggtgatcacgcgcccgcgtgaggcggggcgctggcttctttgtgatccctatcgtctgcccccgcgaattgttgacgcccggccccaccccgcagccacccaccccccggtcgtctttttcaacttatttgtgccgtggggacgggtcccccccacagaacccgccgaagttgttcccctctttgggagccccttacccttttttgaaaatttccctccccctggtggaagtttttttttttttgggtaaaaattttcttgaggttaaaaaaaaagggttttggcccccccca

SEQ ID NO: 531162 - DNA, 1284 bp, Homo sapiens
gctccacaacagcaagcgaccgatgagacttggttccactctttgcgtgctagcgcttggctatatgctggctcaaactcgtgaagatgtcctatacactagctgctgccgtgtgatgggagattcaaacgtccagtcatgggatggttggcaggtgtcacaaggcatttaagcctgatgtgaattgatagcagctacgggtcctgccaaatggacgtatgtaacattccactcatcgcttcagacccatcagtggagaaacctcatgagcactgacgcttcacaggtatacgttatgctccgttggctttccgtcttgtgaccttgggtctcaacccacctgcgggagaaggcgtgaggacccatcgatggcaatcctggctgcactggaggtttgtgtcacaagccattctcgcacgtttttgtccaatcacactgttctggatagttgtgtgcatatgcaggctctgggaactgttgcgtcgaaggcgtgcagacaactgctccaacatttgtatgtcgaacatctttttgacgtccataatgacgacaaggatggtaatgacccaagatccctgaaggaaacacgagaatgacaaggacacagaaggacgcccctgctgacatgggagcacatcagggagtggctgtctctggggattgctccttatcgctataggggcgaggacgattgctgcaacagatggcattacgaaacctttggcccaccttgctgcagaatactggtggagcctacactccgagagcgtgctgtaaccttatcagcactggcccctcatctctgtttccaaatcccctactcaatcgatcctggataactctaaggcagatttcactcattgatgctgattccagaacatttcctatataactcccattttttgccatgggctttgggtgggcaggtggtaaccaaatacttgcccgtccttgggttgcaagttgctgcgcccagttagctcaataatcatgccaatgggacccaaaaacccctctttcctgggctgcccctaggccccagggggcctgtaccccgtgttcagtggaactgggcccccttaacccatctgtccctatacgccaggcagacgggccgcttttaagccacgtggctcgtgtcctgtactgtctcccatggtgctggctcttaccttggctgttccgcgcgtgattcccaggcacccccatttttttttgattgcctgtctgttgtcactccgccctaatgttcgctctcttcttcggctccctcgcacgcactct

SEQ ID NO: 531163 - DNA, 150 bp, Homo sapiens
atgcactaaacctggacatacattctagctcttcctgaatctttgcttagcagtcctactgtagtgatagttctggctttgggcctaagggtttattaatgattaccgctgtagtgccagtgccaagttttggcaaagagtccttatttg

SEQ ID NO: 531164 - DNA, 876 bp, Homo sapiens
  misc_feature (32)..(32): n is a, c, g, or t
  misc_feature (67)..(67): n is a, c, g, or t
  misc_feature (75)..(75): n is a, c, g, or t
  misc_feature (157)..(158): n is a, c, g, or t
  misc_feature (160)..(161): n is a, c, g, or t
  misc_feature (163)..(166): n is a, c, g, or t
  misc_feature (198)..(198): n is a, c, g, or t
  misc_feature (220)..(220): n is a, c, g, or t
  misc_feature (222)..(223): n is a, c, g, or t
  misc_feature (228)..(228): n is a, c, g, or t
  misc_feature (334)..(334): n is a, c, g, or t
  misc_feature (338)..(339): n is a, c, g, or t
  misc_feature (382)..(383): n is a, c, g, or t
  misc_feature (523)..(523): n is a, c, g, or t
  misc_feature (699)..(699): n is a, c, g, or t
  misc_feature (724)..(724): n is a, c, g, or t
  misc_feature (801)..(801): n is a, c, g, or t
  misc_feature (803)..(804): n is a, c, g, or t
  misc_feature (806)..(806): n is a, c, g, or t
  misc_feature (838)..(838): n is a, c, g, or t
ggctggctcctgtttttgggcaggaggccagnatggggacacaggagatatcaggcaggagtcaggnagggggangaggggacacgggttggggtgacagacaaggtagtgcaagggcagaggcttctagctggaagtcctggacccgcagcataannanngnnnngttcgggggggggctcatataaagcgggagancctgggccccgacacaggtggngnnggggngggggcgcgggttgacgaggataaaaccggctcttaggaccgtggcttctgtcctgggtctcagggcacacgcgcgcacacatatacaacacaagatgcttctggnatgnngggcagggtcccagagaccccaccctcattcaagctaaaaatnnggaggggctgagcaggggctgggaccaagacccatgttttaccagtggggcgagtttttttggtttttctctccaaaagggaaatttaaaaatctacaacaaatcacaccaaattcattaaaagtgataaaaacccagcntccccctcctcacttgagcttcagaccgggccagaaaagctcaacgatgaagaaacaggaacatgcccaggtcaggtctccccacccaaacacaagtcccggagtgggaagcttggagctgggatggcatgggcagccccagccgccagcgtctgttgactgccaagagctgcgtnttgtgggggcagagtgagagagacnaccccaagcgaaaaaggtttccgaggacaaattctaaaaatatgaaagatattttagccgaagtatcggagggcttnanngntgggcgaggtggcagcggggtctccgcggggncgaaatcagctgtgctgctccaggtaaaaaaaaaagag

SEQ ID NO: 531165 - DNA, 899 bp, Homo sapiens
tcttttgctttagacttagataccatgtagtggtctgtgtgctacaggaagctggttctgtcctgcttccacacgtctgcttcaaaaacactgtcctgacttcgctgaactactagagaccaagtttaccacttctgatgaacgcagaccaattaagattcattccctcattcctgctttcctttccagctgcggcacgaacgagtccccaatgaacataacgatgcaaacctgccttccaatgacacctagctaccaatgctacgcggctcttctcaacattgctgccaacagccctatacgcaaacttacgctcagcgcaacaactattggaatcctctcataccgatcccaaagcacacacaggcaatgtgctcctagacccagcgacccatacagccctatctccgatcccccctctgccaccctctacgaaccctctgacaagctccagcactaaactcccgttctacaacacggcgccattctcactatacgactttacagcccacgcaacccgtaataccccaccccaaaagcaccttctcgcaacatatctctaacgacgcacatttaactgccttaaggacccaattggcacatcaataaccccacatctcaccatgcgccacactttctcaccacaggcaccttgggcaccattatacaggcgcgatacctaccggttacgctactcccacgcatcaccggtcttcaacactccactcctcctcactttggttcccttcaaattgcaaaccgctctagacacccccactcccctaaccataccaaccccggcgggacgacgaaacaacgcgggcaccacagtactaataggatcctttcatcccttaaagtggccttcgaccaaccgtctaccacaacactccctctcc

SEQ ID NO: 531166 - DNA, 419 bp, Homo sapiens
  misc_feature (52)..(52): n is a, c, g, or t
  misc_feature (57)..(57): n is a, c, g, or t
  misc_feature (70)..(70): n is a, c, g, or t
  misc_feature (73)..(73): n is a, c, g, or t
  misc_feature (89)..(89): n is a, c, g, or t
  misc_feature (91)..(91): n is a, c, g, or t
  misc_feature (219)..(219): n is a, c, g, or t
  misc_feature (247)..(247): n is a, c, g, or t
  misc_feature (276)..(276): n is a, c, g, or t
  misc_feature (279)..(279): n is a, c, g, or t
  misc_feature (295)..(295): n is a, c, g, or t
  misc_feature (309)..(309): n is a, c, g, or t
  misc_feature (311)..(311): n is a, c, g, or t
  misc_feature (313)..(313): n is a, c, g, or t
  misc_feature (318)..(318): n is a, c, g, or t
aagcgcaggtatacaactttactttcctattactcttatgttatgctcaggnacatnttctagaaaaccnacnaaggttactgacgaananatatacattctttattctcccccatcatggagcacttttctgcacttgggtactgagtaaaaactttacacaaatgggatttggcctggatcctaaaaggcatgcagaatttggatactaaaaaccanatctactttctccctaaaatctttccangcttgtgtcactgacagtttccttgtaantcntaaagcccttccattntctcttcttttcanananttaanatctgtgcttttttttttcttttttttttggagacagagtctcactctgtcgccaggctggagtgcagtggcgcgatctggctcattgcaaccacggtaaa

SEQ ID NO: 531167 - DNA, 857 bp, Homo sapiens
gactgacagaatatttggtggggcagtcctgattaaaactaagactggctggtggtaaatgaatatgtccagttttgaatttaatagtaactccaatacagtaaatggtatcactgttaacccctttaaagatatgataagacttcgtaagtaatgtcaattttcacaaagatggtgagtgccatcttaaaatcttactgagatgagttaatattagattaatataactgttatgtgaatatatttaaatactgggaaatggcttcatgtcttagaaccaagcaagattcacctgtgttttgtgtcatgtccattgtgcctcttaagggcaggggttgaagataaatacggtagcaatgtctatagttgtgccttaatatgccaatctaattataatcccctgtatttaaaatggtttcttttacttatggaaaggcattaagtgtggtaatgtgtatattaaagattattcaacactctcaatttacagatctataggtcacatgcttttaacactagtagcatgtaaacttcatctgtgaattcttaccaatctagtcaactaagtaatacattaggattgttttacacagcatcagaagcaaatgtgaactggtattggatggaatgggtgttggcaactaacaggataagatagggggtattaacaattcacattttggtggtcagattagggtattaaagaaagaaaagagaaaatgtgggggtggtgaagtttaaaaatgtgggcggccagagaaagagtgaatgtcaagaacgacgggtgggtcaacaaaaccggagggtgacaggtggttgtaagcgccacacgggagggagaaggagagagagaaaga

SEQ ID NO: 531168 - DNA, 1510 bp, Homo sapiens
  misc_feature (119)..(119): n is a, c, g, or t
  misc_feature (1068)..(1068): n is a, c, g, or t
  misc_feature (1293)..(1293): n is a, c, g, or t
gcccaggtgtgcactctccatccagctgtgcgctctcgtagggagtcccagccatgtccgatgagagagaggtagccgatggagcgaccggggaagacgcctcttcgtccgccttctcnataaacctgaggtcatgcgtaggcgcacccccagacatcccgtcggttctccgtaagggggccgtgcgttcgaccgtgctgtcctcgtcactgactactgactgcagtctgccatatttgcatcaccggcgtttgagaggtcgtacaaacggaggtgcatatgctgctcgagtcgcgagcactggccagtcgaccccccgtgtcccacgtgaggcgccgagtcacgtctgaacagactgacggttcgtgcgcggagccctgtcgggggctcagacttcgtcagaggctcttggcctgagggctcggggcgctgatacagaggcagtacatcgccggcgcgtcttgcactttgtgccaacctgcccgggtggcgactgagaggagcggccgtccgagtctagttctggctttgaattccgcccaatgctgggcgtcgaaccgggcgcaccgctcaatgttggaaccgctggcaataggggctagttggaagaaaccccagtgggattggacatggtgcatggtatcgaaacaccacggggcttccaagggggaatttgtattgggacgacgaggcaaagggccagtcgctggtaaacttaggttagacccccaattacggtgggctcctctaaggaaacactgctctccctgtgtgaactacacgttgtacagaggtccccaagtggaaacacatattctttgtccgcggcaaaaagtccggtggcggttgacaccgtgtaggctttctcaagttggtcaaccacaattctaaacgatatctcaactgaaggcccccttctaccccaaatgtgcgcctcacccctcccattgtaatggagcacttttccgtgggcgggaaagtagccgctgtacacccaatgtgcgccccgttgtgggaccccaaccctttgggtcggggtccgttttggcagttttgaagccaccctgntttgtggggcgttcggtcccattcgggcgctgggactggcttagtgtcggagatttacctccgcggttggttcgctcctgtgatgcctaggcgctgtgcggtttgggccccagagatgagcgcactgtgtggggcagtggtcacaacttggttggccaccatcgccccggtttacaggggcgatataggacagagagcaggccagtaccagacgcgccttcaagncattgggtgaccagttgggagcgccgttattacctggtataagttgcgcccgacaaaactgtggcgcccggataaccacggaatggcatttcacgcctagggtttggagaactcattttgagaccccctggacccctcgtatctcttagcacgagatcgaggacctttggcgccattcacattcgtatagagatagttattcactccgcagtgaaaa

SEQ ID NO: 531169 - DNA, 202 bp, Homo sapiens
gggtgacgagatctggaagtgcgcttcggctatacggcatcgtcttcgcctccgacatcgagggcgcggatttcgccttgaccccggccgatgtatggtccgccctggccgcgcaaaccgtgcaggacggcgccctggccgccaatgccgccaagacctgggccgatgtgaatgccgagctgcccgcgcagcgactggggca

SEQ ID NO: 531170 - DNA, 197 bp, Homo sapiens
tacacaatgatacgagcgcataagtactgaatggcatccgtcctaccggatacctaggaaacggcgccaatgctcatctttgtgtgcttgcagtccaacgtgtgatgagcctcatgtatgtcaacgttgcgtggaggcccgtttggtgctgaacatgcaaatcaacctatattaaggttgatgacaacaacgaaact

SEQ ID NO: 531171 - DNA, 238 bp, Homo sapiens
ctggcaggacccagtgaagacaccaagggcttctttgaccccaaaactgcactgagaacctcacgtaactgcagctactggagcgctgcgtgtgaggaccccagagatgggcctgtgccgttctgccactcacggtataaggctgccaatggcggggagcttggtctacactgactccgaggcccggtgacgtctttgagaagtgccaccgtgtcttgcgcctgttaggccgatctga

SEQ ID NO: 531172 - DNA, 341 bp, Homo sapiens
  misc_feature (179)..(179): n is a, c, g, or t
ggcccccccccccccaagggccttgttggggaaccttcccccccccccctgggggccgcccgggggcccccctgggcctccggttttttttccccccgccgggccggtcctggggccctgggctgggggctgtttcccccgggtttttgtggccccccccccgggggggcttttctttntccaaccagggaaaaacaagggggccaggggccccctttttttgggccgttttttttggccccccccccccccccccgggtttttttttttgttttcccgggtccgggcggggggcccgttcccggttttttttttgccgggggatttatggccccttggga

SEQ ID NO: 531173 - DNA, 206 bp, Homo sapiens
tagccggtacctcaaaaaaaaaaaatagtcgggcatggtgggtgcacacctggtaatcccaggtagctggccactacaggtgctggcaccaccacgcccgggctaattttggtatttttagtagagacaggtttcaccatattagccaggggggtctggaactccggacctggtgatccacccgcctcggcctcccaaagggcggg

SEQ ID NO: 531174 - DNA, 208 bp, Homo sapiens
cttagaggatcttccccgactagcccgacaggctctacctctgaccccagcttctctctggttcccacaggccccatgcatcctccctgacccgtcctccagccctaactcctccctgaccagtcctcctgccctaagtctcctccctgactggtcctcctgccctaagtctcctccctgactggtcctcctgtcgggctagtcgggg

SEQ ID NO: 531175 - DNA, 278 bp, Homo sapiens
ctttatggggtgatgggtcctcaccccccttttagtttttttctggtcgtgggtttcagtgctgtttggggatgatttaagatatcccccgtggttatgtcagctaaagggcctggggaatatccgcttttggtttattttcttccatagggcgccttgaaatatggagtgtttcctctcagggaagccagtggatcccctggggttgagaggatttttttagtttactcttattttaaaaaggtaacctcttgaaacattaaaattgtaaacgccca

SEQ ID NO: 531176 - DNA, 224 bp, Homo sapiens
  misc_feature (5)..(5): n is a, c, g, or t
  misc_feature (12)..(12): n is a, c, g, or t
  misc_feature (50)..(50): n is a, c, g, or t
  misc_feature (109)..(109): n is a, c, g, or t
  misc_feature (151)..(151): n is a, c, g, or t
  misc_feature (202)..(202): n is a, c, g, or t
gcctnctgtacntcggcccagcaggccatatgaggggtcaggcctgcagnactcacacttggcacctgctccaaaaccctttcaggtctttgaggatctgagccctggnctgggtctcccgccggctcggaaaagctggcctgccgggcanagcagagaaccacacgattcagaaaagcagtgccttcagcagcctctccancgtctgggctccccaaaggcag

SEQ ID NO: 531177 - DNA, 289 bp, Homo sapiens
gcccataccacggtcattcattaactcgtgatgagaaatctagatcgactaagaagaatgagagatagttgtcactcggaaaaatatctggagaggaagaatggaggattggcattgagatccatgtggacaagctaagtggtctctgtctaaaagctgtcattcatccacaacattaaaaaaatatcaaaatgcgaggggctgtaaattaaaaagaccacacagaatatactgctctcataaagatctgattgccttggcacaggccctgtggccacacattatggag

SEQ ID NO: 531178 - DNA, 235 bp, Homo sapiens
  misc_feature (34)..(34): n is a, c, g, or t
  misc_feature (67)..(67): n is a, c, g, or t
  misc_feature (69)..(69): n is a, c, g, or t
  misc_feature (94)..(95): n is a, c, g, or t
  misc_feature (143)..(144): n is a, c, g, or t
  misc_feature (160)..(160): n is a, c, g, or t
  misc_feature (172)..(172): n is a, c, g, or t
  misc_feature (182)..(182): n is a, c, g, or t
  misc_feature (186)..(186): n is a, c, g, or t
aagaaaattatttctaaataatatgatgtttaanataagcacttgaagttaggggaacatgaagatnangaaatgggggttttgaggagataanncttgtgaacaaatgtactccagcagccaggtatcccagatttcctgtnntggagggtgctggggnccctggatcccnaagagtgagnaggnagatccccagagccctagctcatccatttatccattcctcataatccag

SEQ ID NO: 531179 - DNA, 365 bp, Homo sapiens
tgccgtcgagcactactggaggagactgctgtggcagagacttccatgaaatggattcgccttggctcagtgatctcctggttcttgtgagacttgcaaaagtcctagatgttggcgtcgatgtctgtaagataggttgggctggcttgtcgtgtgtggcagtgctgagtggtataatcatgcaaggttatggattcttgtgatgcttgtgatgctgtggattctttggaaagtactgtgggagcttgtttcctctgtgtggagtgtgaccagttcacttgctgatgaataccccaaatcaccacctccaccatcctggttcatctgatccatgtattccagagagcttggcactccaatgggct

SEQ ID NO: 531180 - DNA, 116 bp, Homo sapiens
gtcgcatctcagcaggcacccctgtcatgttcttcttgcatcatgcatgtcaccagcatcaaccatcactttggtgtgtcatcactgccagaaatgcaatcaacgttcacattcaa

SEQ ID NO: 531181 - DNA, 426 bp, Homo sapiens
  misc_feature (18)..(18): n is a, c, g, or t
  misc_feature (36)..(36): n is a, c, g, or t
  misc_feature (43)..(43): n is a, c, g, or t
  misc_feature (88)..(88): n is a, c, g, or t
  misc_feature (278)..(278): n is a, c, g, or t
cggccctaataaaacttnccgggctccctaaaactnaccccangtgtggccccatgccggttaaaccaccttgacggaagaagatganggaaccccgggaatatttaccccccaagaacagtgatggccgccttcaccaagcattggcaactcctaccttcccccggcttccctgatccctgccctcagcttctccctctcccacagagaagaaaaaattcctgccctaaagtctgcaacatcgtttcctgcctgagtttcagcctgcccagcttccnctacggattctggacttgccagccccacaatcatgcatcgtcacaggtgtgaagtggtatctcattgtggatttgatttcgattttgcagatggctgatgatgtcaagcaacccttgatgtgcttattggccatttgtatatctcctt

SEQ ID NO: 531182 - DNA, 452 bp, Homo sapiens
ggaattcccgggtcgactactactactaaattcgcggccgctcgacaaaaatataaaaatcagccagacgtggtggcacgcacctgtagtcccagctactcgggaggctgaggcaggagaatcagttgaacccaggaggcagaggttgcagcgagccgagatcatgccactgcgctccagcctgggcgacagaacaagattctgtctcagaaaaaaaaaaaaaattagcctggcatggtggcgtgtgcctgtaatcccagctactagggaggctgaggcaggagaatttcttgaacccaggagacggaggttgcagtgggccgagatcaagcaactggggtcaaggctggcccgaacaaggctggggtcactgggttaccccaaccatgtccggccaaaatgggactacccagtggtagtgaaccatctaattaaaaccaaaactcccccag

SEQ ID NO: 531183 - DNA, 1644 bp, Homo sapiens
tggaccttggacacctgctagtgaagagccttgtgacccttccagttgcgtaaagccaacctagcccgtgatctctgtgcttcagacgccagtggggcagtggcagccctggggccctttcccttctgtgaggaagcacaagcctcagggcacaggtgtgcagccaggcatgcggcagggccaacagcccgaggacctctcacttgcaaccagttactcactgggagcaggcttgtgtttgcaactcaaggcacaacacctgtacaatcagtgtaccgcatgccctgaactcccaggacttacgacaacaacacctatagagcacgcgcgaccccctttacacacacatatataccaaccgacagacaagtgacagtacgcttaggcactgggtggacacgtggtacacaagcaccccagcccttgggactacgggtaggatagtagacacacaatgaaatgggagcacctctacggaaggaacatgtgagtgccatacatcacaggtaacacggactataaaattccattggccattgggcattctcagagccatggctgaccgcaacgcatgggaatatcatcggaatcccatacaatggaattccccattatccatggggcgaaacatccgtggattatacacccaccacattacaccgttatgtacagaggccgtggctgaatacacccatacaacgacgaaggataatcccatatgtgcccacaagtgcaatttacgcgattctcaggatatatagataacacaagataggccccacgaatatgggacaccatccataaggaccttattatagacccccttatgtgagaagggtaacgccacccaccagaatgtgacgaatagcacatgtgacgtacccacatggaaccggggtatatacaacacgttagacacactgggacccacaacggacgaccatggacacagttccaacccttgcctatatcacaattccatccacgacaaggccacagtacaccttgtacccaacgattatagcgagcaccccccagtacaaagcaagccacatagggcaatgcgagatccaaagacacaagtggaacgaagaaccaacaggggccaagcgcaagacacacgagcacgacgtgccacacggggaaacgaaaacgccgacgattggaggaagccacaaagaagcacaaggggcaagaagccacacacaaacaccgtcagatgcgcatatacacacagcaatgggaccagtccaccagacgacacaccacaagcgagtaaacgcacccgattacgagcacccccaccaacatcagagagccaccgcaaccgaaacacatgagacgaaaacgtcccacagcacagatcagaacaaggatcacacaacaagagcacaacgaaaccacagggtggcacacacaaaagagacaatagaaacgcaccccatgcggaccacatacaccaacacaccagacaaacacacaaaactggcaccacacaccaacaacagacggaggccacaacaagacgcgacaaacgaactacagacacaaagagcacacgacaaaacacacagaaaccaaaacgcaacacgaggagcccacgaaacaaaagacccgagagagcaaaaacacaagcccaccaca

SEQ ID NO: 531184 - DNA, 894 bp, Homo sapiens
gcttatttaggattttctcggtcaatctgttcattcctggtgatttcaaccactggtggctgaacagtcttcaacaggggaaagttcaactgtatcgattttcaaggtgggagctgttcgatcccgttcgcttctaatgatcagcgaatgactgcataattagaaaaacctagctgccgtgttccccaggtaacaagtggcttagcttcaaggaaaacttagcgctttgctcagaatccatgattccttcccagctggtctgctactgatgggcttatcccgcatggaggcaggagcgtgtctggccctggagtactggaactgttctgagtgaacaactgagaccacgttacatgataccttatgcttcatggttccgtgttgagcttgcccgtctccgaatatccagccagtagatgtcacattgcctcggcctagtcttcagcctaatcagttatccatatagtgattttctgagtgtgctcagggtataaggcgttccaagttcagccgtcagtctatttctagaccattcatcgccatcgttaaatttctttagcttcctggttcttaataatatgcacaggctttaccatttccgtgtcagtaaataaacctagaggcctcttatatagatgtattctcctcttctgtaagctcacgctagaggccatcaggttgctcatgtccgttgtcaccatgagtactactcacgagttcagtttcgtatgagtggtgatcacctgattgtttttcacaatgatatttcttgacgggaatgggtgggagtgtctggtgtaaagagcgctgtaaatgtggttgtatgagccaatcatatttgtgattttgtaaaaaaagctttacaaggagatatctgcttctgaaccccactta

SEQ ID NO: 531185 - DNA, 408 bp, Homo sapiens
agccttaacaccgcatctgagaggtccgggtgactttatgtgatttaaaagttaattaaactgagtggtatgaagtataacagccccaggtgtttatttccaaagagactttggaaggaaaaggggagaaatctaataaaaagctttgcgagatactgcattaggaagtaatcataccgctaaatcacccggtgtcggcacaggccttgtaatgactccggacttgctgttcccctgcctcctgagcccacccagccaagaacgccctgctgggaccctcgggctgccctctaaggccaggagagccaacaaatgagactctgagagccgcacgtgctgagcctggaaagggcgcctccgaggacgggccgctgtccctggagcccctgtctgagattgcggtgttag

SEQ ID NO: 531186 - DNA, 147 bp, Homo sapiens
  misc_feature (93)..(93): n is a, c, g, or t
aaaggggcccattttctgacccacttactcaggacctcactcactagccccgcttggggccccctcctgtgacctcagggtttgccccatggngccctcccaggcccctgccccaactgattctgcccagataatcgtgtctcctgc

SEQ ID NO: 531187 - DNA, 883 bp, Homo sapiens
  misc_feature (53)..(53): n is a, c, g, or t
  misc_feature (92)..(92): n is a, c, g, or t
  misc_feature (306)..(306): n is a, c, g, or t
  misc_feature (428)..(428): n is a, c, g, or t
  misc_feature (451)..(451): n is a, c, g, or t
  misc_feature (543)..(543): n is a, c, g, or t
  misc_feature (549)..(549): n is a, c, g, or t
  misc_feature (555)..(555): n is a, c, g, or t
  misc_feature (563)..(563): n is a, c, g, or t
  misc_feature (565)..(565): n is a, c, g, or t
  misc_feature (573)..(573): n is a, c, g, or t
  misc_feature (579)..(579): n is a, c, g, or t
  misc_feature (615)..(615): n is a, c, g, or t
  misc_feature (652)..(652): n is a, c, g, or t
  misc_feature (682)..(682): n is a, c, g, or t
gcgctccaggcgacagcatgcagacgccattatcctctgtttctctgctgcancgacctcgacgtcttgcctgtgtcccacttgttcgcggnctataggctactgcagcactggggtgtcagttgttggtccgacccagaacgcttcagttgtgctctgcaaggatatataataactgattggtgtgcccgtttaataaaagaatatggaaactgaacagccagaagaaaccttccctaacactgaaaccaatggtgaatttggtaaacgccctgcagaagatatggaagaggaacaagcatttanaagatctagaaacactgatgagatggttgaattacgcattctgcttcagagcaagaatgctggggcagtgattggaaaaggaggcaagaatattaaggctctccgtacagactacaatgccnagtgtttcagtcccagacagcangtggccccgagcgcatattgagtatcagtgctgatattgaaacaattggagaaattctgaagaaaatcatccctaccttggaagagggctgnagttgncatcanccactggnancagccagntcccgntcgaatctgatgctgtggaatgcttaaattacagantataaaggaagtgactttgactgcgagttgaggctgntgattcatcagagtctagcaggaggaattntggggtccacaggtgctaaaatcgaaagaacttcgagagaacactcatacaagcatcaagctttgccaggaatggttgtcctcattcccactgacagagttgtccttattgaggaaaaccggaaggttggagagtgcatcagagatcatcctgatcttatatcttgagtctcccgataaaggacgtgcccagcttatgatc

SEQ ID NO: 531188 - DNA, 336 bp, Homo sapiens
  misc_feature (2)..(2): n is a, c, g, or t
  misc_feature (6)..(6): n is a, c, g, or t
  misc_feature (11)..(11): n is a, c, g, or t
  misc_feature (18)..(18): n is a, c, g, or t
  misc_feature (26)..(26): n is a, c, g, or t
  misc_feature (40)..(41): n is a, c, g, or t
  misc_feature (53)..(53): n is a, c, g, or t
  misc_feature (59)..(59): n is a, c, g, or t
  misc_feature (92)..(92): n is a, c, g, or t
  misc_feature (95)..(95): n is a, c, g, or t
  misc_feature (101)..(101): n is a, c, g, or t
  misc_feature (103)..(103): n is a, c, g, or t
  misc_feature (116)..(118): n is a, c, g, or t
  misc_feature (120)..(120): n is a, c, g, or t
  misc_feature (163)..(163): n is a, c, g, or t
  misc_feature (169)..(169): n is a, c, g, or t
  misc_feature (172)..(172): n is a, c, g, or t
  misc_feature (174)..(174): n is a, c, g, or t
  misc_feature (203)..(204): n is a, c, g, or t
  misc_feature (207)..(207): n is a, c, g, or t
  misc_feature (215)..(215): n is a, c, g, or t
  misc_feature (229)..(229): n is a, c, g, or t
  misc_feature (259)..(259): n is a, c, g, or t
  misc_feature (318)..(318): n is a, c, g, or t
gntgcngaggnggaggcngaggcagnggcgagggcgcccnngccggaagaagnggacgncttcaccgccccacactggcggaggaagcagcnggnggggcncnacggcgacaagcnnncnaaaaccaaggggtccaacaacaacgagggccgggcgcggcggnagtcgntgnangcgacgggcaaggagggcaaaaggcatgnnttnatttgaanaggaagataggttngtggtgtttgcgttgaacaactgcagcctntaccattttattaagtgttactagtgtgtgtacatagtaatactgtcttccgtatgtangtgcggtgtatgcgcgtg

SEQ ID NO: 531189 - DNA, 945 bp, Homo sapiens
  misc_feature (53)..(53): n is a, c, g, or t
  misc_feature (92)..(92): n is a, c, g, or t
  misc_feature (306)..(306): n is a, c, g, or t
  misc_feature (428)..(428): n is a, c, g, or t
  misc_feature (451)..(451): n is a, c, g, or t
gcgctccaggcgacagcatgcagacgccattatcctctgtttctctgctgcancgacctcgacgtcttgcctgtgtcccacttgttcgcggnctataggctactgcagcactggggtgtcagttgttggtccgacccagaacgcttcagttgtgctctgcaaggatatataataactgattggtgtgcccgtttaataaaagaatatggaaactgaacagccagaagaaaccttccctaacactgaaaccaatggtgaatttggtaaacgccctgcagaagatatggaagaggaacaagcatttanaagatctagaaacactgatgagatggttgaattacgcattctgcttcagagcaagaatgctggggcagtgattggaaaaggaggcaagaatattaaggctctccgtacagactacaatgccnagtgtttcagtcccagacagcangtggccccgagcgcatattgagtatcagtgctgatattgaaacaattggagaaattctgaagaaaatcatccctaccttggaacgagtaccaacactactaaaggaagctgactttgacctgcgagcttgaaggctgttgacttcaatcacgacgtctagcacggacggacacttactttcggggtgttccaaagaaggggtgggccttaaaagagaagtccaaacaacggaaaacgtttcccggacggagaagcagcttcaaataccacgcaatccaaacgccttttatgtccgcccaaggcggaaaaaacttggccgttggatccccattcgaaattgtccccagcagtgagaccccagggaagccctctgggtatgtccgttgataacattgtggggaaaggcgggaaaaataaaaaccccccgcaaccttaccgggcgccttccggccttcacggaaacgggtttggggccgatctttaaaacacacggg

SEQ ID NO: 531190 - DNA, 155 bp, Homo sapiens
atccaaagaattcggcacgaggtgcctctccaccctcggggatttttacctggacacggaccatttagacctttaggttcacttttgcccaaaaaagtactttatttcttggtaacccattaacaaccccaaacccattggttcccaaggaatta

SEQ ID NO: 531191 - DNA, 184 bp, Homo sapiens
aggacagatcccacagtgagccaatgttaagagatctgatggcattatgaggaagagtcttaaaggcaaattttacaaaaagaacttctagaatcttgaaatcgacctgactgaggaacacacattgatgtcagacttctttgtggacattgtttaatctggttttgcagtgccaggaacaatt

SEQ ID NO: 531192 - DNA, 229 bp, Homo sapiens
attgagcccctgtgatgcccactttcacttccaccagatccggctgcagagcttcccggggcactcgggggccgtcaagtgcgtggacccctaagcagcgaggacttcttcctgagcggcagccaggatcgtaccgtgcgcctctggccgctgtacaactacggcgacgggaccagcgagacgggcccacgcctctgtctacagccccagcaccgcaaagagccgtctt

SEQ ID NO: 531193 - DNA, 322 bp, Homo sapiens
tctttcagttttcatttttttttattttaaatattttatagagatggggtctcactgtgttgcccagcctggtctcaaactttcgacctcaagcaatcctcctgcctcagcctcctgaatagccaggattacaggcgtgagccaccacatctggcctcttccagcttcctgagacattcaaaattattacatcagaaaggctgggcgtggtcgtcacgcctataatcccagcactttgggaggctgaggccggtggatcacgaggtcaggagatcgagaccatcctggctaacaaggtgaaaccctgtctctactaaaaaca

SEQ ID NO: 531194 - DNA, 884 bp, Homo sapiens
  misc_feature (2)..(2): n is a, c, g, or t
  misc_feature (86)..(86): n is a, c, g, or t
  misc_feature (100)..(100): n is a, c, g, or t
  misc_feature (184)..(184): n is a, c, g, or t
  misc_feature (192)..(192): n is a, c, g, or t
  misc_feature (221)..(221): n is a, c, g, or t
  misc_feature (226)..(226): n is a, c, g, or t
  misc_feature (264)..(264): n is a, c, g, or t
  misc_feature (323)..(323): n is a, c, g, or t
  misc_feature (362)..(363): n is a, c, g, or t
  misc_feature (371)..(371): n is a, c, g, or t
  misc_feature (375)..(375): n is a, c, g, or t
  misc_feature (382)..(384): n is a, c, g, or t
  misc_feature (387)..(387): n is a, c, g, or t
  misc_feature (393)..(393): n is a, c, g, or t
  misc_feature (396)..(396): n is a, c, g, or t
  misc_feature (402)..(402): n is a, c, g, or t
  misc_feature (424)..(424): n is a, c, g, or t
  misc_feature (427)..(427): n is a, c, g, or t
  misc_feature (436)..(436): n is a, c, g, or t
  misc_feature (457)..(457): n is a, c, g, or t
  misc_feature (463)..(463): n is a, c, g, or t
  misc_feature (472)..(473): n is a, c, g, or t
  misc_feature (475)..(475): n is a, c, g, or t
  misc_feature (477)..(477): n is a, c, g, or t
  misc_feature (479)..(479): n is a, c, g, or t
  misc_feature (488)..(488): n is a, c, g, or t
  misc_feature (497)..(498): n is a, c, g, or t
  misc_feature (500)..(500): n is a, c, g, or t
  misc_feature (513)..(513): n is a, c, g, or t
  misc_feature (518)..(518): n is a, c, g, or t
  misc_feature (523)..(523): n is a, c, g, or t
  misc_feature (529)..(529): n is a, c, g, or t
  misc_feature (549)..(549): n is a, c, g, or t
  misc_feature (552)..(552): n is a, c, g, or t
  misc_feature (562)..(562): n is a, c, g, or t
  misc_feature (578)..(579): n is a, c, g, or t
  misc_feature (620)..(620): n is a, c, g, or t
  misc_feature (676)..(676): n is a, c, g, or t
  misc_feature (686)..(686): n is a, c, g, or t
  misc_feature (879)..(879): n is a, c, g, or t
tnaacacctcccaacatcaccacacctacctttcattatctcatcaacacttttacctttccctacacatctacatcaaatctcantcctccaatatacnactcaaccctcctccttcaaactacctcaaaaactactctctcttatttcattttccattttctacccactatttttccatccnctttaaanacacacccaccacccttccaacaccacanatccnattacttacatacaatatcatcacaactctttcatcanatacaaattcacataccacaactcattaacatactacaactctttactctctacaaaanataaacttacactcaataaataaacacctttctatatcnnctcatctntccnctataannnctnctcacnatntatatntccctatacatatatatataantcnccatctccnacactataaatatactatatncttacntatttcccnncncncnccattctcnccccccccnncncttttctacattnccatntatcncccacnccccctctcccctcacctcnccncacccacccntcctctccccattccnnccctacacccaccaccacactcccccctctccatccatccntctctcacactctctcccctcataaaatccattcttctcccactctcccacctaanatttcccatntcttctcctcatctctcctctcccttccctaaactctctaccactctctacacttctattccccacccctccttccattttttcatcttcctcacatccacacccttccacccatcatacctactcatcccctcccaaaccatccaatcatcctcttcacaaccccccatcacatccaaattatccaccaccncctcc

SEQ ID NO: 531195 - DNA, 1037 bp, Homo sapiens
ggttgaaccgctaaccagagcaggagacaagctgtggagcatctattctgctgaaatttagtccatgcttctcgaacctgggaatactgtgcagagggggctgggcgttcagtgctacaagacttcatcctcgcaccccgttaggagcatgaactgcgcaagcgcagtccatgagccgccaggtgctctgtgggtctcgctgaggtggtacctcaggtcctccgcagggtgtcggatgtggcgaccgaggcagcgacgctgggactgatgctcctggaggctgtgtggctggggactcctgggccctgtgagcccctagagcgggcagtgctcgcagtgaaatgtgcatgaggatagtgatcgaggggaacaccgtttgccccacgtctggctgtgacctcggtgaaagccgacaggagagcacgatgggaccctcctcctcagtagtggctgccaggtccctcgttgcatggacagggtcatcataaccatagataacccttcacgtgtcacctgcagcttccactctttatttccaaagaatcagtgtcacacatgcagatcacaaagcgggtctccctgtgctgcttccttctgtgtattctagtctctcccccaggggctgcccagggccctcaggaactgagtgtgggcaagacactgctgggcagagggcacgagcccacgtgggccgtatttgccaggcatttggcagtgcagagcccccgcagctccagaggaggcccttggcatgagctctcccctcagggtcctgagcaacgtcctgcagggctggtgggtggcacgggggggaaaaactcgtgaagccctgggaaagttgagcgttgcagtgcgagacagttcgtcagagcagcctcacgggacgggtaaaagcacgtagggggccagaccctccaagggctcccgtaccgagagtagaaggccagagcacgctgacccgagtcatacagcgtaaggccagcacacgaaagggggccccccggccagacagcggcggtcacgcaagcgcgcgtggt

SEQ ID NO: 531196 - DNA, 115 bp, Homo sapiens
tgtcatagctgttccagagtatcccgagcgacttgaaacgtcagacagaggttgcagtgatgtcgagactgggccactgcattccagcctggatgagagagcaagactctgtctc

SEQ ID NO: 531197 - DNA, 139 bp, Homo sapiens
gtcgacaagccttcctcaggccagccgtatagctagaaccttgttgtattctaggacaataccatatactcctctatctgtctatctatctatctatctatctgtctatctatctaatataaattaaccagacatggtg

SEQ ID NO: 531198 - DNA, 221 bp, Homo sapiens
atgaagaggaaaacaggtgagagcttgctttagttcctgatattattgttctcttccccattcccacctcagtccctaaaactacaaaaaaattagccagccgtggtggcgggcgcctgatagtcccagttactcaggaggctgaggaggagaatggcatgaatctgagaggcggattgcagttagccgagatcgtccattcactccagcctggcgacaga

SEQ ID NO: 531199 - DNA, 685 bp, Homo sapiens
  misc_feature (669)..(669): n is a, c, g, or t
tattaccattcctcgcgtcggacacccgactccagcatgctgcctgtggtgacgtgtgcggtgttcacgctcgcgtcctgtcagcatgtgcgaggtgctccatgttggagcgctgaggttcccgggctctgtagctgagtgggcggggcaccgtgtggagtatgcctgagaagaaggcgcgcagagtaacgtctcaacctgagccccgcagtcgtgctccagcaagctggaagtcagacgtgtgctactcaagtcaggagattgggcacgacaaatctgaacttccggcagtagcacttcgtgaatctgatatccaatagctcttctgctctaaggaactctgatttgcatctaatataacttgtcatgaaggggactccttcaaaagagttttctcaggaggtgcacgttcatcaatttgaagaaaagactgcgatcgtaatttgagaggaatgtgaatggtgcattcatgggtgcccttggaaactggaatgatggaatacatcacacgtgaatttctgttcaagtttcccagattatcattctttgggatgagagaacattataaaaccactttgtttattttaaagcaagaatggaagacccttgaaaataaagaagtaattattgacacattttcttttttacttagagaatcgttctagtgtnttttgccgaagattac

SEQ ID NO: 531200 - DNA, 110 bp, Homo sapiens
atctcatcttctgatatcacacaaaagagaaaaaggaagacaatagctatggatccccaaaaagggatgtgatgagaatttgaaccagttggctgcccagtgagaactag

SEQ ID NO: 531201 - DNA, 692 bp, Homo sapiens
aattgagaacattgaatatagactgcatattagataacaatgccaaataactgttttctcaggtgtgataatagtatatgtagaaaatgtctttttgtttgttttatttgttttgttgtttgttgtttaggagacaagagtctcacctgtgtcgcccaggcctggaagtgcacgggagcgggcgatcgggaatcaggggagaagtcatcatgcctcaccaaggatacaagtagacatcacgaggcactcgggacacacacggcaagaagtcggaaacacaagagagcaacgagaaaacacgagatgagaaaaaacacgggacgagaagacaaggaaagaacaaagaaacaaagaaaaaaaaagcccacaagaaaaacgagccacggccacccggccgggacgaggcaacaacgaggacatcaacaacccgaccgccagccgcctcaccaacacaaccgtgagatcgacagacacccccccccaaacacccgactcacacagaagccagagacacagccacaacaccaaacaccagcgcagcgcacccacacaacacttgagtccggcgcccaaaccagacacagtagacacaaaccaacacacaacaccacacgcacaaacaaaacaacgggacacaactggccacaacggcgccgcaaacacacaggcgaacaaaacaggacaaaaagata

SEQ ID NO: 531202 - DNA, 1149 bp, Homo sapiens
tcccccagtgtttggatgtgcttatcgctttttgtctccgggttgtgtcgttggatacccccgaaattcatgccctcgtgtttttttcgtaagttgggtgagccgactgccctttgtgtaattcctggggttgtttttcaagccattgcggtgcttggggccccgttgttgtggccgctggcccttgtttctgccaccttccccgccgtgggccggataccctcttgcttatgtaggcgtttcctgggtattatggcccttagccccggtgtattgtccaatattgggcgattctcccaggaaagtaatgtgtgtgtttgcgggaggacccacgtgtcgttccttgttgtggtaccccggggggctctttttccgcgctttttctttcaattcggatgacgcttcccagtgtgtcaacgggtggggcccccttgtccacgaggaaatcccatgtccgttcaccaatagttggggccccgcttggcccgttccatcccagtttgtggcgccctgatgtccagtctttgccacatccccacctattttatccagtaaaggccccctggggagctcccctccgccactttgttgtgttagaaggggtttattagaaactttctaccccagtgtgagaaccttttacgagagtagcataatgtgcgcttacacgacttgttgctgctgcgattctatatccagacgcccacttgtggaaataccccggaaattggcgcccaacaccgcctgtttgtgaataccctaatgtgttccttaatattaaacgccacccgctcacttgtagacacccgacgccaaatggccaccctctctcgtgtgaggagcccgtgtcttctgtctcccgggcttattactttgtaaactccccacaaatatgaaactgaccacactcttcacgaaattagcctaaccacaaccacgtgtaacttattttctaataatgtgataatgattcttgtggtatatatgccaaattattcctgaccacaaactttgtatacttggtctgtccttttcctttcaccacttctatagtggatctgttccccatcgttgaaatggaccgtgtaagcctttgagctagcttggagtcgaataccctatttttcactccccaagaaaaaaaaaaaa

SEQ ID NO: 531203 - DNA, 681 bp, Homo sapiens
  misc_feature (15)..(15): n is a, c, g, or t
  misc_feature (107)..(107): n is a, c, g, or t
  misc_feature (185)..(185): n is a, c, g, or t
  misc_feature (198)..(198): n is a, c, g, or t
  misc_feature (202)..(202): n is a, c, g, or t
  misc_feature (207)..(208): n is a, c, g, or t
  misc_feature (223)..(223): n is a, c, g, or t
  misc_feature (227)..(227): n is a, c, g, or t
  misc_feature (230)..(230): n is a, c, g, or t
  misc_feature (243)..(243): n is a, c, g, or t
  misc_feature (252)..(252): n is a, c, g, or t
  misc_feature (262)..(263): n is a, c, g, or t
  misc_feature (266)..(266): n is a, c, g, or t
  misc_feature (268)..(269): n is a, c, g, or t
  misc_feature (278)..(281): n is a, c, g, or t
  misc_feature (292)..(292): n is a, c, g, or t
  misc_feature (303)..(303): n is a, c, g, or t
  misc_feature (308)..(308): n is a, c, g, or t
  misc_feature (312)..(312): n is a, c, g, or t
  misc_feature (316)..(316): n is a, c, g, or t
  misc_feature (318)..(318): n is a, c, g, or t
  misc_feature (331)..(331): n is a, c, g, or t
  misc_feature (333)..(333): n is a, c, g, or t
  misc_feature (338)..(338): n is a, c, g, or t
  misc_feature (352)..(352): n is a, c, g, or t
  misc_feature (403)..(403): n is a, c, g, or t
  misc_feature (449)..(449): n is a, c, g, or t
  misc_feature (458)..(458): n is a, c, g, or t
  misc_feature (489)..(489): n is a, c, g, or t
  misc_feature (575)..(575): n is a, c, g, or t
  misc_feature (612)..(613): n is a, c, g, or t
  misc_feature (617)..(617): n is a, c, g, or t
  misc_feature (639)..(639): n is a, c, g, or t
attctatttataaanactttaccattttttatgctgaaacagcagcatgtcctttaaattattcattctaacatgtagtttgtgttttaattgtcttaatgcaaggnaagtaaaacagtttgaaatatgatagaaagtataaacacatttcaatcagtagtttatattaagaagatttctaaganggtgctaaatttnaagnaattnnccgtcaaattatggnaacngtncagattatttganttgtttttnaataggtggnnggncnnttttttttnnnngggcaattttnccaagacatgntgganagtnagcngncaaatatcatatngngttcngggtactgtggggnatccaaatccccctcccttggcaatgtactggggccatttgggggaaaaanaaagtgggattaagtgttaatattgactaggggtaagtcctttacntcatttttnctaggaacattaatagtggcctttgttatgntaatggcacatctcattttaaaaatgaaatgctaaatatgttagaaacagatcacaacattttaatgactgggataagcaaaatgngtccaacctttattctgataatagccagtaaatttgnnaagngaggagacaaactgtaattgtntacataaaaacacctagtcccactttaaaattttaatatcta

SEQ ID NO: 531204 - DNA, 156 bp, Homo sapiens
agaaatttgcattacaaacttaccagttgagcacccttaatccccaaatccaaaattttccagtcagcatttcctttgagcatcatgtcattgctcaaaaagtttcagattttggagttttgaatttgggatactccccttgtattagcttaagta

SEQ ID NO: 531205 - DNA, 838 bp, Homo sapiens
cacggtggctcacgcctataatcccagcactttgggaggccgaggcgggtggattacctaaggtcaggagttcaagaccagcctggccagcatagtgaaaccccatctctactaaaaatacaaaaattagccaggcgcagtggcacacccctgtaatcccagctactcgggaggctgagggaggagaactgcttgagcccgggagacagaggttgcagtgagtcaagatcatgccactgcactccagcctggccaacagagcgagactgtccccccccaaaaaaaaaagagagagactgctttcaaagaggaccaagactacagtgaaattaaaactggtttggctgggctgggcatggtgggctcacacctgtaatcccagcacttggggaggccgaggcggttggatcacctgaggtcagaagttcgagatcagcctgaccgacatagtggaaccctgtctttactaaaaatacaaaaattagctggggcatggtggcggcacctgtaatgccagctcctccagaggctgaggcaggagaatggttgaacccagtaggtggaggtcgcagtgagccacagttgcgcattgcactccagcctgggcaatgagtggaaactcgtgtctcaaatacacaaattacaaataaaaactatttggtggacttttcgtctctccatttagtttgggcacaagactattgtgcaaaagctacagagttatcttcagacaagttactttcacaacttagatgggctcccacgagtggccggagaacctgtctggcaagatccttattagatgccacaggggaccaggggattcggtaaccatggg

SEQ ID NO: 531206 - DNA, 644 bp, Homo sapiens
cgtaagtcttcccgatgttccctgtctctggactctctggaacttgttaacatggctcttaccaccccctctttgatgataggtatgaagagtgtagcacatctgaatgatgctggggtgaaactgcttcataacacttccattttctcccctatttatttccatatttttcattttttcactaatatccccacggttttactatactgtgttagtaattcacatgttgctggactaattctttttaactgacttgtaacagatatgttaaaccgtttaaacactttggggggtcatttttcaacctcactttaagttagttcaagttaatccagtctacatggcatataaaccttatgattacatcaaatcttcaatgctggtcgcctgagttggaagcccaagacgtacaaaaacagctgaagtgtcaggtttaatgtgataagcttctcttactaacagggttttgtaatagcagcaatagatatatgcacatatatgtgcctatatttagcataccttattggatgtccatatcacactggtgtacaagttcaatttcctgccacactttctggggagtgccatttgaagctgatcctaagtggtgatcgtagtctgcccactggggctagttttgcaac

SEQ ID NO: 531207 - DNA, 139 bp, Homo sapiens
ctgaaatcgtggagacagaccacagcttgcatgcccatcgtgctagtaattaagttccccgtaaaaatctttgatatatggcccataccggtacatgcaagcccggtacatgcaagcccggtaccccggtacatgcaag

SEQ ID NO: 531208 - DNA, 202 bp, Homo sapiens
gctgggtataggaacaggaggccagcattcagaggatcgacgagaacatgctaggagcccagttgaccgtagcggccgtccattcagagatcctcaagtacttccagtctgtcacctaccaagcggtggctcatggtcacaatcttcctcatcctcattgtcttcttcatcatctatgtggtctatccttgcatgaacccgt

SEQ ID NO: 531209 - DNA, 180 bp, Homo sapiens
ttaattagtggtgacaagttccttattggtgtgtgtgagattactctagcaactattacatgtataacacagatgatcttcatccacacaccccatcacccagataaatttacgagattctgtgtaacagtgagggttggattaaagtattaactggatgtagaagaattaatctaaggg

SEQ ID NO: 531210 - DNA, 764 bp, Homo sapiens
agcgggtcagcaggcaacatggccgagaggccggggcctccgggccggcgccgatgtcctgcgaccgctgtaccctgacacccccggctggaattccctccgcagctccaggcggatgcgatgcggcgccgttttcgtgggcgtattcaattgctctggtgcgccgagtcgctggtatcgagggccctgcgccgtcgacgctcacggccgaagcatggactcattcgagtcagcagtagatgctcactgcacgcacgaggaagcccatgtagacactcaagccacgcgttactaagccccgagcacgatgtttctctcggaaacatcgagccggttggaacggcaagcgctttatgatcctgacgatctgccgttcaaagctcggtttgctagagcaaatgcttcctagatgctcagacagaaaacttttgatgactctgtagcacatggagagaaaggatttggttactaagagttctcgtgctttcaacctgaattattcctaggggtaattgatgtgtcagggtggtgaacttcatacgtccatagtggcatctggctggcaaagtccatcgtatggggagaagtctgctgatgagaacttcatcctaaagcatacaggtcctgtcttgttgtccatggcgaatgctgggaccctaatacaagtggttcccagattttgaatctgcactgtcacgactgagtggatggatggcaagcttgtggtctttggcaaggtgaaggcttgaatcttgtggaggcca

SEQ ID NO: 531211 - DNA, 163 bp, Homo sapiens
tcgctattcaatcggcacccacagagacacacagagtcacacacgagtcacgaatcacgtctctctctctctccctctgtgtctctctctcgtctctctcgtctctcgtctctctatctctgtctctctttctccccctagttgccgctctatagtgagtgtg

SEQ ID NO: 531212 - DNA, 368 bp, Homo sapiens
acgaacatacggtgtattctcgtgtgaatgagggttatatgttgttaatgtggtgggtgagtgagccccattgtgttgtgggaaatggaacgaacacggcttgacaaaaagcgagatttgcaaatgcgcgatgcaaggcgatattacacgttattcgattactatacgacgcgaagcaggggtgcgcgcaattagcagcggcaattggtcgtccattatgccgacaaagcggcctcgtttgcatcgtgatcagcaagcagaaaaaacgcgatcgtcgatgtctggaacaaaaatttaggaagagttttataggcaaaacgcaaaatatcgactacgaggcacagcggaattgcaaagaccaagatagg

SEQ ID NO: 531213 - DNA, 1046 bp, Homo sapiens
gcgcgagtaggtctacaagacgctacttccccatatcatgagaacgagctgtatcacacttatcagtgatcagcgcccatcaatagatcatgtttcctattatcgtggcttacctaggtccatgatagtgcccgtgtttccgtaagcatctcacaacagaagactaactaatactaacatcttcagaggctcaggaaatagaaagcgcggttcgtgaacgtatcctgcgcgcgccatcgatccgtagtcctgcatcgccctctcgcatcgccttacgcatccttttacagtaacaagacggacggtcgaaccgaatcgcgcgtccgcattagcgcagtcaagattcaatttgtgccaccaattggctacgtgaacctagcgagtacacacgaacatactggcgagacttaaatcattacaactgcctagcgataacttccacccaattattcctagaaccagggcgagcctgcgaactcctatgacggttgacaaagtcggagtagtactcccgatttgaagcccccattcgtataataagttacatcacaagacgtctttgcactcatgagctgtccccacattaggcttaaaaacagatgcaagttcccggacgtctaaagcaaaccacgtttcaccggctacacgaccggggggtatactacggtcgaatgctctgaaatctgtggagcaaaccacagtttcatgcccatcgtcctagaattatttcccctaaaaatctttgaataggggccgtatttacctaatagaccctctaaccctctagagccataaaaacagagacacggaaaaaaagaacaaaaagaacaaaaaaaaaaaagaaaagcgggaaacaaagcgccacgggagcaaagaggagaaagtaaagaggggaaaggggaaatagagagggaggaaaaagagggcgaaagaaagacagcaaacacggagaaagaacaccaaaacaggaaaaggcaggaaaagagaaggaaaaaagacgaaaaagaagaagaaaaacgaaaaaacaaaaacagcaaccaccccct

SEQ ID NO: 531214 - DNA, 215 bp, Homo sapiens
taaacacaaaacatctttggggacagacatggatgacaaatggtttactagtgtaaaatttaagaatagaggcagacaaaagtatggaaggccggttaattttcccctaccttactcctgcttccagtttcgtctacctataggtaatccgatagatccacaatagtcaacgttgtctactcacgtaattagcattcattaagcgtgctgtacta

SEQ ID NO: 531215 - DNA, 389 bp, Homo sapiens
tcttcccaattttttttccttttggagggaaaacactaaaggcaatgacatccacatgtgtttaagtggctacagccacttctggtgtttatgatcattagatgcatggctagtaaatgatataaatagtgatataaaggttgtgtcctaatgaaaatgtctgtggactactaaagaaatgattaactttaattttaaaaattgcctggattttctaaataatcccctggggatgactgatacagtcaattacatttcagaaaatctaatccttagagtggtctctgagagtgatttgggagacaggccatatggaatacaatagagaaacgaaagtcagagattaaaaattcctgatattgtatactaagcaggactttaatgatcac

SEQ ID NO: 531216 - DNA, 809 bp, Homo sapiens
  misc_feature (201)..(201): n is a, c, g, or t
tccacttttatacataccctttattaagtctacccacaaagagctaaacagtccacaggaagtggtatggtggtacaggaatactaagtcaatgatctttctctttgccatgttagcgcttacattttaaagagcgcaagaaagaatatgtattactttacattagagattatactactgggtgcggtgtaagaaagtttnaatattagctggcaatgaaatatttagtctaagacattgccacctgcacaacatagctacagagcctagtgtattatactaggggcacgatataactttaccaagatgattgttctctagtgctcctttatacaatagtagaatcatggggcagatcgcaagaaacgcttggtcggctcataggtagagctgcatttttctttcttaatgggcctcagatttagaaataggcttttgaaggaatctcactagcctggtcaagattgacggtgtatgcttaggtagacgctggaggaagagccttcacaggagggttgtagacatcctgaaggctagacccttatgggaggaaagtccctgtactgcttttcaagacaagtttttagtttaattcagcttttgcgcattaagttactattgggtttgctgcattttcatctttttcaagaaagtgtggatgccccaggtagattccaattgagacttttcagggctctctacctgggcctccaaaaggcctgtatacctacttaaaattatgcataatctcccatgaattgcttgagacaatctacacacctttttaaaagcaaacattaatgaatctg

SEQ ID NO: 531217 - DNA, 205 bp, Homo sapiens
aggatatcctgaagcgcagaataattcatttttaattgtaaaaagtcaaaagcaacctaagtgttcacatgtccctagtagggaaacactggggctcaaagcatgcacatttaaaaatctgttttggccaggcaaggtggctcacgcctgtaatcccagcactttgggaggccgaggcaggtggatcatgaggtcaggagattga

SEQ ID NO: 531218 - DNA, 664 bp, Homo sapiens
gggcggccggtctcggagaataggggagagtggaggggcgttgaataagtctgccaaaatgatgcccacaccagttgatcctattgaaagaggggactgatagtctcccaaggcatcccccagcttgtgagtaacatcagtgcctggccagcgtgatggctggaggctgtcaagaacgtgaccctggagtcgccgcggccagtgggacaaggcttagtgtgacgactggcagaggcaaagccaacgaagtttctgaagtgatgggtgccaacaatatctgagaagcgttctatgatggttggtccatcctgcagcgaacagacttgtggtagacgattgccaaagtcccaaggatgctgaggtgggtgatggcagcacctcagtgaccttgctggctgcacgagttctctgaagtcaggtgaagacccgtatgtggacggaaggttgtagcacgccccagtatcatcatgtcgagcgtttgccgcacaggcatcccagctggtcagttaacaagatcagaagagattgctgtgaccgtgaaggaaggcagtatacgagtggagcagaggaagctgtgggaagaggtgtgtcatgagcgttctgagctccatggtctgatctctgcagcgagaaatgctgtagctttgtctgaagcatggtggtg

SEQ ID NO: 531219 - DNA, 293 bp, Homo sapiens
agtggccccacatggatgtgtcactaattcactgtcccatgtctacgcacggaatctggctgctctgcatactgtgacttcttcctgtgtaatctcagtggggcccgtgtccacccgcacatcgtgacccacttaggggagaggttgctttcctttggtgggctgagagtaggacaatgcaattgaatgatctctagtagacagaaaagaacttggtctcttttttaaaatttcaaagagccagaagttctatgcctccttcagagtaggcagaacaacgcagccaagatcta

SEQ ID NO: 531220 - DNA, 541 bp, Homo sapiens
aaggtccccagtcggagtgagtagtgcacttgaagctcttttaggcaggatttgacgatggagcagaaaggaggaaaacctggggcgtgcttgcaaacttcgggggttcccccaacaggagaggaagctgaagaaactgggggaggggcggaatgctatcggtctcccaatgagggcatataagacaggccataggggtcgctcggccccagataggagggtcacggagggaagaggaagagagaacccctaaacggtacccacctatgctcaaaaacaaaagtaaggggggaattattaaatccagatggcgcgcccctaaaggcgcccccaggtcactcatccccagttccaagcggaagggctgggataaaggggatggagggatggaggcaggcagggacaaggccccaccccccgacttaggaagggaaagggagcccaagctcccagctgggccctcctaccccgcaccatgccggcttggcacccccacttagcccccctgcccttcgccgccctgaccttgcagtgccgcaag

SEQ ID NO: 531221 - DNA, 452 bp, Homo sapiens
gggtcgtctctagcacggatcccctacaagataagagacgagatggagagagatacagcacgtaagagggtatataagctcacctacgataagtatgacgcggggtggaggagcatcagcaggaagagggtatataagatgcttcatttttgaaatcttgcatgtcttagaatttctttaatcttctcattttctttaagttttttctatctttcatctcgctttctctcttgtacatctcgtctcttctcttgtttgtatcaactatgaagtcgtttgttgaggcatattctgtcggggtgacgggcccataggtcggagctcgtccgcattgtgctgatttgcttatgatcttcccagtttccccatagtccgtgcctttctcttttttatttatttatcttgtctacagtttcccttggctttcttgtctcatctattttcccatctcg

SEQ ID NO: 531222 - DNA, 1590 bp, Homo sapiens
  misc_feature (293)..(293): n is a, c, g, or t
  misc_feature (393)..(393): n is a, c, g, or t
  misc_feature (1278)..(1278): n is a, c, g, or t
  misc_feature (1590)..(1590): n is a, c, g, or t
tggaaagggagtctcgctctgtcacccaggctggagtgcagggggtggtgactcctcggcttcacgtgcagcctctctataacctcccaggtttcaagcatatttctccgtgcctcagccttcccaagtatagcgtggattatacaggcattaacaccaccagcgccgtggcatagtgttttggatatttttctctgataaaatatatagggttttacaccatgtgtgtgtggccagggctgtggtctctctcaaactctcctgtgacctctcaagtgtgatctccaccccancttctcagcttctccacaaagcaactgtggagattatcacggggtgtgtgacgcccactgtgtgtgcccccggccgaaaattctgtttatatcacccttntataccgagaagaggtgttgtgtgctcttatattataagtgtgtgtgaagactctcacaattatttctcttgtgtggtatcacttatgtgtgtgttcccccccgagaatttgtggggggcacaaacatatttcaaaaattataatctctttttataacaatgtgtgtgtgtctgacgccataataatgtgtctactgtgggcgcctctcccccacttgtgtgcgcgggtgtgcatgtgcaagaacacagtctctctgtggggacactatacgacataatgaggtggtctccatgtggcgtggttatttcaccaaccatctctatataaaaatgtggcgaaattatacccggtggcgccagctgtgacatgttgtgtgtatgttgttcttaccaaacaggggggggggttctaaacaacactgtggtttacgaggtttcaaaacgttgggtttctatatattatcacccaaactttttcttctaaacagtggtggttgttttaaaccccaaagcctttttaattaggtctaccatataaaatctgttaattaactttcctccaaaggtaaaagaacgtcgtgggtttcaacatctacagtcctacaacttctccttgggggttcaaaaacactttcttttggagacactcctaatatacaacaaatgacgacataccagacgatcaccaccaacaagaccgggggggggggggacgggcggcattataaaaaaagatatatcatccgccccagggggggggggccccaacgtgatgtctatacggcgcagtaaatcccccccgcggtcttcttctcctcgtctcatacacaggtgtggtggcccccccaaaaagaggaggaagcccgcgacatcaaaataatacgncaaggacgcacgcggcagccgcgccggagttataacacaccgctgctcgccgcgtcggggcaaaaaacgtgcgtcgtatcgtcggggaccactccgcctgggagaagaaggagccccccactctctggtccggcggcgtgccgcacaacgctgcggaccacacaactccctcaccggagaacattataatgcccctcgacgcgacgcatatacaacacaccgcgcggcaccatgcgtgccacaccgcgcaactcgtgccgcggaagaattgttcttggatatagacaacaaacacacaagaacatcacggan

SEQ ID NO: 531223 - DNA, 350 bp, Homo sapiens
  misc_feature (170)..(170): n is a, c, g, or t
cgccacgtaattagaagcgccgagtcactatacacactcactggttcttctctgtggagcctcgtggcactgtccgtacttttggtcctaattatttaatgggatggtgagcttgttggtctcccaggatccaacacttcaccttcagcttgtattacaacaataccagnctttcaagctactccgggtgaccccagaactcatctgaactcagaagcccaagagtttcatccctctcactttaggggactaagtgcccctggtcagcatgaagtcgatacagaagcatgacctccatccctaatccctcaagaatgaggagtggaaggtgttggcaggagggtgggacg

SEQ ID NO: 531224 - DNA, 213 bp, Homo sapiens
attagtatcttgtactccacgtagctgatccagctgcagatagagtacatctcatttaccctggatcacatgtacgatattttaccttccaattaaatatattgccagaatctttcaaaatagatagagaatatgctacttaaaaattcaaataaaaatgtttacataatacaaactggtggcctattatagagtttctgtctaaatgcatca

SEQ ID NO: 531225 - DNA, 346 bp, Homo sapiens
ctttgctggggcataggatgtgctcctaggcctgcagacgactgattttgcaagacagcgtgctgatgactgtggcgagatgctactgagacttgtcaatacgtatggaaccagtctcgagaactgctgcgccgctctacaacctgatgaaagctgtgccaaatcggtcgacgaagtgtaaacctgatggggaagaccctcggaatatcctcaagcgtgcatgttacaccaagatagatccctaagtgtcaactacaactcttgtcgaagtctgaagagaccttcgaaatgtggtcaagctatgtagtcaacattaccatacgacagggcccttggcaggacttct

SEQ ID NO: 531226 - DNA, 1364 bp, Homo sapiens
taataaactgattttattagaaaaaggcattttaatgccaactgctggaaacacgcattattaaattacattttgcacaaccaaacacaggtgccctctccagggggcagggagaaaaaagaattaggagaaggggtgatagtttgctgggctttaacaaagaaaaaaaagagcgagaagcgcggccaggggaggttagttaggtctcaagtgtggatgtggtctctgtaccaaggaacacagcaaaggctcctcaggcacgtgatttcacatttacccaaagttcaccaaattaattagagttgtgttttccggtggcttagacatttctctttacgcctttgcccttcaaactttggcaagagagaggagcgcaacgcctcgttataaaagaagggagaagagggagagagaagattccagggcaattgtggccataggggtttggctttgtgaagaagaagaaattaggttttgaacccttttcctgtcggaaagagaagcggacacaggggggacaaccgagggaacgccacgaaaagaagaagaagagaggttgcccagcgggaaacacctccgtgagcttgccgaacttccgcggctctttctttgggtttgacagcgacgttcgaggggctttcagggttgttgacacagtgtggccgcacgattgaagggggcctttttggttacccacccccagaggggaaggtctcttgcgtgcgaggttcattcacagaaggcccaaggcttgggcttcccgcctctctacgaaagagttagaatttatggcaggggctaagggttttgaagccagccaaagaaaaaccctattgtttggtgttaagtcggtgcccccatagtcttttggaaagcccagcggaaatttggggggggttggacacccccccattctttaagggtgttcggctttgcgcccggaaacaataaacgccgggccaggttgtatgcgtcttgaaacaaggtcggcgaaaaacacttttttttcaacaaaggttataactcaaggaaagggggagcccacgggaactgttgagggaaaaactaaagcactgaaggcatttgttacaccaaaccgcgcactattggtcactgaggagggaggagccgggtatcatcaacaagaggactcacagccccatagtgacaaaactttcactagtactacgcactctggaggggcatgatgagaaaaaactataagacgtagaagagcattcaccccgtagtatacatcgttccacaagacctttgtgagtggtccgaaactactaccggactgagacgacagtgtgctagtataccaagaccctggcaagaaatctccccagaggcgatccaca

SEQ ID NO: 531227 - DNA, 679 bp, Homo sapiens
acgaggctgtgaccggaactttatttctctccgcgtgtctcacccttttctccccatatctgtttggacatgagctgagggcacggtcgcgggcggtcatgtgcctggttcgcagctacggcgatggaggggcgcgattgttccttggttgccgctccgcttagtggccgcgtcattccgcgcggtgtcccgattttaggggtacgaggagaagtgtcagccttcgaggcatctgcgaatggcgtgcgctggcccgcatggcacccggctgggatgtgctgccccgcggaatggtacctgctgttacagtcggcaagaggaaatccgggacaggacttcgttgaccgaggcgctgcagcaggcagacttggagctgatgctctgtgctgtcctccggctctctggtccactcaaggtacacagtatgctcaggagcatggcttgaacttccatgagactcctggtacatcgcatggcacctacagaggaggccttttctggtaaggacatgatcccgtctggggagaggagaaacgccaggctgacccgaggcttctttcgcacggaagattgtggagggctatctcccagcccatctggctggtgagtgactccacggagagtgtctgacatccagtggtgtcgggaggcctatggggccgtgacgcagacggtccgc

SEQ ID NO: 531228 - DNA, 111 bp, Homo sapiens
agaagaaacctcggcctctttagggatcacacccctatcaccccatctcccagcaaggtagggtcgaggcatgtagagaattagcgtagcctcaatacattactggcagaa

SEQ ID NO: 531229 - DNA, 471 bp, Homo sapiens
  misc_feature (336)..(336): n is a, c, g, or t
  misc_feature (469)..(469): n is a, c, g, or t
gctgtgccagcttctcggggcatcacagccttcattgtggagaagggtatgcctggttttagtacctccaagaagcttgacaagctgggtatgaggggctccaacacctgcgagctggtctttgaagactgcaaggttcctgccgctaacgtcctgagccaggagagtaagggggtctacgtattgatgagcgggctggacctagagcgcctggtgctagcaggtgggccccttggatcatgcaggctgtcctggaccacaccattccctacttgcatgtgagggaggcctttgcaagaaagatcggccaattccagctgatgcagggaaagatgnccgacatgttacacccgcctcatggcaagtcgacagtacgtctacaatgtcgccaaagcctgtgacgaggggccacatcattcccaaggactgtgccggtgtgattctgtatgcagccgagtgtgccacacangg

SEQ ID NO: 531230 - DNA, 168 bp, Homo sapiens
gttgggatgttcgatacagcggataaggttctaggttgacaaccataacatgtattgcactgaaatcaaagcacataatatcaaggcagagttactactgacggagaaagcaggaacacagaactacattacatctttgcctatcaaaagacgagggtaccgagctcg

SEQ ID NO: 531231 - DNA, 426 bp, Homo sapiens
  misc_feature (186)..(186): n is a, c, g, or t
  misc_feature (200)..(200): n is a, c, g, or t
  misc_feature (211)..(211): n is a, c, g, or t
  misc_feature (266)..(266): n is a, c, g, or t
  misc_feature (319)..(319): n is a, c, g, or t
  misc_feature (345)..(346): n is a, c, g, or t
  misc_feature (359)..(359): n is a, c, g, or t
  misc_feature (383)..(383): n is a, c, g, or t
gggagcccagggtacccgcctcctttttgtaaaactgttccccccggtcagcccattaagccctgtcctccattcctcaggccatttccatccccattttaagtcctggaacggccctgggggcctgcccctcactgtgcaactttgggaacagcccggcaggttggggggttttccaaaaccttncccttttggagccnctttgcactgnggggtaaacatgtttccagtgtgattccttccagtgagccaaacccggtgggtgntttatgagcctgaatgccttttgcctgctttcagcaggaagggacccctggancaggctggcccggggtggttaagtanntggagcccgatcncagtcccccggtttgtcagggggncccccttttaaatgaccccttaataaagtgatggccccccaga

SEQ ID NO: 531232 - DNA, 150 bp, Homo sapiens
gcagtggtatttctagtgagggggactactaaactgaaagataggaagaaccttcaagcaggcagaggccaggctaaaagtgaccacaagaggaggatacgtctgtaacacatggggtctcataaacacttgggccagttacagggtaag

SEQ ID NO: 531233 - DNA, 169 bp, Homo sapiens
tctgacatatgcgctgctggagctggtggctagtcttcctgacggggtacatgttcatatggaatgtgtgaggtgtcacccaacctctttgaagaaattgacaatggatggcaacggacgaagtcctcctaggaagagttctcagacgtacattcacgcccaggtggca

SEQ ID NO: 531234 - DNA, 733 bp, Homo sapiens
gtatttctttaaggaaaatgtttatatattgactataagagcaaaggctcttgaacatatcctagattatggaacactttttcccttccctttctctggaaaaattaaattttgtttctgtccactgagactggagtgcagtggcgaagatcgatagctcacatgcagcctccaagctcctggggtcaagcgatcagtcctgcttcagactctcccaagacagcgtaggactacaggtgtgcaccgaccgtttcctggctaatttttgtttatatttggtagagatgggggtctcactttgttgcccaggctgaccttgtagcgtatgtggcattcaaatgatcctccgtgccttacctcccaaagtgttgagattacaggcatgagccagtgtgcctggccaaaaaacattttaaattcccttgtctgggggtcagatcctctaaatatccctcagatttcagatgagtactttcaaccctgtcctaagcatagcaggtctgcagataatcttttagaatataggtggtcgaattagagaatggttttaccccagatgtctcataggagacattattatttagaagcctaaggtagacatgtgtaagatcagagtccctaagaaagcagaatttgtggaatagctggcaggaaagtggtttttaaagtctgtaagttggcgacagagactgtataggaaagtaaatgcatgctaattcccgttggtatccta

SEQ ID NO: 531235 - DNA, 471 bp, Homo sapiens
  misc_feature (440)..(440): n is a, c, g, or t
agagatatgatcattcctgcgccgaggctacagtgcggaggatcatgactagctgactgcaggctcatattgctacgtatcaagcgatactccagcgtaagaatccggcgcaactataaccataggagaacgccaccatgacagtcataactaacaacagttccgcaaagaggggatcgagtgatacagcccagcctgaggtggaactttagatctccgacaacctttccatcatggcttgccaaagcattgcgactacagacatggactatcttcatatgtcgacgagaggccataaacagaaccaatcatactcaaggcccttggctgctgggacacaatcagctattaataacatccacgaaaaagctcacacttctgagtcaggaaaacctgtgctggagtcctggctacactggtcaccatctgtagaagcctgngctagatgctgcacatccctgtgacccctgt

SEQ ID NO: 531236 - DNA, 414 bp, Homo sapiens
  misc_feature (171)..(171): n is a, c, g, or t
  misc_feature (174)..(174): n is a, c, g, or t
  misc_feature (278)..(278): n is a, c, g, or t
  misc_feature (297)..(297): n is a, c, g, or t
  misc_feature (316)..(316): n is a, c, g, or t
  misc_feature (333)..(333): n is a, c, g, or t
  misc_feature (349)..(349): n is a, c, g, or t
  misc_feature (371)..(371): n is a, c, g, or t
  misc_feature (376)..(376): n is a, c, g, or t
  misc_feature (398)..(398): n is a, c, g, or t
tgagacctactggactgcatccccagatggttagacattctaagtcacaggatgagataggaggtcggcacaagatacaggtcataaagaccttgctgataaaacagtttgcagtaaagaagctggctaaaacctgctgaaacacagatggtgacaagaccgacctctggnctnccttcaatgctatggacagcactcaatgctatgtcccaggcactagggacagtttacaaatgccatgttcaacattcagggaagtttaccctatatgggtcttnaaaagggggagggcttaantattccatcccttgttttnggcttattattccaggnattaccccttaaaatnggggccaccagccgccctcggnttttnctttggcccttaggggtttggnccttctttttatttcc

SEQ ID NO: 531237 - DNA, 251 bp, Homo sapiens
  misc_feature (179)..(179): n is a, c, g, or t
  misc_feature (206)..(206): n is a, c, g, or t
taagagacagagtcatgctctgtcaccagggctggagtacagtggcctgatgatagttcactgcagccttgaaatcctggggctcaagtgatccaccttcaacctcccaagtaggctggggacttgcagggtacacaccattcatggcccagcttaatttaaaaaaaattttggccgcnggcgttgggtgggcttcatgcctggtnattccaggcatttgggggagggttgaggcggctgggattacctga

SEQ ID NO: 531238 - DNA, 1106 bp, Homo sapiens
cccacgcgtcgggacccgagtgggtgccgaggccagtagccccgtgtggccctgagcagaggcctgtagcttgcagcctgtaccctgctgtgccatggctggagccgaaagatgcctgtgccgtctgctgctgctggcccctgccctgtggtccctggtgcagcactacacgcctcgcgccttccctgcgtactgctagctggcgggtgcgtgagctggccctgtgtactcctgtgccagagatcccaccgcatcgtgtgcccgagcaaccatcgcattaccaatcgtcatgaggcatgacctccgtgtcatcacacctggattcgcaagtacccatacacacaatacgaattagctcctgtatctccatatgtgggatcacatgcactccgcagcaacacattatagtgttaggcctgccacgaggacacacagtctatcggcctataaatcacctgcacccttcatcagggagaggagaacccctgcaggacttgacctgcgatggttacctagagtgactcacaagaccagacactgtagtgaagacaaaggcaacagacaagaggggagacctcgagagggacctggaaaggacacactccagccagacgatggacagacagtaaatcgaaaagctgacctgcgactgtacaagagcctgagcaatggccagggacatcacagtgtccatgcaggatgtagactagtgaaacagaaccttgaagcctatgggagcaggtgaactccccaatcattaacttggacaatctaaactatacccagatggcaaggggaggcatacgtatctcatgcatggaatggtgccataaccgaccaccaaggaacagtacgaaacacagagcgtgaaatgggtcccccttcaagagcagcttcacacgaatggactggcaaaagaagtgacactgagcgctgatacgaagagaacaaacgagcaggaacacccaaggccacaagaacctgagaaaaaaggtgaaaataaaaaagacaaacaattaagaaccgccaccggaacaatgggacacaaaacacaacacacatgcaagaacgggagagacaaccgaaaaccgcgggggacacaccag

SEQ ID NO: 531239 - DNA, 203 bp, Homo sapiens
tgcaaggatttgcgacacctcaagctcgaagttacgctgcagatcacgccggagagaaaatcatcctcgacgtgacatcaacaaggacagccggggtgagaccacgctgcggattcggatcaacaccaagcacgtgaagacccaggtactgctcgagaacggcggcacggtggtgatcgggcggcatcttcgagcaggtcgac

SEQ ID NO: 531240 - DNA, 937 bp, Homo sapiens
  misc_feature (854)..(854): n is a, c, g, or t
  misc_feature (937)..(937): n is a, c, g, or t
tctcttaatattccacccgctacagccagatagcagcactgaagaaaatgatgctagatgggagacaaaattagatgaagtcagctacatcggagggaaatactaatcccctcataccagagcatctcccctatctatagtagaaaaaactctagaatcttccgccacgcaatgcccttcccccgagagagatggaccacgtctccttctttcactgtgcatagcgctttctgtccgcggttctagcagtcgtcgatgtcgcatggcttctcattcagatcctgtcgatcccgcagatagtgtgccacggagtagtttataattccccgcacgcccagtaacccagcgcccgcgcaacattatgatgtatgatgcgcgctcacacctccccacatccacattcccgtctcgtagctcgcgcatgttctaaaaatactatataacctaccatccaactccgccaacgcctctgattctattatgagtacgattccgccctccaaatcgccaccctcccgcctcccttcatttagatatgtagacccgcctgatctcgtaagacatacccaattgccaaacatcccatttctccagcctctgccacgtatacactcccccccaaagtcgtcccgctagattcttattatcactactgccccatcccatccatactctgatatagtgctcgccccactaagagtaatgtgctcacctatacgcattaccaagattcgtgttatgacgtgcccgtaaccggccgccgccatgacacgcattgaggtgaagccgcacaacctgaagacaccacagaataaaagtcgtagagcagtcacgtataaatcaaccacatcgcncgagttcatttgggcgccgcagcgttgttgacggcgtggatagaacgccaccacccactaatactgcccgcctgtaccaccan

SEQ ID NO: 531241 - DNA, 403 bp, Homo sapiens
tatgtgcacaggtacaattatatatatagctgactcttgaacacacaggttgaactgtgtggggcacttacacgcagatattttttttttccataataaaagtgacattgagtggggctgggtatggtggctcccacccgtcatcccagcactttgggaggccgaagcggacagatcatctgaggtcaggaattctgagaccaacctggccaacacggtgaaacccatctctactataaaaattagctgggtgtagtagtgggtgcctgtagtcccagctactcaggaggctgaggcaggagaatcacttgaactcaagaggcagaggttgcagtgagccaagatcatgccactgcactccagcctgggcaacagggtgagactctgtatcaaaaaaaacaaa

SEQ ID NO: 531242 - DNA, 290 bp, Homo sapiens
ccgggtcttggcacaaaattatattaagggtcttaagagacccacttccagtctccagaatccaccgcccaggaagcccttgttatcttgtgggaccggcttgggcaaggccagccgcttctgccttcccccctttgtgttttaaaatgggggtggtggccagtatctcatctttgggttccccaatgctaacttggtcagccattgtcacgtaggaagttacagggtctccgctgtggatcatcaggccatccacaaacttcatggatttagccttctgtcgtcttctc

SEQ ID NO: 531243 - DNA, 589 bp, Homo sapiens
  misc_feature (412)..(412): n is a, c, g, or t
  misc_feature (421)..(421): n is a, c, g, or t
ggctgtggtggtgcacacctgtgagtctccagctacttgggaggtgaggctgggacgtcgcttgaaccctggaggtggaggttgaagagagcaagatctacgcgatgcagttcaggctggtgacagagcgagacgtctgtctcgagtgaaagagagagaagttgaaagaggcgtattgtcgagctgggctcaagtgattatagcactgatagtaaaccagccactgatagaatttctgtgaactgttagctatgagagcagagtcgtccgagcataggaagcaacacattcagtttaggcacttagcaaatggtgtattgagcacagtacgtatgtgccaggccctggtgctgaagcaagatgcaggattatacgctgcgtgaatcgaggactacgatcgtggtaatccccnttcatgaanggtccgacaaaagggaaactataggcgaagttaagcgaatcaagtagaagcaagaagagtggattggttgtgtaatgtatgtactgtacggtctaatgaaatgttgtagttgatcttctaaggatgtagatgcttatcatttacagcttacattgaggagatttgatc

SEQ ID NO: 531244 - DNA, 815 bp, Homo sapiens
cggccgcgtgtccgggccggtcatgggccgcggcgagtggcgagcgacggggcgccggcccgaggccggttcttgaggcgggcgttgcgcccgtgccgcgcccgtggagccaccaggtatcgagctctcacatgccgggaactccacgccagcaggttcttcgatccagagacctgatggcgtgcctgtgacccccccccccgtccggatacctccccgtggctgctgtcttccctggtcggatgtccctgaagagaggtcgatgacccagatgcttaacgtccagaccagaccagccagctactttgtggaatggatcccccaccaatagtccagaaccagccgtctgtgacataccccacctcgtggcctccagatggccagtcaccttcattggccatagccccagcccatcccggagctcttcaagcgcatctcggaaccagattcacatgccatgttccgccggaaggccttcctcccctgggacaccggcgagggcatggacgagatggagttcaccgaggctgagagccacatgacgacctcgtctctgagtatcagccgtacccggatgcccccgccgaagaggaggaggatttcggtgaggaggccggaagaggaggcctaaggcacgagcccccctcacctcagggcttttcaggttcccttaaccgtcttactcaactgcccccttcctctccctcagaaaattgtgtttctgcctctatcttgttttttgttttttcttctggggggggtttagaaccatgcctggcacatagtaggcgctccaataaatacttgtttgttga

SEQ ID NO: 531245 - DNA, 404 bp, Homo sapiens
acctctcatccattcacatacgggtcaggtggctgaggtctcagcccaaggctaaggaagcccattttggaccaggccatttttatctggagagaaccaaaactttacaaaagaatttctggctgggtgcagtgtgtcacacctgtaatcccagcactttgagaggacgaagcaggtggctcacttgacgtcaggagtttgagaccagcctggtcaacacgatgaaaccctgtctctactaaaaatacaaaaagttagctgggtgtggtggtgggcacctgtaatcccagctacttggaaggctgagacaggaaaatcgcttaaacctgggaggtagaggctgcagtgagccaagattgtaccactgcactccagcctgtgcaacaagagcaaaactccatctc

SEQ ID NO: 531246 - DNA, 254 bp, Homo sapiens
cagagcatcccctccagagtagctgtgactacaggcaagcaccaccattcctcatatttttgtattcttggtagagacgaggtttggctcaggctggtctcaaactcttgggctcaagcgatccacctgcctcggccttacaaagtgctgggattacaggtgtgagccactgagcctggccctaaaaactgtgtggtgccaactatgaaggactctgatctgacaataagcttgtacttggctataatggcgtg

SEQ ID NO: 531247 - DNA, 410 bp, Homo sapiens
  misc_feature (38)..(38): n is a, c, g, or t
  misc_feature (45)..(45): n is a, c, g, or t
  misc_feature (83)..(83): n is a, c, g, or t
  misc_feature (90)..(90): n is a, c, g, or t
  misc_feature (149)..(149): n is a, c, g, or t
ccacctaggctggacggctcacacctgtgatcccaacnctttggnaagttgaggcagggggattgcttgaacccgggagtttnagactancctgggcaatacagtgagacctcatctttaaaaataattaaaaaggtcgggtgcgtgtntcacgcctgtaatcccaacattttgggaggacagtggatccacaaggttaggagtttgagaccagcttggccaatatggtgaaaccctgtctctactaaaaatataaaaaattagctgggcacatgcctgttgtcccagttatttgaggggctagagcgggagaatcgcttgaacctgggaggcggaggttgcagtgagccgagatcgcgccactgtactccagcctgggcgacagagcaagaatctgtcttaaaaaaaaa

SEQ ID NO: 531248 - DNA, 263 bp, Homo sapiens
gctacagtcccttctactggtactaataatcatgatagaccattgtttattacccttagggcttcttcgaacaaggtggctggtctttcctggtagcctgcagtggtgaggggagtgatgctgacacgaagggcgtagttcaaagtctgaaattgaagatcatgcacttttaatccttcagaagattctataaatgaggaagaggaggactgtgatgaagattattcatcagaagcaggaacggtttcaagaagcagaactgg

SEQ ID NO: 531249 - DNA, 106 bp, Homo sapiens
gcggccgcctactactactactactgctcgaattcaagcttctaacgatgtacggggacatgtggaatgctggacaataaagcgagtgctgcccaccctccaaaaa

SEQ ID NO: 531250 - DNA, 1031 bp, Homo sapiens
aaagcgagatgaagaaaaagcgaaactgcggaaggctgattcgaccacaaggacgagttagaaacaggtaaaaaggatcagcagtaaacacaaaggaatctcaaaggacaattggcaagaagaaactgtaaaatccaaagtgactgtggatactggagtaattcctgcctctgacgagaaggcagatgattcccaaagctgccgcacagatgacaatgaagtgagacaaaaagcacgcaacgataagaagcaaaaagcacggcgcaaaagggacagacaacgagaacctgagcacagacaacaaaaggggaccctaagccaaatgccactttgttaaatgcttatgcaagaaagctcttggctaggcttaaccgaggaagacacgaccatgccacgaccgagacgacagaggtatagaaacgggtttttaaaagctggtctttttaactgaattttagcagatgcaaaaggcgtatactagacatgatggaaacagaattgtggaagccaatgtacccaactagtatgcacagggacacaacgtgcaaaaatgtaaaacagagaatgcgcaatagcaggaaagcgtacttgtgcaaaacaccaagatagcgggcacacactttttcaacgcataaaaattcccccagtacgtagcatagtccatggacggccctagaagccgtaaagcctacgaattcttaaaactgttgttaacaaagccttccagggtgtgttcgacaggtttgccactcccaaacaaagaacgtcctttttggcaccagaagcaaagaagtcccacactttagttgaacaggacttaacaacaggagggaaacaaaactaattacccgtaattgcagcgcttacaacagagttaaaaggcaagggttctttaggaccttccaaatggcaaactagagttgtaagaggagccttattgaaacggattcttgggaacaacagtggaatctcaccagaataacttgtgactgactaaatccacacacctatgtgttggagaccacttataa

SEQ ID NO: 531251 - DNA, 207 bp, Homo sapiens
agttctgcggtcgctctagaggactccccgaggtactgaagcactgggcttaatcttctcaccttgtcgaacctcattttcctcttctgtactgtgagagaattgaactagatatctgagtcccctacttaagtaattttgagtttgtaaaactgcattttttctgagtactcaaatcccagtgcgagtcctccccagtgcttagac

SEQ ID NO: 531252 - DNA, 458 bp, Homo sapiens
cgggggactggtaacaaatgtagatagccagggggtgctgtgccacttggagccgacactagatccccctctgtcccagaaagatgacccgaaggtgagaccaaagtaccctttaacccccacccttccaatccggtgtgagggcctgaccgggcccagggcaagcttatgtcgcaagccctatttattcagtcttcactataactcttagagttgagacgctaatgttcatgactcctggccttgggatgcccaagggatttctggctcaagctgtggagctcagcatagacccagctttctggggaaggccacctggggatttcaagagggcatccaggaattacctgagcaacagaccatggggaaagtttggtcagaggttccgtggggatttgggaaccacaaggaccaaccacctggtaagcttgttcaaattcaaagaatggcttgaaacc

SEQ ID NO: 531253 - DNA, 355 bp, Homo sapiens
  misc_feature (109)..(109): n is a, c, g, or t
ttttgtagagacaggtttgccatgtggcctaggctggtcccgaactcctgagcccaagcaatccacccacctccacctcccaaaatgctgcgactacaggcgtacgacntgtgcagtggcctgaaataaatagactcttacccaatgaaatagggcaaggaggccaggcgcagtggctcaagcctgcaatcccagcaccctgggaggccaaggcgggtggatcacgaggtcaggagatcgaaaccatcctggccaacagtgaaaccccgtctctaccaaaaatacaaaaaaaactagccgggcgtggtggcgggcaccgcagtcccagccactcgggaggccgaggcaggagaat

SEQ ID NO: 531254 - DNA, 206 bp, Homo sapiens
  misc_feature (121)..(121): n is a, c, g, or t
ggcgtgataggagatagtacggcgcgatcgtcctattcgcgccggcgctccatacattggtccatcgcgtgcttgtgtgtactggctctggttttataaatccgccatcgatacgactggncagctttttacacgatatttgccgcccgggtcctgcaggtcccgctgtattttgccgttttcatcaaacgccacgtggcgtctgt

SEQ ID NO: 531255 - DNA, 209 bp, Homo sapiens
cgatcgtcacccgcaatcccgctggagatacgccgctcggcacttacggcctgatcgccgcgctggctgggcgcactacggctccgagaagctgctgccgctcggcagcttcgtgctggcgctgtatctcccctgcgcgctgcacatcgtgcgtggtgtacggcagcctgctcgccgcgcacggactcaatccgctgaagcttcttccg

SEQ ID NO: 531256 - DNA, 1341 bp, Homo sapiens
acatcaatcagacacatagccctcgtagataacagccattctcatccaaaccccctgaagcttcaccggcgcagctcatatctcataactcgcccacggacattacatcctcatatactattcatgcctcgacaacactcaaaactacagaacagcccatcccagatcgcactcactaactccatctctcaaggccacttcaacaaactctacctcccacactacactacgactattatgagtgacctctctagaacacagcctcgcctaaacctcgagccttaacccccccaactacttaacacctacaatgggacgacactcatcatgatatgcatagctaaaaccaacagttaccatacacatacaatacacaaatcattcacacctcacttcccataaccatataaacatggaactaccaaacaaaataactaaagataacaccaagacacccctacctaccttccaacagatcaatacgccacgataattatcatcaccaccaaagacagacaccacacccagaaactgcgaccgcaccactcgatcgctaccagcacagccagcccacaaacagtagagacagcaaccaaattcagacacaaccccacaatacacactacacaacgcaacatggaaatgaacaacacaaccacaccaaagatcaacatgcataacaacattacaaaaccccaataaacatcacaaccacccaaaataacacatcacaaatcaacaataacttcaccacacatacaaaaacacacaccccaaaaacaaaaaaatacaaagttataacacacaggagcaagaattttataatcaacacctcccactaatcaaccaaacacacacaactacacaacaacacacccaacacaccacaaaacgacagcaagaacaaaagagaaagacaacaaagaaagaacagaacaacaaaaaaaaacaacaaagagaaaaagaagaagacaaaaaaaaaagaaccaaagagaggaaggtaagagagagacagaaagacaaacaaagaagagaaaggcaacaacaataagacaaacaaccgaaaagacgaaaaagacggaggagaagacgaaaggcaaagagaagaagaacagacgaacacacacaaagcaataacagaaccgacggcaacacgaggaacggaaacacagcaagagcacaacgacaacaacaaagagcaacaacagagaaaacaaaaaagacagcgtaatcaaatcaacgacaacagcagaagaagacaagagacgacgaaacacaaacgacagcgagaaaacaagaacacacaaacgaaaacacacaacacaatagaagcgaaccaac

SEQ ID NO: 531257 - DNA, 124 bp, Homo sapiens
ccatccagcagtcagcatccattcctttgtttggcggcttctgccaaacatgtgtctccacccactcactgcagattgttcagcccctgatgtatttgtcttgatttgtttctggtggtagctt

SEQ ID NO: 531258 - DNA, 128 bp, Homo sapiens
  misc_feature (10)..(10): n is a, c, g, or t
actagcgatntcagtctgaccacaaactgatatcattgaaactgtgtggcaagtaatggcactcactatctattctgggccaggctggttttcatgccagtatcctagcactttggtaggcccaggtg

SEQ ID NO: 531259 - DNA, 338 bp, Homo sapiens
  misc_feature (38)..(38): n is a, c, g, or t
  misc_feature (335)..(335): n is a, c, g, or t
ctgctgggaagcctgggctgtttttttttttaaacccnttttatattactgaacaaccaaatttaccctccccggccctgaggccttatcagttcccctgattaaaaacttttttttccccggactttaagcccggtaggaaaaaaaaaggaggagggggaaaaagccaaccattttttttccaggcccttgactgctcctttggggtgggccaaggtttgtatgtacccccccatgcatgactcaaatgccctcaggtccctttttttatggtatgtatactgcttgtgtttgggttgaagccctccctgccattaaaggaaggacttggaganaga

SEQ ID NO: 531260 - DNA, 306 bp, Homo sapiens
taaatattcaccactttttttttgagtagctatggctataacatatgctcacaagtccagtaaaaaaaagggattggaatttcataatttttacgaatatgatagctttcaaatagtttaaatttgtgtgcctacaatacctaaactctactttttagtagacattaacataaagccagggtggctggaatagcattgatctatctcaggtcctttgcccaggacaagataaaaatcagaagacgaaaggagcaggcaagcattaaggggtcgagggtgtgaatgcgtccgtcgaagttggggtac

SEQ ID NO: 531261 - DNA, 113 bp, Homo sapiens
cgtacgcccggatcactcgggtaggcacacgcactaccgtactgtacggtatactactagtacagctatacccctactatgtagagtactacgcaggtacgctcaaccctacc

SEQ ID NO: 531262 - DNA, 734 bp, Homo sapiens
  misc_feature (595)..(595): n is a, c, g, or t
agagagagagagagagagagagagagatagagagagagagagagagagagagagagagagagagagagacttcgactaccccacaggctctcgccgcgttccatatcatggggtctcgcttgttccctcctttcgcgtgctctgtcactgcacttgcccttacattcgccgcgcctgacatacctgcactttccgctacaccctcagctcttacctccgtacacgcacaccgctctcataacaccttctttaactgtcctgatctctctgcgttccttctcatgtatacctcgcgaatacatgtactggtttccactgaactgcatgaatacttgataccacctttgtctatggactcttactgagatggtcatctgtctcatgattaccatcctgcgtacttgtcttatttaactcctgattttgatggccttccgcatggtttcgtctctcctgtgactctggatgttgtctctgtccttttcctcgatgcacactgcagcatgcgttgtcttataacgtcttgtcgctctacatgacgcttcgttcatcgggcacgtctatcactactttctgatacttctgctacttccgntgcagtatcctatagtagtcgcttttctcgaatatgttcgtgttacgtcgaacctctcttggttttacaggctcccaatctaattcctacgaagatgtctagcttttctgaaccagctttgtagagttccattttctct

SEQ ID NO: 531263 - DNA, 202 bp, Homo sapiens
gcatgcattgcacagtcctgaggcatctattacattaagtctgttgtccagccatcaccacccttcatctccagaactttttcatctttctaaactgaaactccatacccattaagcagtaacttcctgttgctgtctttctccatcccttggtacccaccattctgctttctgtctttatgaatttgactactctggaaag

SEQ ID NO: 531264 - DNA, 103 bp, Homo sapiens
actggatccgcctatcccacaagaactatccaagtatatcatatcctatataaggtagccctatactagacgtccaatagcagcgtctataaccgagtagcta

SEQ ID NO: 531265 - DNA, 410 bp, Homo sapiens
tggtagacttgcacaatactaaccttgatttccaggatctggaagttctctttcctgactgctcaatagatgttgaatggggcatattttgatgcgcagtcttgtggttcctgtggtattctaacacttgcttggaaatgagatagttggaatgctatacgcaaccaatatagttgtgtttctaacacttcatggggagaggagagaaaaaggaatccaagcttatataacccgctgaagtttccagttactcattacttaatcatacccttaagaagtatgatttcagttcttctccacacactacaaattaacgagtttcactagacaataagctgatcaattaggctgattcacatttagagctgcctttccaattactagcacatggcgagggttctcaggaaaat

SEQ ID NO: 531266 - DNA, 215 bp, Homo sapiens
ggggtttttccccaaaaaaattttttaaaaaaaagggggggggaagggcccctaaaacggggccaggggggggccttttttgtttttccggggggggtttttccgggggcccaacccccaacccggtttttctttccaaagcccccccttttgtttccaaaagggccccaaaaatttttggtccgccaaaaaaaacccaattttggggaccccca

SEQ ID NO: 531267 - DNA, 1821 bp, Homo sapiens
  misc_feature (377)..(377): n is a, c, g, or t
agttaaaactgagcccaggaaaccctagacacggggtcgctctcgagcccctcctaatgacctacgcggactaagccatgtgcactgtgcacttaccacaccataagcgctcctcgatactacgggcctactacaccaaccaccattatccccatagtacccagactggatggcagcgtgatgctaactacggagcaacagccacggtacacgacggtgcgactctacgacaagcgatcactgtcccatagagaatggcacgttcagcatttagtggcgcataaatcgcctacttgtatcgacgcgtacaagaacgcttactgtagcgtatacgcaggagattgatagctatggaggcccgtgtatttatgcctcgntcaacgaaaacaataagtcgcgcctttacacgcgcctccatagtcttaggcgcaggggagtccaagcgtgagccccgcgccgcagagcaagggttcgactccaacgcgccgcgttattcacatactacctgagcattaacaaaagctcatcacaatgggtcacccatggatacaccacaaatgcaccgggtaagtcagagcactccggactcagtcccacgggcaaggtaatgcgagcacggcgaccctccggtgaacgtcattccgaacaccataataatggtgccttacgatctaccttaaaaaagaaggcaaaagaccggaaagagaaccacggataggggttgaaactagggcgacactagcaccaagggtgagactcttccggtttggatccaagaataggtggtatcaacccatgggcggtttcttacaataaaagtactaaggcaacgcgctgtgactcagtgaagaaaaaaggacactttcggacgacacgtctaagacggttaccggaaacgttgacattccctccttctgcaaaacgcgacaataccccacgaaacagaggcaattacctgaacacgggggtatgccaacagcaaatttgtggtcgggtaacgggcgcaagcaagggggctacttacgccaagcagtgaaccgtattccacacctgtccgaatgtggataacagcggccgtacaaacgttgactaacacgtacccaagactgaaatcacctagccctaagactcatgacgctgagttgcagaaaactgaagagttgaatttcgctccaccagttattgtgatctagcttgctcaaagaatcaatttccaccatatactagggggtgcactccccgacaaaagtgcgccgacaacgaggcaccgtggtaaattaaacgatgggcaccacgtattggaaggcctagagacacattcagttggcagcacacagaggaacacggttaaactgtcatgtgccatagtgttcacattggttagcagttcacagaattccccataaatcatggataattggcacagcgacagagataacaggcagcactacagacaacagcgcactgaagacgaacactaccaccccagaatacgaatacacccgcacgagacaagaggagaacaaggcacgacacaacgaacaacacgatcgctactaaaacacaagtcggaggggacgacggtcaagcgagacgaccatctacagcaagcattagttaccacgacaacggagtggacgcacgcagcaaccagacacactagcagcgcaccaacaccaccacacgagcgacgaaaacgccgatcgtgcaacaccacagacacgtccgcccccaacacacgagtggagggcacaacgacaaaatgaaggacaaacgaagcaagaccgacccagatccgaagacgagtgagtatacgaacac

SEQ ID NO: 531268 - DNA, 867 bp, Homo sapiens
  misc_feature (620)..(620): n is a, c, g, or t
ctgagcgtgcctaccgaaaagcagcccgaccatctttcaaaagcaagaagagaggtcctgctgggagaaactggcaaggagaagctcccgcggtacctacaagaacatcggtctgggcttcaagacacccaaggaggctattgagggcacctacatttgacaagaaatgccccttcagcgtggtaagtgtgtccatctcgagggcggaatcctctctggacgtgtgctgaccatggatgaagatgcggaggatccattgtcatccggcgagattatcggcacgtacatccggcaagtacaacgcttcgagaagcgccacaagaacatgtctgtacacctgttgccctgcttcaggttacggtccatgatctggtgacatcgtcactacgtgggctgagtgccggcctctgagtcagggacagtgcgcttcaacgtgctcaaggtcacgcaagggttgcggcaccaagaaggtaggttccagaaagttcagaggctgggacatcgggccggtccccacaaggatatgaagttgttttcgtcattcgcagaagaggaggcttgtcagtgaggctatgcttgtgggggaaccccgtcacagataacttgcgtcaacagggtgnggaggaacgaccacgggacgagaagcccgctaagtggcctgggaaccagggaccgcaggcgtgcggtcaccaagtaaaacgcggggacagggatgccaacccagtgggcgggcggcaggctcaacaggcccgagtgataaaccgcgcgggggggtgcgagcaccgcgtgcgcggaggcataagggggggcacaccagagccgcagaacgcaagacaacgagcggggacggcacacacccaacatcat

SEQ ID NO: 531269 - DNA, 674 bp, Homo sapiens
gtacaggtggctaaggagctgaaatattgacatcatccccattccctcagtgtaacgtaccctgacttgggtagacacaggcattggcatgaccaaagctgagtctcataaataacttgggtaaccattgccaagtctggtactaaagcattcatggaggctcttcaggctggtgcagacgagtctccatgattgggcagtttggatgctctggcgttttattctgcctacttggtggcagagaaaggtggtaagtgatcactaaagcacaacgatgatgaacagtatgcttgggagtcttctgctggaggttccttcactgtcgcgtgctgatccatggtgagcccattggcacgcgggtaccagaagtgcatcctccatcttagacagaagatcagacagagtacctacgaagcagaggcgggtcagaaagcaagtagtgaagaagcattctcagttcataggctatcccatcaccctttatttgcgcagaaggcacgagagaacgggcacattaggtgatgcatgaggcagcaggaagagaaaggtgagaaacgccgaggaagatcaagatgctgcagacacagcccaagatcgacagatgtgggtcagatgcaggaggatgacagcggtaaggattaccaagaagacaaactaagaagatcaagaggaat

SEQ ID NO: 531270 - DNA, 144 bp, Homo sapiens
ggggcccccccccccccccttttttttttcccccccaaaatgggatggggggtttttttttccccccgggggggggggggggggcgggggttcctttccccttcttttttcccccgcttttttaatggggccccccccccctta

SEQ ID NO: 531271 - DNA, 137 bp, Homo sapiens
ggaccgttttcctcatagaaggagactgtcagatggataacagacaaaactgccgttacagccgcgcatgaagagggcaacgccctggtgatcgcgggtgtgcaggtgcgttattcagaagccacgattggcgatat

SEQ ID NO: 531272 - DNA, 181 bp, Homo sapiens
tgagttcattatacagagtgtcatggtgtaccatttgtttcccttcttaataataataattattattatttttgagatggggtctcgctctgtagcccaggctggagtgcagaggcataatctcagctcacagcaacctttgcctcccaggttcaagcaattctcctgcctcagcctcctg

SEQ ID NO: 531273 - DNA, 227 bp, Homo sapiens
ttcccccccccccacacccaccctttttaaaataattggctttttagataccccccccaaaagctcagaaattggctttaaaaaaacccaccccccaaaaaaatccattggctaaaaaaaaaaagtattaaaaacgaattggctgagaaccaattggcaaaataaaggaatttggcccccgctagaagtttatggcagagctttacaaataaaaaaaaaactggcca

SEQ ID NO: 531274 - DNA, 632 bp, Homo sapiens
ccacgcgtcgcccacgcgtcggaaagacaggctattttatttcaaaaaaagaaaaaaaaaaaaaaaaaaaaaaaaaaaaaaaaaaaaaaaaaaaaggggaacacaaaaaaaaaaaacacaaaaaaagggaccgggggcgtgccgcctctgtaacgttttttttgtggtggcacagcgggtggctccccatataacgagcccgtctttattttataacgacaggggtgcgccatcatgttgggtgtagtagcaattattacgacaacagcgcgaacacgagcgcgccgccccttgggaaaacctctggtggagaaagggacacaatccttctcgggaggggcgagacccattttgtgaggggagacgacacaccctctctctctatctagcgagggagaggtgatagagaacatctctttgagggggaggacaactcttatccacaattggtgagaacttgacgatctgacagcaggggcggagaaacactaatctacgagcatattatggcgctaggcgctatgactgggagagaagatcatagcgcatctaatgagagatattttatatcgatttgtaggagaaggaaatatattttagcacgcacacagggaggtgatgttggtaaaaac

SEQ ID NO: 531275 - DNA, 428 bp, Homo sapiens
gctgagcgcggccgcacggtgcgcgagcgagctgccgtgcggtgacttacagtctggcggggggacttgagaacgtatcacatgctgacggcttacataagagcgctggtcctgctggatgacggagcacctgagatggacacggtcatgcctggacatggcatgaggcgcgctgaagttcatgtcaccgatgcaggcctgaatggaacagacctagtgcagggtcatcgagatgagggcattagagctgaggccaggcttgacgatgcgacagaggacaccatatgacgtggtggttctaccacgaggtgatctgtgcgcacagaatgcatctgagtctgctgctgccaaggagatactgactgagcatgacaagcgtcaggctctgtgagctggcatctgcacaggctactgctctgctggctctg

SEQ ID NO: 531276 - DNA, 1370 bp, Homo sapiens
  misc_feature (292)..(292): n is a, c, g, or t
  misc_feature (568)..(568): n is a, c, g, or t
  misc_feature (789)..(789): n is a, c, g, or t
acaagtaccatgatcagctgactagggaagtactatgttatatcgctcacacctcattatcctcccttactattgcctatggaaggaagtaatactaatcgctgttcattagtgaggctactcatcagtaacggctctaacaacacactacccatcttgaggcaaatagttgtgcactatgagcctattactattcttcgacgcctgcgaatgcaggggtgggcctaggcgccctaactagatcacacctcttccaatcacaatactggttcttacgacctaacgttaccantatagccttatataccctaccatctcaacatgacatatacataacatatatcgtattccaatgcaaggtatattatatagctaccccactgtagcactgtaacttatccccatgtaatagacacagatatacttttgaacatcaagcagcaacctaacctctatctatgtccactaaaatctaattatcctatctcagatccctcaccttaacataattgtctattatacctctataaattctatatacagacgacacccgtacgtgtcgtacgcntgtgttttcgcgcgctaaaaacacatgtggtatccctatccctttgaacgcccctccctaaagatatagcgacttctctcgcttcaacaataaatatagcgtggaatctatagcgcatagacactacaacgatagcgcccctatcgaaccaaactccatactaggtgcggcattgcccaaaattgtgcgcgaagacattataattcgctacgcttcgatantctcttatgtgtacctttcagacgaaacgagtcatagtgtaatgtctgcgtacacccttcttttcgtaagataaacctcacaacttcttttcccatctttaaacacaaaaatgtcttcgcctcttaaaattttaactcatacgccagttgtcccacccaggtttcacaaccaggaaaaacccctaaaaacattccatgttgagtctcatcaccttattgccgtgattaccttcttctcaacgagagtgggcaccaaccttttgaagtttccccccgagttgcgtttgtggtacatactttgaagtgcgagggcgcccggaattgtaagaggccgaaaagcaccaagggcgaaggaaaaaccgctgccttgtaagacgactataggcaacccggtgtaacatattagccgtaaattttcctctagcgagggcactgtagaaaaagaagggcgttccgcgatttacacacattaatagttaatccggcggcgcaacaatatagagaacactctttgtagaagcgccatttagaggggtgtcgccataaaaagccggttgctagagctacctccgcagaccctg

SEQ ID NO: 531277 - DNA, 338 bp, Homo sapiens
ggggtcgctctagaggctcccctcttagcctgggcaaaactaggaaaaaacgcatacataggaccaatgaagagattctctcgacatcaacaaaatcaagactgattattacagaggactttaccaagaactgctgtgtttcccccatcccatctgctgcgcattcacccagagcatctagcaactttgtgtacatgtcaaatgtccagctcagcagcatcctagcgcaaagccaacaaaaaaacaaacaaacaagggaaaaaaacgggcacccacccaaacaaaaacacccccaagcccccgttccccgcaaaagtgtgttaaaacagtaacacccc

SEQ ID NO: 531278 - DNA, 638 bp, Homo sapiens
agcgggcgggaaggcgggggaggggagcctgcgctcgttttctgtctagctccgaccggctgaggcggcgcggcagcggagggacggcagtctcgcgcggttactgcagcacatggggtgtcagttgttggtccgacccgagaacggcttcagattctgctctgcaaaggatatgtaatattagatatggtgtgcctagtttatataaacagaatatggaaactgaacagcgcagaagaaaccttaccctaacactgtaaaccagagtggtgaatttggtagagacgccctgcagaagatagtggaagaggaacgaagcatttaaaagagtctagaaactactgatgagatggtggaagttgacagcattcgtgcgttcagagcgaagaatgctggggcgagtgattggaaaaggaggctaagaatagttaaggcatctccgatactagactacaatgccagtgtatcagtcaccagacgagcagatggccccgaggcgcatattgagtatcagttgctgatattgaaagcagataggagaagattctgacacgaaagatcatccctacctttggaaggagggcctgcgagtgtgccaatcatccatctgaaaccagccagctcccgctcgacatctg

SEQ ID NO: 531279 - DNA, 222 bp, Homo sapiens
gggcccgggccttttttttttttcccgggttaaaggggggccctttttttgggggaaaaccccccccttccccccccccctgcaaaaatttaaaccgcaaaacaaaagggggggggccccggggccttgggcccctttttaaaaccccttttcgggccgggccccctttttaaagggccccgggttttttgggccgcccggtataaattttttttttttcga

SEQ ID NO: 531280 - DNA, 473 bp, Homo sapiens
gcccaggctggagtgcaatggtgcaatcttggcttcctgcaacctctgcctcctgggttcaagtcattctcctgcctcagcctcccaagtagctgtgattacaggcatacagcaccacgcctggctaatttttttgtatttagtagagacggggtttcaccatattggtcaggctggtcttgaactcctgacctcaggtgatccaccacctcagcctcccaaagtgctgggattacaggcgtgagccaccgtgcctggttgccactgcatatgtcatacagagtagctcatctttgcacttttgattaggagtagtgtgtcatctctcacttgcctagaatgtcctacatccctatgcttggtctattaagacttagccagccccatctcctgtctaatgccttattacaccaaccaactagaagggatctcctcctactccagatccccatagtaatttgatctattggggt

SEQ ID NO: 531281 - DNA, 188 bp, Homo sapiens
gttgtctgctcagcaagaccctcaggtgtgcgaggttgtgctgctcctggctggtgagccctcccggctcgagtgcaccctgtgacagatgacctgaactggggatgcctgccgcagtgggcctggggctcccatgtcatccccctgtgatcttgtgtgtacacagtgctgtgtgggtcttggtactc

SEQ ID NO: 531282 - DNA, 923 bp, Homo sapiens
atgagtgtgtcagactagcgtttcaacagatggggcacttctggtggctcttcctcctgcacaatgttggccaacgagtgttgttattgcaggacaagtgtttcccagagggcgaaccccggtcaccaggcgtgccaccacgtgaatttgggcccctccattggaagccgctttccacgaaattcctgaggtccggcccgcccggagttgcaaaaaggggtgaaacccccgaccacccaacgagtcgttgcccccgacattaaaaagtcccagttcgcgggccacatgccggccgctgctaatgggagacacgctgccaaaacaaacgacagaaacacagggttgccagagcaacacccataccaaattcaggggcattaatacagactcccggcacccttttcacccacggagtacaacttgcgccccgtcccccccattggtcacaaggcgttgaactccccctctttaacgccctctctacttcgcgaggaaaaacaatttgcaccgccctaaccatttctctcaccaatcacccccttctccaaagtattttaactctagattcttcttaagtttctctatttataccccttggagagacaaagcattcatccattcctctatgctatgtaaaatagaagtaaagaccacacctgcgtcggcacccaatatttgtacacgcagcatacccattccacacaaactcgaataccacgtctgcccaacaaaatattctcctcaactttctcataacacgtttgattttctccacgtttatgaggaacgcttctttttcgtaacctcttaaggcaatttaaagaccgcatatcgaacgatccgaccaactctttcacaccttaaattgtttccccagaatcaaaagacaaacaacttacacaaaacaccacttctatcaaaac

SEQ ID NO: 531283 - DNA, 439 bp, Homo sapiens
  misc_feature (1)..(1): n is a, c, g, or t
nttctgtacaatgtctcagcttcagcacatacacgttgtcgcataggcacatcgatatctgcacatgttaaacatggtcatgcagaataggtgcaatctacactgtgcacaatgctgtggtccagtcacgtgcacacaacttatctcgatagtctgagcccttgatcttggcaatagtgtcatatatgtatcgaaaaggttcatgtgtgctgtcccaatggtgtccattgtaaagcccgccaatcacggcatccagtgatactaagcaccagatgtctgatgagcataagaggctctcacacagagtcccgtaagcagcttaacattcacctaagaatgagacgcaacatcctctaccgtaagcctacagtgcatatgcattcgaaggcgcctgcgtattcctattagcccatgtattatattgggtggaccacccagc

SEQ ID NO: 531284 - DNA, 903 bp, Homo sapiens
tagcaaatggcaacctgtgtggctatttttgttattttcatttttttgtgattgctgtcatgctttcgccactttaatgaatatcgcgtaatgacgcgaagaggtggagataaggcatgaaaattaactatccgttgctggcgctggcgattggcgcgtttggtatcgggacaacggagttctcgccaatgggcttgttgcccgtcattgcgcgcggtgtggatgtctcgattcccgctgccggaatgttaatcagtgcctatgcagttggcgtaatggttggcgcgccgctgatgacgcttctactttctcatcgtgcccgccgcagtgcgttgattttcctgatggcaattttcacgctcggcaacgtactttccgccatcgcgccggattatatgaccctgatgctttcacgcattttgaccagcctgaatcacggagcattttttggtttgggttcagtcgtggccgcaagcgtggtgccaaaacataaacaggccagcgcagttgccactatgtttatggggttaaccctggcaaatatcggtggcgtgccggcggcgacctggttgggtgaaaccatcggctggcggatgtcatttctggcaacggcggggctgggagtgatttcatggctaagtctgttctttctcattacctaaaggttggtggccagggggcacgaccctggaagtgaaacaaaagagcctggcggtattaatagcgtccgcagggttgcctggttctgcattgctgacgacgggtcctgggagcctggtgccattggttactcttctacacctattatctctccgggttctgcaagtatttacccacgcatcaccggttttcggcccggaatgcttgtgctgattggggtcgggatcctatcggaactatttc

SEQ ID NO: 531285 - DNA, 129 bp, Homo sapiens
tcaggcagccttcgggagccacggctttttttggtacctaccccagggcgtaccaccagccctttacggggggcaatttatttttacccacccaccaattcgcgtgttaacacagaacttcttctctgc

SEQ ID NO: 531286 - DNA, 129 bp, Homo sapiens
aacgaagtcaggaagggaatgtgtaatatgtggagttggaggtccctttgacacccttgaagtatacatgtgaaagaggcagttgaaaactgggtagtggatactgcgagagaggataaaggctgatga

SEQ ID NO: 531287 - DNA, 316 bp, Homo sapiens
atatggaatctttacagagactcttccaggcaaacaatgaagattaggcatagaaatgctgtaccttaaggttaaaatatactgtatcaccaaatcaagtttcactagaagtttatacgatttttatgtaatcaaaaatcaacttttggccgggtgcaggggctcacccttattatcccagcactttgggaggccgaggtgagtggatcacaaggtcaggagttccgagaccagtctggccaatatgctgaaaccccatctctactaaaagtataacacattagctgggtgtggtgggacgcgccatcgtgcgcat

SEQ ID NO: 531288 - DNA, 447 bp, Homo sapiens
  misc_feature (342)..(342): n is a, c, g, or t
tgtgcctggatggcgactcccacttccagtatgctaattacctctacaaaactctcaacccactctctgttaaaccagtccaacccttctttggcaaaggacgctggctttgcatttctctatcagctaccacttacgttgccactctcattcccacaaaaaactgggtagttactagcttaacctaccaccctcgtaatgaaggaaaaagcccctcctaactcctacatatgcagtcattggccaacttctccatcaatgaaatgaccgaaaataccctgacaggtcgtgcagttcaacttttacgctcctacatgtccagcctcacccattacacaagtnatgaaaagcccatacacggccctgtgactacaaacgctgtcttaactttccaagcccctttatgcatccaacacaacctgtcatcaggcctacctctaggtcacc

SEQ ID NO: 531289 - DNA, 516 bp, Homo sapiens
cacttaccccttactgctgcagcgtgggcgctgctcagctcagctctgaccacacctcgtctacaccagggccacacaggctcccaggccgggcccctacaagaaggagggccaggccatgccgacgtgggcacgcaggcgtgtgcaggcagacggacaactggggtgaggagggggccccaaatgggaggagtgcacgggctctgccaatttgggtgaggggcaggactgtacaagaccccctcacaccctgactgtcctggtcctgccttccagagcctttctgctctcctcagtcctgctcctcccatgctcctataggcagacagcttcctcctacttccacacctcctccctggcagacgcacctgtccccctcccaccacctgctcccttttcagcccccacgtgcgaggccttcctgggaggtgctcccaccctacccttgcacaggatcctgggctcagatggaaacctggtatctacttgggcgccactgatgagaaagaattcaag

SEQ ID NO: 531290 - DNA, 807 bp, Homo sapiens
  misc_feature (530)..(530): n is a, c, g, or t
gagatgggatcgaacccagcaagggctggggcgcttgggaggctcaaggctccagcccagccttgggagtccagcacagccaagccagccagctacacctggcctgggccagagcttcgatcatgcagcctgcagagctgtggaagtgcagaggcaaggaatcgtagaaaggattttggaagtgacattggcctccgcttgaatgcttctgctgacggggagctcactacctccagagacagcctacattgtctctgggcatctctatgagttagcaagcacattctcatttttagcggattctgtctccctatcaccaccacctcccacgtccaaacccttccccatggtttccaccaatgacccctggaaccacacacaccgcacacatttatttgacaaacatttattgagtgcctactgtgtgctggaccataggcatgaacacggagatgaggccagacctcttgcggctgtctccttagaaactgaggcatggagggagaagggaccctccaggcctgcaccgncaaaaccagaggaggcagagaacacgcctcagctctgcatctcctgcgtgtcagacctcagccatcatcccaacaacgtggtggggggtgtcatgattatcttcaatttccagatgagaaaactgaggctcagggggtcacggccctgggtcgggcaccatgcaggctgcatgagccatgccttgtcttggctacatgatgggttcaggggtgatcacgtgacccagttcaggccagcgagtcatcagtgaaagccaaagctggccccttttcctca

SEQ ID NO: 531291 - DNA, 345 bp, Homo sapiens
cgtccttaagcctgggaggtggatggctgcagtagcaagattgttccactgtcctccagcctggtgtgacataatgatacccaaccgaaagaaagaaaggaagaaaggaagaaggaaagaaaggaaagaaaagaaagaaggaaagaaagaaggaaggaaggaaggaaaggaaggaaaggcctgctgagggcctgaactttactgttcttgctgggagtgttgttgttctggagcttgctgttcacggttctggagctttctgctatgtgaagcagaagcctgaaactgctctggggatgtgtagctgagggcttagacattgttggggcttaagggacccttggg

SEQ ID NO: 531292 - DNA, 162 bp, Homo sapiens
tctaggggccagcgccgcaagatggcccaggagaaccccaagatgcacaactctgagatcagcaagcggctgggcgcggagtggaagttactgactgatgctgagaagcggccattcattgacgaagcaaaacgcctcagggcggtgcacatgaaggattac

SEQ ID NO: 531293 - DNA, 86 bp, Homo sapiens
tccccaaggttgggggcccttgggccctgggggggggtaggccccttttaggggggggcccgggccccgattcggaacccggggcc

SEQ ID NO: 531294 - DNA, 200 bp, Homo sapiens
agatgggaggatgacttgaggccaggattttgagaccagcctgggcaacaaagcataaccccatctctacaaaaagatagaaaaattagctgagcatggtggtgtgcacctgtagtcctggctactcaggaggtgaagcaggagggtcgcttgaacccagaagttcaggacttcagtgaactataatggcaccactgcac

SEQ ID NO: 531295 - DNA, 521 bp, Homo sapiens
tgtgtgtgtgtgtgagtgagagagcgagtagtgagtgagtgagtgtgtgtgtgggggggactcggcttgttgttgtcggtgacttcccgctccccttcagcacttggctctccccacgacgatgcagtggccgatccgtgaggcgctaggatattagcgataacgactgatcatcgaggtggagagcgacgactgacagactggctcatcataagtgcactggaacgaaaacgtcggagaccgatcgaaagacagctttcacgagtttgcgggactctagtcccatcactccaaggagagaaggcatcccgggcccaaatcctagacaaagccacagaatatatccagtatatgcgaaggaaaaagcacgagacaccagcggagatattgacgcactcaagcggcagaatgcgtcttctggagcagacgaagtccgtgcgactggagaaggcgaggtcaagtgcccaagtgcagaccaaatacccctcctcagacaagaggctctacacaaacgccaaggg

SEQ ID NO: 531296 - DNA, 804 bp, Homo sapiens
caacctcccctttttcccccgggttcttaaagcaccgtgttgcaaacataccccctaggagcccccccacttctatggtcccgcaccatttacttgaaaacctctctctagtcatcccggctgtcatttcacccatgcccctctatattataaaaggcttaaaaaacacgactgtgcactatcagacgcagccctccttaatactgtattgtcccccagctccatcatgtttctcaagcccccaataactttgcgatgcactacccctcctaaatccccctcccctctttgggggtaccctactgtccgactaggatttttcttggaagactgttttgagtttcaggcgccccttcattgtggtggccctcccttgcagcttgcccgcctatggatttggacgtattatcattattggcgtctcgcgggcgtcacccatgtggttacttgcgcgccgtcgatgctctgttaccccctctctgtggagcggccggcgacctttgcccgcgctgaggggtcccccgcgcagaccacccgggtgttcctcacgcccctcccctgcgcccccgccaccgggagactcctctcgttgttcgtctttcgggacactcccacgctttttccccggagttttggttggggggctccctcttgcgtggccagccaatcttctgtggcggtgcggtgtgccacaggggtactcctttgccacccgctgtgggcccgaagttcgccgaggagacccgtagatttcgtcctccctgtaggcccagtaagctggggctaccagcagcccacataaca

SEQ ID NO: 531297 - DNA, 315 bp, Homo sapiens
caaaaatggggcccaaaacccccccccccccgcttttttgggtttgcttcccagggggcctcaaacactccccccccccctgtcaaatttgggggaccaaccccagtgggggtgttaggtcccccagttccaaaccagtttagggacccccctgccctgtttttgggaaatccccccccagagaagcaaaaagggaaaaatttcccccccttttttcccctggccaagaccccctttatagggggcaaatttttttcccgtttttttttaggcataggaatatttgtttaaaaccttataaaggggtttatccta

SEQ ID NO: 531298 - DNA, 166 bp, Homo sapiens
ctgtaggatccccggtagcgcggtctctcctgatctttgccacagggttgtcaagactgctccagccagatggaaaagtgacaaaaggctgggatgaggtcgacatggacattgaatggcgggccctaggtggactatactggatgtgtgagagagcagcctatac

SEQ ID NO: 531299 - DNA, 192 bp, Homo sapiens
gaggacctgagcttacgaggcactatatctatttccatgtcctctttctacatgcttccagtgaaaaggaaaaaaaaatacatttttagttttcaaaaatcttaatcatattacattatttactgcacttttgtctttgtggtatcatctttctctttgattcacccctcgttaagcttgggtaccggagct

SEQ ID NO: 531300 - DNA, 308 bp, Homo sapiens
tggatcccttcgatgtgggctagagggggcgcagctcaaacctgctttcctttacttttacttattatttttttcttgggacgagagaagaacagagttgtcgattctgccctatttatgtttctactcgggaacaactgtgggtggtgtgtgtgtgtgtaccctggtgtgggtttttaacagaattgggaagaagaaaaaaaattctccgcccttttcctcgatctcgctccccctttcggttctttcgaccggtcccccctccttttttggtcctgtctgtgttttgtttggctctgagcccactt

SEQ ID NO: 531301 - DNA, 982 bp, Homo sapiens
ggcgctgcacgtgctgggacagccatggtttcagacgacagatgacttgacatcttctggcttcttgtagcttgatgccaacccaattggtggggaaagcaagcattacaaggcatctcagcttcactattatccaaatgcatagcatgccgttgcatgcgctgcctgggcacattcgccattctattccatgcaatcgttccaacaaacttgctgtgcatagcaaagtccaccattcaagaaagccgattccttatatcctggaaagaactggccacgactctggacgactactatcggagaccctggcaaccctcctgaacttcaatccctctgggagtacaagatggcacacatacgcaaccttccaaccctcagccaaaatgcacgctccattcgctcgacagacgatcaacacgcactctaactgacccaaacagctgaccctaccagtggctcaaacataccagcaacctacagctgcgcagggaatccccctggaccgaaaagcccctaaggccctacactgccataacgacatgacacacaggcaacgttcaacaagacacaactcagcgcacactgccactccacggctactgggtggcattacaggctgccagcaagaccagcggccgccacgccagacatacatccgacccatccatgaactggccatctccggcaggcacaagcacaccagcaaccaccccgcaagcgaccgccccggcggcaccctagcactccacgaccacagcggctactcccaacaggcctgcgcacacaaccgggaagacacctgaacccctgaaggtgccaacagaatgccaatccgcaccggccgcaaatggccaggagggggatccagcccgaccaagactcaagaacttcagacaacccaacaacccggtacaggcgcaaaagacactctgcccaggaatcgagacgcgcggccgggcacgacagccagagacgcaaaatg

SEQ ID NO: 531302 - DNA, 211 bp, Homo sapiens
gatgatcttgatgtatcccggctgtcagattatcacacgcacagcagcgaaacgtgctagtagatttgagatcagtctccattcacttccacgtagcagcacagtccagagtgaccggaggcagagagctcttgtagggtcagctttctaatacgcatgtcaagtgaaaaagaaccctctaacagcgcactgatttgataatgtgataacc

SEQ ID NO: 531303 - DNA, 235 bp, Homo sapiens
gactcttagaggatccctctctgctcccagtattcgacaagaatgagatcaatagtaactgctatacctaccgtctgtcgggcagtctgtccatctgcaataccaggctagcatggattagcaggcgcggcttctggtagtgcaggagcagactcgtaggggcatctgcagtgctgccaggaggatctccgccagttcatggataacaggccttctgttgtccacacgaagcccg

SEQ ID NO: 531304 - DNA, 236 bp, Homo sapiens
aagtaatatagtcgcaacactatctaacgttaatagacctaagattcaccttccaaccatctgctagatcgactctatcctatagttgacattctcgatgacatgaccttgacatgtcacacgaaggtgctgatcgcactcttcacctagcacgtggatctgcccatacctgcagacaacctcaacctgcgaacttcgccgaagctaccgcactactcttcacttgacacgaggca

SEQ ID NO: 531305 - DNA, 135 bp, Homo sapiens
aagtctgcagcaagcatcacaaggggcagcaacatcccatccattcccagcccaggtgcaggggtcagtgcattgtttgtttttcttattttatttacattttccacacaccatgccaaacaccagttcagcaag

SEQ ID NO: 531306 - DNA, 439 bp, Homo sapiens
tactcatagacggatacccggatggcgctggctgtggcgaaatcacgcgttagaatatgatgcctctagaaagctatactgaagcagatgtctggcgagctgatgctggcaccacgtttgctgcgtatagtctgaaatacatcaaggctcattccccagctgaggcctgggttagaagcactttctttctcgaggggctttgagacgtgtttctcattattctgctagcttttacattttttcagagtactgcatctctgccctttatcgggaatttgatactctataatatgtagtcaatgttcacacgatatgtggtgcagtgatgttttcccctaggagcctgtgggagtgtgagaataatgaatgtgcgacctctggcaatcggaaataaagtaagagtataggtgcgcgctgggtaaacatccttgtgcttaca

SEQ ID NO: 531307 - DNA, 964 bp, Homo sapiens
gatggttccctgcgggacttggccatcaaatccgcgatctgctatgccgcgctactgtgtcgcacggatggcgccgtagggcgcagggcgatgtgccccctgctcggaggtaagtcgtgggccttgcctcactcccacaggctgactcatgcaggtctcagttacaatggagatccttcgccaggttaggaggttgaagcacagtcgctaagaagtgagatctgctgacgatcgggcggggagaagaagggctcgcaggatccacaggtcgcctgcctaccccagagtgcttcgaccgcctgcctttgtgacatcactgacggagctccaaatgctggggaatgtgtcaggctatcgttggaggaactcccggggatgggcagagcagagtatggggcgagaaatggatcgagacactttattcactcacatttcgggtaccgagaggtgtctttgccgtgcatgtttttagcgggtccctgtattggtggcatcttcctcattggtaaccacacatcaggatcttgtagctttgccgagcctatgaagaagattggctatcgaatgggatgcttgggacaaggcgccttcgaagtgccatcgggcgtactttgggcgaaattttccatgctgccttttcgaagatggaccctgaagggttatgggcgggtgatcacggattatccttctcggaggcagctgatctcagtctcagtccagttgaactggagtcatttgaccgccttggactgtccgataggtttgtggacagcagactacattgtcgcgtctacttacatggggggacgacctggttctggagtcacagctgtgcgggagaccatggtacgggacggggcataacggagcattctaagccgttaaccggaattgtggttttcccacccaccaagcgggcctccggtccaacttggggaacactgctcttgacggattaccagat

SEQ ID NO: 531308 - DNA, 483 bp, Homo sapiens
aacataagaaggtgacatgatggagacaaacactactgatgatgagaagtccactgccaagagtcttttggtgaaggctgagaagcgcaagtctcctcccaaggagtatattgatgaggaaggtgtgagatatgtgccaatgcgttcaaaacccccccatactttgcttccgcaatatttgaacccctgtgaagcgtgttaccaccactttcagaggtacagtgacctaccggttaaaaaagaaaaaaaagctttgcttccggaaaatactaatttgcaaagggtttcctttttagctccaggttgagaagataccctttgtttgcgcactatttaagtggggatagaaaacttgagtcttttaacaacttttatacccccggagggtgttcccacgaaacaacctctgcggtatggatctttctcggatagcacaatgcacccggtaaatttctctgggaaacattgtatcgaacatattta

SEQ ID NO: 531309 - DNA, 137 bp, Homo sapiens
  misc_feature (7)..(7): n is a, c, g, or t
  misc_feature (48)..(48): n is a, c, g, or t
cccaaangcgtctgcctctggtttcctagtccagtttaggattatttngaggaagggattactgatgtgtgaattcacatctgggcttcccctaaattgcaagtaagggcccatgttaaagattttcccctaaactc

SEQ ID NO: 531310 - DNA, 587 bp, Homo sapiens
  misc_feature (33)..(33): n is a, c, g, or t
  misc_feature (86)..(86): n is a, c, g, or t
  misc_feature (112)..(112): n is a, c, g, or t
  misc_feature (117)..(117): n is a, c, g, or t
  misc_feature (126)..(126): n is a, c, g, or t
  misc_feature (134)..(134): n is a, c, g, or t
  misc_feature (139)..(139): n is a, c, g, or t
  misc_feature (142)..(142): n is a, c, g, or t
  misc_feature (153)..(153): n is a, c, g, or t
  misc_feature (169)..(169): n is a, c, g, or t
  misc_feature (171)..(171): n is a, c, g, or t
  misc_feature (173)..(173): n is a, c, g, or t
  misc_feature (195)..(195): n is a, c, g, or t
  misc_feature (206)..(206): n is a, c, g, or t
  misc_feature (209)..(209): n is a, c, g, or t
  misc_feature (248)..(248): n is a, c, g, or t
  misc_feature (258)..(258): n is a, c, g, or t
  misc_feature (281)..(281): n is a, c, g, or t
  misc_feature (286)..(286): n is a, c, g, or t
  misc_feature (305)..(305): n is a, c, g, or t
  misc_feature (314)..(315): n is a, c, g, or t
  misc_feature (317)..(317): n is a, c, g, or t
  misc_feature (323)..(323): n is a, c, g, or t
  misc_feature (325)..(325): n is a, c, g, or t
  misc_feature (339)..(339): n is a, c, g, or t
  misc_feature (348)..(348): n is a, c, g, or t
  misc_feature (369)..(369): n is a, c, g, or t
  misc_feature (379)..(379): n is a, c, g, or t
  misc_feature (414)..(414): n is a, c, g, or t
  misc_feature (509)..(509): n is a, c, g, or t
  misc_feature (517)..(517): n is a, c, g, or t
  misc_feature (564)..(564): n is a, c, g, or t
ttgctcatgttcctagcatcacaaatctgagtnacaattttgcttctcaatgaaaaacatatactctgaaaagtgattaggaagtnctaaaaattttaatcatttatagagnatctnaaaaatccntatcaagnaaganatnaactttacctntataaatctttgtgtnanangaaaaaaaaatcaaggcatacnaatttcattgngtnctacatttttaaataccatcctttgtctccgttaaaagnttttcatccntttattcaaaaaccttttaagtncaacngtccgttttaagggggggngggggggtnntngggtgncngggcgaggcgttgncttggctgngacggggtaagagctcaatgngagtccttgngggcctcccagtcatgcctttccgtagatagggancttcatctttgttggtcatcacgcctgctatgtctaaatgtgcccacttaggatgagttacgaattctttcaggaatgctgcagctgtacatgcncctgcggntctgtattttccaatgttgttaacatcagcaagctggcaatctacancctgtccttgtatatgttcgaag

SEQ ID NO: 531311 - DNA, 304 bp, Homo sapiens
gttatccatggacacatttaaggagtccttatcattaggtatacaagtagttatattgtaaaactgatgtgtacctatatctttggggacaggacatcaatcaatacatgcagattacgtagtgtgtggacagaaggtactttcgacattcagttttgctatatagacacagaatgaataaatgaacttttaacttttttctaatttttgcaagaggtaagtcaaagattcaatttgattcttctagagaggggaaaaaggagttgaaagtaggtcttcatttagcagagctgttgtaactgga

SEQ ID NO: 531312 - DNA, 652 bp, Homo sapiens
agggccgactcacccggcacgaggtcaccttgttgtgaccgccaccatggagtccaggagcggggcgggcagcttcaggcaccgcagcgtggacagaacgctgcatttcttgagcttcgcctcggggtggctgacgtccctcacggtgcaagatgagatcctgtggggccgggccgtggggtcagagcttcggagcctcttggtccctgaccccaagcttgcagacaggcccaggagaggggctcacacgagctcccaacgacaggctgggcatgggaggtacgcctgtgtgcaggcccctcggacaccccaggacgggggctcctagaccaacagtggacgcgagcccacccggctgcacttacccaaccttccaagccacaggcagcagctccgcacccccagacccacacgcaagggggtgccatatatgagcacccaaccaccacccacccacccagggggtcttcattcaaagctttagggcggcttcatcctcctgtgaaatgtcttttaacagcggaattatttcctctttaaaggatgctttttttctcacgttcaaaaaaaatcttacaggcaggctccttacacaaaatttgaaaaacacagggaaaaaaaaataaagccgtgtgtaattctccaacttaaa

SEQ ID NO: 531313 - DNA, 266 bp, Homo sapiens
ccgctgctgctccctcttcactaaaaacacaaaaatcagccaggcatggtggtgtgcgcccgcaatcccagccacctgggaggccgaggcaggagaattgcccgaatccgggggcagaggttgcggcaaacagagacgacgccactccactccagcctgggtgacagagcaagactccatctcaataaataaataaataaataaataaataaataaataaataagcaagctgggcgtggtcacatgtactcgcggtccctgctact

SEQ ID NO: 531314 - DNA, 765 bp, Homo sapiens
gagaagaatctggatactctggagaatacagagtgaagaataatgagtgattaatgtaaagtttctgaatccagatttccccactgccataagtatgaattccaaccctctcttcactgattttctggatattgattgggagactggaaaatcccacgtagacttcagggttcttctgttgagctaccatgctgctgttgatgctactctcctcagcagcagatctcttgctgactgacataccctccccactccatgactagccccagctggaaatcttatttagaggttaaataaaatgtgttccagagatttaaagataaatgaaatattataaatttgttcagacccgtagaatgtacaacacaagaatgaaccctaaggtaaactgtagacgttgggtgatagtgatgtgtcagtgtagattcatcaattgtaataaatgtaccacttttggtagtggatgtggataatgtgggaggctatgcatatgtaggatggggaatatggctgtaccttgtggatttgtgctgtgaacttaaaaatactctaaaaaatagtatttaaaaaatcttaaaatagggcggcacggtggtcacgtctgtaatcccagcaattgggaggtgaggcaggtagatcacgaggtggggagatcgagaccatcttggccgggggggggagccggtctctggtgaaatgcaagggtggtggcgggggggtggccgtacacaggtggcgggagggagggggaaggtttaccgggtg

SEQ ID NO: 531315 - DNA, 129 bp, Homo sapiens
ggctgctctgaggatccctgcactgttgttcatacccccccccggatacagcgaccaagttttgaacaacagttggaggtttgaacaacagtgcaggtttgaacaacagtgcaggtttgaacaacagtg

SEQ ID NO: 531316 - DNA, 996 bp, Homo sapiens
gaggagggggataatcagagctgaggcgggcactctgactgagtggcttatcccagaacagcccaagggccggaagcagcacggtggcttctcgagctcctctgggcctggagtgacacaggaaggatctgctcttcgctctgtgctgcttgccagtccttgcagttggagtttaatgcagaggtgacatctggtagacgcctcaggtgaaaatctggtgtattaaaaatgtaacttctgtcacaggctcacttccgtgtcttgtatggctgggatacgatgccccatggggtatgggggtgctgatttaccctcatgcgcatggtggtagggaacggcttggtagtcttgtaactggccccaggtaattatggccaggatgggacagggcgaatggcagcgtatatggacgctggggcgagcagcactctgtatggcctcctccgtctctactgaattcaggggtgggactagtgccccatatgctagagggagggccactatgtactggtcgtgctacccctctggtacgagacaatcgcactctgtaaacatagatcattccacatttatatcctctggcacgtgggtgctagaggcttccctgttagtgatgggactacctagctacatgattcttcttaggtgcatgcgactaggttgactatctatgacagaaaaggctatctttctaattcacatcaacaccacggtctgagtggggttgactagtcgagaaagggtggggcttaaaacaagccaagtcagacacgggcgggaaaggcttcacgtgacgaaaaccctaagagtgggccagagtgggaggatagccgccccacaaagaggcctggataggggggcggggaaaacgcgcgcaccggaccggagagaaccaggcagtttgtcagcaagagcacgcggggacgcaacaaagggcacacaaggcaggaaaaaggcccccgagatgccgaccacagaacgccaccctagggcgga

SEQ ID NO: 531317 - DNA, 546 bp, Homo sapiens
accattacgagatcactgtgagacgcggtgccgggatctggtaggacggggcctcggggtggtgctgctgttgggctcagcccgtccctgactgccgtccccaagtggggagaacgtgtagggcttcgacatgtcttgcatcaaagatgtggccattaaggagcccctagtggatgtcgtggaccccaaacagctggtcaccaacgcctgcctcataaaggtgagggggtgggcatggccaggtgccccctgggttgaaaccaaagagaggccatcacctggccctggcatgggactttggggcccagaatgttggcctgaggtctcagagcctgatctgccagccagaggtggtgctagaggcccaggaaagacacttcgtcctttaaatatctttgtgagcgctgctgtgtgagaaccatgcttggcacttggcttctggcggaggaaacacccaaagctggcagctaaagcccacagcccatgcacggaaaggcaggaccccaggtcgatgagcggatgcacatgcacgcgggccactgcaga

SEQ ID NO: 531318 - DNA, 390 bp, Homo sapiens
  misc_feature (11)..(11): n is a, c, g, or t
tcacttttccnacagggaagtccatggctaactctaccctgtacctgaatgctgatcacttactttcaggacaggggctgatagaggacggtcacggggaaggatccaaatagtgacgaccaaacgctactacgaccacaagctaaaagagagagcaatttaagagagagttataaatgaacacccacttgctttcatatgacaagcttgtagtcaacgtggtgttaaggaggtgacagattcctatattatagcctagaacccccaaaactaaacaaatacagtggtttttctttcctctcagtaatatgattgctgtttacctggtgcaggaaacagggtacgaatgggaggaagagacatgctctaagatgcataatggtttagtta

SEQ ID NO: 531319 - DNA, 123 bp, Homo sapiens
atatggatatcacccgcccgatcatcgctctcgatcttcccagcgccgaggcagctcttgacttcgtaggtcgattcgacggggagaaccttttcgtcaaagtcggcatggagttgttttacg

SEQ ID NO: 531320 - DNA, 531 bp, Homo sapiens
tggtacctattctgtcacaggcggtggaggaggaagaggaggatagatatagtagggtactggagaaaagaataaagaagaggatgatcctataggaattcatgactattttggagtaagtgtgtgtatgaatgttgatacagtcattcttaagattgataattattatgatgctattctgatactcttgacatatattaatgcttaagctgtgcagagtcccggcgagccccatcagttgcgcacgagaatattcatgtcgaacccaatgaatatttcaaaaatgagttgttgacaaagacctatgtgctgaagtcaaagctagcatattatgatccccatccctataggggaactgcgattgagtattccacaggctgtgagatagattggaatgaaggaaagaatgtcactttgaaaaccatcaagaagaaacagaaacatcggatctggggaacaatccgaactgtaactgaagattttcccaaggattcatttttcaattttttctctcctcatggaatcacctca

SEQ ID NO: 531321 - DNA, 179 bp, Homo sapiens
tgtcaactcacaagtcatcatcagtaacaaatgatccacgaaatgcaagcatgcacggagaacacaaactcctctgtccaggcatgtcaaggctttctgctcctgcttctcaccctctgccctcatgacagtaccggctagaaccagactctctgttcaaaccccaccgtcggccatga

SEQ ID NO: 531322 - DNA, 686 bp, Homo sapiens
  misc_feature (55)..(55): n is a, c, g, or t
gacccaaagtgcaattccactcctgaagggtttcagatacataggaaaggggcanctattgttgtaacatcctgaccaaaaagattgcccttccaaaagcaaactatccggggtcatgaacaatgtagtggtgctgactgtgaaacaccagtaaggtgcaaaagcctccgatgctggccgaaaaccttggggaacaagcggcccctgcttttaacctttgaagccgattaaacaaaccgtccacaaacgtttcattgtggacactccacctttcctgcagaaaattgcacactttctaggaaaggagggcgaattctgttaccagtgctccctggttagcttggtaaaccacaggcctaggccaccaaagaacccatgaaagcttgtaaggattgtttcccagcctttggaaaaaagtctcgcaaggcctaccaataggaaacctggtttccccaggacggtaaaaaacctgtttgcaccaatcaaacctccttaagcctaatacctcccctttaaaaggctccccgccttccttggggttcatggcaaggaaattgaggtccggaggctaacccgcgggttttcctttgcggtgggggcaaacccacccccgggccaaaagtccgaagtttctttaaataaagttcatcctcccgcgcgcttccattgattgaaaatggcaaaaa

SEQ ID NO: 531323 - DNA, 464 bp, Homo sapiens
  misc_feature (292)..(292): n is a, c, g, or t
ctactctgggaaggtgatctctacggccaccggccacagggctccgtccctgagctcctcacgccgcagtagctaaagcacccttagctgcaaggaaaacacaggtgggaaaacagtttcttaatgaggaatatttgtaagctctgttggcgctcagcaggttgaagattgacaatgaaccacctaagggtgcagatttagcctcagggtgcagctcggatccctgggttcagcggaggtgggtgccgaagcccgaactgaattggcacgcaggtccctgcccagcgctganccgcgcctcgggaaagactgaaagctgcccgtgccgctgagcatgcccagtttctgcctgagtccctggagggttgcaagattgggggttgatttggtctccaggtgccgtaggctgcgaggaagatgagacggccaaagatgagaaggccaaagattgcgagcgactagta

SEQ ID NO: 531324 - DNA, 1244 bp, Homo sapiens
ggagagagagaactagtctgagtttaaatagtggtttctaggaaacgaaattccactccttgtaggccaaggctggattgcaagggcttcctatcagactcacatagaaacctctgccttgcagtgttagaagcaattctcctgcctccagcctcccaagtagctgggcatcaacaggactattgcgccaacaaagcccggactatattataatcggtattttaagtaagagacggagatttctccattgtgggccaggctgggtctcaaattccatgacctcaggtaagatcctcccagactactgcctccccaaagtgctggagattacagcgctctagaagccatctgtggccccggcaccaacatatgtggtataatacacagtacagaacacagggtgtttaaatcaacgtgagtaagggaccaggatggaattctatgaaacttcaccgaacacaacgaggggatcccaaccacggagatcaaataccaacccaaaaatggcatgaggacacaacaggcgacactgagaggccaacacaaaagaccgaggggaccacgcaaaacaaaacgccgttcaaaaacaagggagaataacgcacaacttcagggcagtgaagtgtagaacaaagaccccccaatcgagaaacccgagggaacaaaaaacacagcaagaaggaggaaaaacaccccgatggaggctactacagaaacacaacggcacagaggaacataaaaggagacacccaaaaacttgcgagaaagaaactgcgaacccccaacagacggcaacacccccgagagagaactcccacatcgaacgagtggcagacacagcgcgaacatggggaaacaaccaaagccaaacaacagaagcagcccaattgaaacaactacacgacacacagaaactatgagaacacaatccccagaagagaacgaacaccgagagggagcgcccaactcaggaccaacaacccaacctagaagagccagcaacacacagcactgagggaagcacctaggagcgagacagaggagaatcgatagaaacaacgagcaaaactgaagaaggaatcgacacccatagagagacagcgactccaaacaggacgacagacacacacaaagaagatgagagcgcgacgacgaactcaatacaaccgcccgcggagagccacaggagatacaaaaaatgcgtaaacatcgaggacgagtgaacgcaaccacaccaacacaac

SEQ ID NO: 531325 - DNA, 376 bp, Homo sapiens
ataaactttgcgagtgtgttgcttgcaacagatatagagctgaaatgtaatacacttggttttaatgaacagatcctgttgactaagcatgcctgcagaatagcatagccccaggtggaacctgatcccgtggctttctagtattcattcaccgtaatattagtcttctgccttgtatgaggattgggcctgctcccataaatttcttttttctgttcacagatagataatgtcatttgaggtaatacaatagtcttgtttcagaaattaaaactgtccagtttaaattgttaattaactccacaattttccttccagggaggtttgtttcaggcatgcacagttgtttttcttctgtaaagtgaagtcgacgcgg

SEQ ID NO: 531326 - DNA, 609 bp, Homo sapiens
gagagttgacccgtgagcagagtacgaatgccactgaaagggatcgtgagcagcgacagtgacctgagcatgtgctagcgttgccatgtggtctcacaacaatggactggatgggactgattctgaatgctgagataagcaaatattgaagaaatatctggaggatctatatgcatacaggacatgagaagataatggggaaggaagcaaaaaactcgaaacttataccataataagaactctggaccagatgagtgtgatgacgggatttcttgcgaaaatcacaaccaccattgatatcacacaactgataacgggcccagtgcattattaccccaaaagccaaactgactcacacattacatcacacgccacacacatgtgacatcattgagcaacacaacgaagactgataccgggaatgaccactgcgcgtgaacacagacttacatcgagcaatgggaaattgcaaattctatcaacaaggcaatgacatcgataaattaatccccaagtcgaaccatactcaacccaggcaggaccacagcccctcgggaaaccccatactaaaagggcgcgcaaatgcttgacctatgaacggaaggcaag

SEQ ID NO: 531327 - DNA, 366 bp, Homo sapiens
  misc_feature (34)..(34): n is a, c, g, or t
  misc_feature (131)..(131): n is a, c, g, or t
gaggaatccaaggatgttgtggactaccacttgntaaagagattaccatgactaaatggaagccaggcgctaatagtcaagactatgggtaaaaggcccaatcacaggcccagagacctaagaagacagantggttttgggagccaggcccaggttctgctgtcctgtgctgtctcaggatgttccttcctacatccccaccacttcggctccagctgtggctcaaagggccccaggtactgctcaagctactgctccagaggacgcaagctgtaagccttggtggcatgcatatggtgttatatccacaggtgctcagaatgcaataggggttggagtccccacaactggtgcctactagggcag

SEQ ID NO: 531328 - DNA, 880 bp, Homo sapiens
cctgtagtcccagttacttgggagactgaggcaggagaatggcgtgaacccggtaggcggagcttgcagttagccgagttagcgccactgcactccagcctgggcgacagagggagactctgtctcaaaaaaaaaaagttggcaatttctctcacacttccaatttatctcactcttaaaggaataagagaaaatgtttggttgttagcacagagaggtgtctttttctaagatatgcctcagccttggtagagttatttgggagtggaatccgcattttttgtgcccagtgggtttgggtttaccccaaaaaaacttaggttcctttaatcacagtcattcttgttctcattctccaattggttcctcataagactcagagagagctttcagtggtcttaagtttctgttgtatagaaatgctgtggtacagcctgtcctgtggttcggggtcatttatatttaatcttttcaggctcccccaagttaatgtgatcaatttttttttgcacagttaaaattagttactgatggataaacaattttatgattagttattgtcagcatgtatttatgtgtccagtacgtattgtggcagcctgccaatgtaatgtaaggagaaaatagattaagtaatcaggagatctggggttaaagccctaggtttactacctgagaagtcttgtacaaattatttaaggaggctgtagggaaggttaatgtcctttattggagcatttactgtgtcatgtctttacatgtgttatttcatttattacttataagagtcctttacagtagcatgtaatttccccatagagatactattttccaatttttggttgaagccagtgacaggtaaataattaaccaagatacc

SEQ ID NO: 531329 - DNA, 183 bp, Homo sapiens
cagtccatggatacttgcccagggaaggaaggagaacagccccatgtgcctgtcggtgctcctattacctaccacagaaatcccctgaaattaggtattccccaccaaatacacatacgctgacatccactaagcaagtgacttttaacaacaaaactgacattcagagggaaaggaatcatt

SEQ ID NO: 531330 - DNA, 305 bp, Homo sapiens
  misc_feature (131)..(131): n is a, c, g, or t
  misc_feature (151)..(152): n is a, c, g, or t
  misc_feature (170)..(170): n is a, c, g, or t
  misc_feature (195)..(196): n is a, c, g, or t
  misc_feature (234)..(234): n is a, c, g, or t
  misc_feature (268)..(268): n is a, c, g, or t
  misc_feature (280)..(280): n is a, c, g, or t
  misc_feature (304)..(304): n is a, c, g, or t
cctaaaactttacagcatctcttctcagttaaaaagtactctctactaaaaatatgaaaaaagtagctgggcatggtggctggcccctgtaatcccagctagcagagatggggtttctcccatgttggtcnaggccggtcttgaactcccnngacctcaggtgatccacnctgctcagcccctcccaaagtgttnnaggattacgggcgtgagccatctgcaccctgtctcacnattatatgagttctatgatgtttatgctgttgtntggaaaatcctnttgttatcacaaatctaccgtggng

SEQ ID NO: 531331 - DNA, 369 bp, Homo sapiens
  misc_feature (6)..(6): n is a, c, g, or t
  misc_feature (15)..(15): n is a, c, g, or t
  misc_feature (45)..(45): n is a, c, g, or t
  misc_feature (66)..(66): n is a, c, g, or t
  misc_feature (367)..(367): n is a, c, g, or t
ttgaanacccccaangatttaggggacaacagcagtggctaaggnaattcagccacagaaactgancgggaaatgccacttgtattggctgtaaagaaaatcctggctttgggccaggcacagtggctcaagcctgtaatcccagcactttaggaggttgaggcggatggatcacctgaggtcaggagtttgagaccagcctggccaacatggtgtaaccccgtctctactaaaaatacaaaaaaattagccaggcgtggtagcgggcacctgtaatcccagctactcaggaggctgaggcaggagaatcacttgaaccggggaggcagaggttgcagtgagctgagatcatgccactccactccancc

SEQ ID NO: 531332 - DNA, 158 bp, Homo sapiens
acgactttggaagctaagaccgtgtgacgcttggactgacttctgagagttcaagccaacctgccctgtggccttctcgtgactttgttacggacctgacggactcttgtgcctgccggacacttcggggactcctctacgacgtcgaccctgcaggc

SEQ ID NO: 531333 - DNA, 497 bp, Homo sapiens
accattctgacttcctgtaatgtgtgaataataaacctctgttggtttaaactactcttagttgggtttctgtccttggagaacaaacatgtaatgggtgtagtcctcctcccctggagtgactgggtcaggagcaagataagaaggggaaagaaaaagaagagtctggttaacagttactctgaccctgtaggaactctgtcccataatttggaaatcaaattatagccgtgtcttatttttccaacctaaatttttaagactgcagataagtactgcatcccataatacacagtataatgtcctgtagttctctctctctctttatcttctttcttcttcctttccagactggaaaaaaaaaattttgtttataatagattgtgtatgtcatgtgttgtgatagattatcaagatgatagaggtagctcctgcctaagagaatttccagcttagtagaagagacaagcaaaataataaacatacatatgatatgt

SEQ ID NO: 531334 - DNA, 150 bp, Homo sapiens
cagctctcagctcaagggcaaatggacacagctttgtgaacctgatcaacaaggggtgggggaacttccttgcggagggactctattcccattctgggcactgttggctctggggctcttggagtgtacaaggacacattcttgggggct

SEQ ID NO: 531335 - DNA, 86 bp, Homo sapiens
acatctgtatatttctgcgcacatgaagagcgccgagctcctacaatgagcagttcttcgggccagggacacggctcaccgtgcta

SEQ ID NO: 531336 - DNA, 146 bp, Homo sapiens
tgcgaattgttgaacgtgagcctgaagctaaacaggcaacatctgcaaaacaacagcatgtggttgtccaaccatgttccatttggcatggcacttggcaaggcactaaagcatgcatatccatccatattgtgcaacattggcag

SEQ ID NO: 531337 - DNA, 155 bp, Homo sapiens
agcagggtaggcagcattgtcctttagagactttactcaagtcatactttatacacaaagaacgagcaaaggggggaaaaaagccaaagtccaatttttaacatgcaatgtatattccctggggatgggacagaaaaataaacagtttaaaataa

SEQ ID NO: 531338 - DNA, 545 bp, Homo sapiens
ctcttgagtatcccgcttgtaccctcttctacctctggtgctgaactacagcggaagagaatctctggattccatttctgcattcttcagtgctctgaaggacatctgaagtccatcactcgggccatatagatacggagtgaaccatgaagctgactgcctcctcctctcagcctggacacgggcagttcatcccagctgtcctgcagcctaaactctgatagctgcttactccaagagaatggctcccagagtccagaccattgtgaggagcccatgtcctgtgactcagacctgggcacagcaaatgctgaggactcagaccggtctctgcaagaggtattgttggaattcagcacagcccatgtaaactctgtgccaagcaacggactgagcccagaaacggagatccccatagcacagggctcgctctccctccatgggctcaacaccagcacataccttcactgtgaggcacctgcagagccccttacttgccagggagactctggaactcaagatggtgtccaccgtgcaggagccgc

SEQ ID NO: 531339 - DNA, 893 bp, Homo sapiens
gttaatgttttgtgcactgggattgacttcaatggcgcacaagttctccaacttttccgaatttccaaggagagtaacccgttagagaacccttgagagtcccttgggcacatttcaggcattcgtggaagagtccttgaacaaggtccagccagtagcctgccctggaaaatgggtccactgccacgtgtgttctggctgtagacaacacttcttgatagtgcccacctcggagatagtcggcccatcttgggtcgttataatgaggagagtccaaaaccagcagcctttaagcctccacgccaagagccataatcccactccagtatgaagacccggattgaggatcccagaaggcttggaggaaacctccgggatgggcgtgttttgggcgtgcttagaggtttccaccgcgtcccattggggacgggccagtaccagcgcttgccggtttccaactcttgtgccccgaccatccagactgctgcccagcgtgacccctccatgaccaggttcattttgttggcctgtgatgggctcttccaaggtctttacccccgaagaagcccgtgaacttcatcttgtcctgtttccgaggatgaaaagatccagaccccgggaagggaagtccccagccgacgcccgctacgaagcagcctgcaaccacggctggcccacccaggcggtgcacgccggggctcggccgacacacgtcacctgtgatgtgtggtcgcggatatgggcacctgaaggggtggcgcgccggcccacggagcaccgcactggtattgaacttaaaaggttcacttttgtgtgtgtgcacccttgtgtgttttgtgtaactcctgtgggactcccctggttgtaaataaaggtttctcttttttttccta

SEQ ID NO: 531340 - DNA, 137 bp, Homo sapiens
gatctagtgacttctgtctaagctagataatgttggggccaagatgagatgcctgggcctctggagccctgacttagggtggttctgctccaggccgagctgagctgcatgttcagccagggctgaaagggggagcc

SEQ ID NO: 531341 - DNA, 216 bp, Homo sapiens
atggccgttatgcgccgacagggacggggcaagtgtcggtggacaatcgtacggctaggacgctccgtagtctccgacgagaccagaagtggcatgataaacagatataagaacgctcatttgggcacagccctaaaggccaaccctttgggaggtgcttctcatgccaaaaggaatcgtgctggcaaaaagtcacggagtctgaagcccaaacga

SEQ ID NO: 531342 - DNA, 166 bp, Homo sapiens
gattcagtctttctgtaacctgctgctgcttttagtcctcctcactcagatcggattcaatggagtgggcccagaggatacattttaattccagtaatggtaggtagattgtcctgcttctaaacactcctcatttatatttccactcatattgattcctagggaa

SEQ ID NO: 531343 - DNA, 400 bp, Homo sapiens
ctcagatcacatggcactctatcaacctgtgtccccatgttccctgcttttttgtttgtttttttgaggtggagtctcactctttggcccaggctggagtgcagtgatgcgacctcggctgactgcaacctctacctcccgggttcaaacaattgtcttgtctcagcctcccaagtagctgggattacaggtgtgcaccaccatgcctggctaatttttggtggagatggggtttcaccatgttggcctggatggtctcgaactcctgacctcagatgatccacctgccttggcctcccaaagtgctgggattacaggcatgagccaccacacccggccatctcctgcctttttttttggatggagtttcactcttgttgccgaggctggaatgtggaat

SEQ ID NO: 531344 - DNA, 205 bp, Homo sapiens
ctgttgcgatcctggtgtcctgcctttctccaagggcatgactgacttcttgcagtgcaacacatgacatgccccctccaccacccactcgcatctcagacgtggccaagagcagcaaattgcgcccagaggatcccattgtgagctggttctggaggtgagacagaagttgtgacgaatgaagaggcagtgtgaagtgtctgaa

SEQ ID NO: 531345 - DNA, 180 bp, Homo sapiens
acgagaggcggggggatatccctttccgaaacatatatacacacagttatcatgcaaatagatatctagccaaagatgggtccatagcctaatacccagatcctgtgaatgtacacttatttggaaaaacagtctttgcatatgttattaaggattttgagatgagattatacataggcc

SEQ ID NO: 531346 - DNA, 114 bp, Homo sapiens
aaatagttggttagcaggcaagacccagagttttagattcagattagggcttactcgctgaactttggaaacatccaattctgtgttccccagaaaatggtttaggccctacca

SEQ ID NO: 531347 - DNA, 1313 bp, Homo sapiens
  misc_feature (481)..(481): n is a, c, g, or t
  misc_feature (573)..(573): n is a, c, g, or t
gaagtatacataacattctaaaactgtttatattgtccatttaagaccgggaaaattcaaaactacatttattagtggatatgacaacgaatttatttcatagtttttaaaaaatgaagctcattactggaaatttaagtgaaattgaatttttcaaaggcatcttctgcagagtcgttttaatgtaactatgaatcaaactttcaactttcagaaaatgtgtatacagcataacctttgttaggtaacttgagaaaattcagatgtatctgggcggttaaggatccggttagaaatcatgtttcagtgtgagggcaaataaccgatttgaacatgaggtatttccggggaaacgctttttttgcccgatagtagtttgtcaaaagttaaaatcttgttgaattttaaacttgtttggaaggtgtgtcctgatttttttttcttgcatctttcttgagcttggatacttctttccatgttntatcctaaaaacgtggtattggatacacgccttttaagacttggtggcgaaacttaaagatgcttcgaaaagcctggaaagagcaactcagntgtaacttggcgaaagtaacgatccgccccagtgcgtaggaaaccagaaccgctttgccttagctgaaccacggtttgggcaactgatggcccttttagtgggaatttccttctgaattatcccatcataaattttgcccttttaaacccgtggaaaggttagacgggaagatacttcccaggttttaaactgttcacccgccctgtcctttacccaattgaactttcttaggtttctgaaggtattgcccgcttcccccctgtgataaactcgtcttgcttcaccacaatcttccctttctcctatacacgctgagccgttcgcctccacgctcttaactcgaaccgtatacttcgccccactctcgacctttgccccttccgctttcccgccggtccttcctcgtcctctttatacgcctctgcttacactcgcgcgcccctctattatgctccgtcgactccctctccctcgtccctcatactctctacccctccgtcccctctttgtctccaccgcctgcctctcgtaatccgtgcccttttctctcccctcatctccgctgcatctctctctccactttgtgctcgagtctcttatcctcctgtctccctcctgtccgttccttacgcgacatactctcctctcatctactgtgcgtctgctcctctactcagccgtcctacttccacttacgtcgactcctacatgcatctctcgcgctatatatctaccgccc

SEQ ID NO: 531348 - DNA, 104 bp, Homo sapiens
gtggggtatctaaattttttttgctgaaatacattttggtcaatcaagccaagcctgcctttacagaatttgtttttttttcaaataaattagttgttttctta

SEQ ID NO: 531349 - DNA, 1158 bp, Homo sapiens
  misc_feature (656)..(656): n is a, c, g, or t
  misc_feature (769)..(769): n is a, c, g, or t
  misc_feature (898)..(898): n is a, c, g, or t
taatcccaaaaatttgacccattccctggcctgtaacctttttggttttatccctttctcccattggttccttcccattttaatacccttggtgttattaacctttggcttttttaagaaagccttttaccccatttatttttttaaaacatttccaagaaacctggttgaacgtactctggggattgtgtagaagtgattaaaactcttagaaaaattgcgcagattgtgtgagacggagatatataaggtgaatcctggtgcgcttaaatactcttaatggcgaaggagtattgtgtctctattaaagcgcaattgagattttaacccaggttattgttcacatcccttaaaagaaaaaatctctaaatattgagaccccaatgtgtgagaacgggagtataactctcccaaggcgaagtgatatctcttcctctatttgtgtgaaaaccctctgtgttatatctcacacgggaagaatataactcctaagtggagtaatttcctcttctctaaaaatatagaggagtattgtgtcaaaaaactctttctcttttcacaaatatttaactctctctgtcctctacaaaatgtcccctctgcgctgttgcgccacaaaagagactcttcccaatgtgtgtgttcacctcgtgcgngcgaattatacaatatataacccttcttttccccccccagagctgtatatcttttggcgcgccaggtgtcattgtgtgtgtgtgtaaataccctccagagatattacaccccnggtgtgcgccttctcgacgatctttttggatttttgcgcaccactcttggtcaacacacggcggcggtaatcccctatcttaaccttgtcgtgttcaccaccctctttcttctaaatgcacaccccagngcgctccttaaaaggggcagacgtgcgcccaaggtcttctctttacagagagaaacacccacgattgtagtgtggtctctccctttaaacctctattttctccccgagattactcttgggtcccaacacacaaagcacacacggcgtgtgtccggcgcgcctcccccggtattagggttccctctgcgtcccccgaggtaatatatatacggttcccaaacgcccagcttttttgggttcccccgtgtgtggagaacccc

SEQ ID NO: 531350 - DNA, 1162 bp, Homo sapiens
  misc_feature (252)..(252): n is a, c, g, or t
ggtgagcgcctggggaccgcagaggtgagagtcgcgcccgggagtccgacgcctgacgccaggatggtaggtcgtgaacatgccttggaacaccacctgacatggagttctactataccgtgtgtgcagctgccaggatcgggtggcagagctggaaggtgatgcccaaggagtggaccatggtgggccgagcctccgctgctgtgcctcggggcggggataggtagctcgctgtggctcggactctagggnacttgtagcggtgaccggtgcccggatcctgggtgcaatgggtgcgtcggaggatctagggtctgaagccctggcgatgttccctggttgccctttgcttcgacgaccgttgcccctctgctacggggcaccgggggatggtactgcgtgtgcgtcgctgagtcgtgagcccttgtctccctgtccccccgcgataggcctggcacgtggtgtccactgaaggcgacattttgtgccgttgggtatcaccgggtggttttgccggctccgccgtttctcggtcgcgccttcgcggtgtacgacatcctgggtgcgttaacgcgggattagtattaaaagaccgaacgtgggtttaaccagcatactggaagggctaaaatgtcgtggtcgtgggatatagcgccgtgggaaggcaagggaccggaagggtggaggggcaaacaccaggaagcaataagggccgccgcacaattaggaaacttttatctgccagagtacttaaggaatgcgaccacagttgacgacggtgtacggttcttcctcgtgacatctgagagtggtcactcgacgtggcacatccccagagctcttgaaccccaaaacgaacttatccccgttaggggctattgtcttccccgaacttttcacggtgggctctggtgtggcaacaaagttatgttcaagtaaccgtcggggggagacgtgtgcattggattacatggaagaaatctgatctaaaatggttccacgacatgacgaaagagttggcgaatggggggggagacaacatagaaggaggtcagatgggaggtttaaaaggggagggaggtgggtgggggaagaggaactgcaaaaaaatggggggtttgaaaaagaaatttatggatagtgagggagaagagagcaggga

SEQ ID NO: 531351 - DNA, 454 bp, Homo sapiens
  misc_feature (183)..(183): n is a, c, g, or t
  misc_feature (272)..(272): n is a, c, g, or t
gagcggtctagccacagcaacgccagatccaagccacgttgcaacctacaccacagctcaccgcaacgccggatccttaacccactgagtgaggccagggattgaatctgcaacctcatggttcctagtctgattatttctgctgtgccaagacaggaactccagcaacattgctttttaaantgaagcaatattccagagcatttttcctctttttggctgaactcacagcatgtgaaagtcccaagccagggatcgaaactgcatcgcanaaacgacctgagccacagcagtgacaatgctactttcttaacctgctgggccaccagggaactcttccatctcagtcttttaatttcaactgcttgtcttacttggatccctaaataaaatcccacccctcgttagctcccagcagccgctcttaccgggtataagctcgagttctatatga

SEQ ID NO: 531352 - DNA, 263 bp, Homo sapiens
cccctagtggctagggcttggaccgcacaatctacagctcattctgactggctatctgaaagagagcagggtataagccagagtggtggggtgagaagtttagacaggaaagatggttacgggaccaggtaactaaaggtgactcaggtcagagcaggtgacagaggctaggaggggcttgtttcactgaaactagtgggcaagtgagactataaagaatgcaggaaagttaaaagttacaaatgcaagaaccaaagcaacag

SEQ ID NO: 531353 - DNA, 439 bp, Homo sapiens
  misc_feature (188)..(188): n is a, c, g, or t
  misc_feature (220)..(220): n is a, c, g, or t
  misc_feature (294)..(294): n is a, c, g, or t
  misc_feature (298)..(298): n is a, c, g, or t
  misc_feature (375)..(375): n is a, c, g, or t
  misc_feature (382)..(382): n is a, c, g, or t
  misc_feature (393)..(393): n is a, c, g, or t
  misc_feature (417)..(417): n is a, c, g, or t
  misc_feature (428)..(428): n is a, c, g, or t
gcaaattgcaagaattacgccttttcacctcctctgctctcctcccggagccggtgcccaccctctttttcacaaaccgcagggctggggagagggacttaacctttggcctacctgcctggctgtttggctctgcgcttgctgtttttggtttctttatcttctataggtctttactttgttcttgnccacccactaagacggtgttttatcactatgntctacctttcaccctaagggaaaggatacggacgagaaatggaaaactcactgtcttactttaaccccaagggnaggnacataaggtgctcaggattctcacagacgtcacatctactggtacagggcgatctgctgcagctctccactcaaggnagcattnccatatacctnaagaagatgaaattttcatcgagnccacgtagttncattgggatgc

SEQ ID NO: 531354 - DNA, 250 bp, Homo sapiens
gagccggaccgctagcggattagtgaacgcatcttgtgtaaacacacgagagtcacacccagtagggggccaggtatgtccttcaccccaagccaaactttggtaaatgaaataaatcacttatttcagaggcctgaggcatatattctccttcaagttttataccactttaatcttctattttggatttactccattctgagtcttaattttcttgactaatggaaacgttcacttaatgccgctagcg

SEQ ID NO: 531355 - DNA, 956 bp, Homo sapiens
caaaatgcagagtctgtttcaaaaattttggaggaccctcccccgtaaaaaagattcgtgaatcccagtttgagaacgcagtgctcataaatcctccatgatggcatgctacatgggaagggacagggtgctgcttgtagaaatcccgtctcaacgttgtcttgtgtcgttaacacccaggagataccaatccccgtggaggacttacgctagtactagttcgagtaacagacatggtgggcagcagatcagtatacgtgtactctacgaaagagagcacggcacctgtatggatcacgataaacgaggcagtgttgagcgctcagctattcaacgattacactcgcgtctcacgagctctggaatcacgtcttctactagaagctctcatacgcacttgtgtttccttgtctttaataatgagatacacgtgaatagtcatcctcttcacgtttcctggcagtgtgagagagcaaccaaagtgggatacatgcatgttgaacgtgttttggtaaggctaagactccatggaagctctattgtgtgaattcggaggctgtagacaaagtgtttccctatatcttgagggtatgatacataaacgtgggctgtatgcagtggtgtgcgggtaatgttaacaacggctctggcaggacgggggagtgggagacagaacaccggtaggatcaggcccgccaaagtcctgtgggtataaactaccaccaggtgtgtgcaggggatgggcctggtaatcccagcgcatgggggaggacacaggcggaggctcgcttcaaggccaaaaggtcaagaccagcgggcaaaaacgcagacccatattacaaacatttaccagtaagccgacattgggggagccatatgcacgaaccagaggcggggcgaaaaggctaggcacgaggccgtggaaaaaggaacaccgttccatgaaacgacattga

SEQ ID NO: 531356 - DNA, 213 bp, Homo sapiens
gagaaagaagagaagaagaaagaaagaaagaaagaaaaagaaagaaagaaaagaaagaaagaagaaagaaaagaaaagaaaaagaaaatagtgaaaacgtcctctcacaggcttcattgccattcctcacaaatgtagccatttttatcagagttattttcatatctttatagtaccttcctctctttctactttctttcaaagacaagcgaa

SEQ ID NO: 531357 - DNA, 538 bp, Homo sapiens
  misc_feature (22)..(22): n is a, c, g, or t
  misc_feature (64)..(64): n is a, c, g, or t
  misc_feature (83)..(83): n is a, c, g, or t
  misc_feature (86)..(86): n is a, c, g, or t
  misc_feature (90)..(90): n is a, c, g, or t
  misc_feature (122)..(122): n is a, c, g, or t
  misc_feature (125)..(129): n is a, c, g, or t
tgagggcggggcagagggagcntgacggggagagtgaggaggaaagaggaaaggaaggccaggntgggaggaaggatcagttnttnttgngggaagaagaaggaaaggagagggactattgnttnnnnnatgcaaatgaagggacttggggctagttcaggaaggaaagggaaagggaaggaaggcaagaaaagaggggttgaagggaaccttcaggaagggggtgtttaaggacaaccggaaaaatcatctagttaataaacctacaaacagcaccaaatttttttcatattatattatgtttaaattaacagcgtggctatttacagggggacacacacacggacacacacacacacggattccaggggagcggggggctgaaagatttggctgaaacggtggaggaccggcttgagggttgggggacaaaggcccttctctaggcagggcagactcctcggggattaaagtgctgaagttacactatgatgatgatgaggatgatggcgcaaattattcccaagatgatcatcat

SEQ ID NO: 531358 - DNA, 906 bp, Homo sapiens
cagcacagtcatttcatccccggtgcattccccaaaagcaaaaccaaagctcagcatgtgcttctagaactttctatatctggtgtcaggggtgggtggggtgcaaagggcaggccagcacagtcatttcatccccggtctgttccccaaaagcaaacgcaggagctcggatgtgttctagaattttacaatctgtgaatcaggttcaaaataactcacattccactataaggaggctcagaggatgccaccgagtgacgggacgtgagcaggatcacagagacaaccagtggaacacgcaaaatgttcccacgatgttagcaggggaacagagtcggccgaaaaatggcgaaggtgtgggcacaaaagaagcaccaaaaattgacacaaccaaaggccagtaaaagacaacctcgtaaggaaagaccactattcctccccaaaatctatctttaagggaggctaagtggtggtacactctgactttcctggaggttctacacgtagtacaagggtccaatcctcaatcgttatgatacaaactcaggaaaacaccgggtagaccctagtactcccgcattatacaacgcatttcggccggcacggggttcacgcctggtatccagcatgtgtaggccgaaggcggagaccttcgagtagacagtcgaaccagctgtcacatgggaccctgtctctataacacacaacacacacaacacaacagtgggcctgcgcccgaaagttaaccatgtgggcgggccccaaatgagcacggcagggtcaagacacggcagcagggggttcaccaaacacggggacgggtgcaacacagggtcggcttcggtacacgacggcaacacgcgcggggacaagacaccaaacacacaacgacgggagagcacgcac

SEQ ID NO: 531359 - DNA, 431 bp, Homo sapiens
tagatctgctatttataattaaccacaccggtatataggtttaggttatgtcctgagctgctcacacggccataaggtagagttggaacatgagtactgactgtgtgtgaggaagaccagtgagcatggtagaagtactgctgcccaaagttaagcaaataggtaagtgccataacccaaaacactaagatcctgtgaaggattatataaaacacaacaaggggacagtgggacagggagatggggtacagggaaagtggtaggccaacttctctgttggttgtcccctgagtgggaaagacacattctgtcttcgagatgagatttaattcaatgtaagacacacagcaaaacaaaggtaaggtgagtgaaaatgggcttacatttaaaattagatatcggtaaggatttagcattagaaaaacagggag

SEQ ID NO: 531360 - DNA, 143 bp, Homo sapiens
gggaagagcattggtagctgggactgtgtctgagggtcaggagcaggcaagggcatggggttgtggtctgagggggacttggttacagtgtggcattgcaggaggccagggggtggggtaagcagtgtccagcagagacctgg

SEQ ID NO: 531361 - DNA, 321 bp, Homo sapiens
gattgggggtaataaacccggacggaggcggaaaatataaaaaaaaaaaaaaaaaagaaaaagagagagaaaaaaggcctccttttgtttttttgaaaaaaaaaaggagagaagcaaaaagaaaggaaacaaaaaccgggggggggcttggtttctttttccccaaaagggaaaacaaaaaaaaccccccccccgggggggggggggggtttcccccgggggggccattaaaattttttttttggcccccccccccccggggggggggggtttttaaaaaaccccccggggggccaagtggggggggggggggggttttta

SEQ ID NO: 531362 - DNA, 140 bp, Homo sapiens
cggcgcgaggggtcctgccatctcacgatggcagttcagtgtatcaagctgactttcatgggtgttttcatgacttcttctgaggcctccctctggaatattggatggtaactccagagggaggcctcagaggaggccta

SEQ ID NO: 531363 - DNA, 451 bp, Homo sapiens
aattaatagctcacacgagctaagatacagctagatccattaagaggtcagtagatatactcattgcccttctaagaactaagaatctgtccttgtggcttggaaaagaacatactaaacaggggatactgcgttgtgatcactgtaacccattctaaggataacctactgtttgaaattaagaactgggaactgagaacagtcagaccgaaaattagtctcttttcagacgccgaatagtgaagagtgaatagaagtcctgtgccaatcaagtctctgcatcgttgttataccagatcatacataaaggctgtctctcgtgagatcgatagctattacttgcaccgttccacatgcggctgtgttatatcgtggtcagggcaaacccacctgactaaatgcatgcctaaggggatgaatagtggacttgtaatatctaaatttcactctt

SEQ ID NO: 531364 - DNA, 478 bp, Homo sapiens
aaaattctgaagattgtgtggtgatctgcgaaagagataaataattgccgttattttcacccaagtgaaacaatgacggcagcagcatattatccagaaatttaaattatgcacgaaaatgtgatttaaaaacaatgtcctttgggttacacaccagaacctacacttttacagagaaggactcgcccccacatgtcacaagtttttaaagcaaagataagagacgtgggcgatgaaattttgtcatgtccattttagtcactggacctttattccacgggccaccgtctctcatttggagggtttttttagaaacaaccctgctttccccagtcgagataaagtatctggaagatgttaacaatttatacagcctaacaagtgaggaattttataaaagttagccctttaatattcggttggaagaaaactattcaggctcctgaggcatattttgattgaataaaccttatttttt

SEQ ID NO: 531365 - DNA, 283 bp, Homo sapiens
tctggatcaagtgtctcatcttgcatggatggaagccaatactcagaaggaaataacagctctgaaactctgtgaaggacaccccaatattgtgaagttgcatgaagtttttcatgatcaggtatcctactttttttttttcccccatgtttcctattcccttaaccggggttggatattttcaacgcgttagggtgggtgcggcggggctacagtcggggcatatacacgatcacccagccaccacaaggggcagtgaacccaccctcgtaaaccccttccc

SEQ ID NO: 531366 - DNA, 224 bp, Homo sapiens
atacatgtaaccacatcggaatctcaaaaatacaatgttgaatgaaagcagggcccgtgtatggtcctgtttatatgacgttcaagactttttagagaattgaaaagcactgcgtcttgattcaaggattagtgatcacatgggcatataaatgtacccaaactcattgaattgtacacttcagatctctgcattttgctctatgtaaatttcgcctcaaatta

SEQ ID NO: 531367 - DNA, 312 bp, Homo sapiens
ggctcataggtcgccagtggataccatgatcatcactttatagggcttgttgtctaggtaaatagtacgaaattagcttggcaaacttatatatgttcagtgaataagaacttacatatgttcatgaagtagaattgttttgatattcttatgacttaaaatatttttctgaaaaagtatatatagcctttgagtttttttactgaagtactgtagatactaagagttgatattttgtttaaaatatatttttattgagcaaataatatttggaaaattttgatgtaagttggactttattatgataagtag

SEQ ID NO: 531368 - DNA, 374 bp, Homo sapiens
  misc_feature (42)..(42): n is a, c, g, or t
  misc_feature (125)..(125): n is a, c, g, or t
  misc_feature (155)..(155): n is a, c, g, or t
  misc_feature (315)..(315): n is a, c, g, or t
acttgctccaactccccccaaaacccaccctccaattggtangtccctgcagggggtccccgtaagcttattttgaaacgttgctaggatgggctgggcagctggctcacgcatgtaatgccagnactttgggaggccgaggcaggcagattacntgaggtcaggagtttgtgaccagcctggaggctttggcaaaaccccatctctactaaaaatacaaaaatgagctggccacggtgaaacctacctgtaatcccagctattcaggaggctgaggcaggagaattgcttgaacccaggaggcgggaggttgancgtgaagctgcaggttgcatgtgagctgatggtcgcgccactggactccagcctgggcg

SEQ ID NO: 531369 - DNA, 666 bp, Homo sapiens
  misc_feature (202)..(202): n is a, c, g, or t
gcgtgatcataagaccgaattgacgtattagtggacgcagtggtccgagatcaggtcaagtgcaacgatggtccataatgcgtagtatctcacttaggtagcatcacttgggccttggacgtggatatgcttcggtattgcatcgacctacttaaggaaacgagcactcggccgaggaacgcacgaagcagtctcttgaatngagatccaagtgataggcaagtacatggagtgcgtcgatttacggggtgagtcttgatacaaactagacgagtgctcgaaacgcagagttgctgcaatatgctcaaagattatgcgcactccgggtcacattggagtggtcgacgcaggagcttgggctacatgtagacactcgatcgacgcgaaattccgcatcacggtgtagacattcttgtttcgtggactttggccccttgcaaactggctgaaacccccaaaggggcgctttaacggattcaagcgttccaatgggttggcgccttccccaacttccaaacacactagggcgccgcacacacgattgatctgctactataaacaacggtcgggattgcaccactccttgggcagctcccaaggaaaatttgggtcacaccacgataggccccgggataggctttggccacacggggggtacaggtcgga

SEQ ID NO: 531370 - DNA, 499 bp, Homo sapiens
  misc_feature (38)..(38): n is a, c, g, or t
  misc_feature (44)..(44): n is a, c, g, or t
  misc_feature (47)..(47): n is a, c, g, or t
  misc_feature (59)..(59): n is a, c, g, or t
  misc_feature (348)..(348): n is a, c, g, or t
  misc_feature (364)..(364): n is a, c, g, or t
cacaacactaatctgccatgatccagatacttgatgtnctaatnctncaacaattgagnagagtgcatacaagcccttttcaaattgtcggcgcttagtctgcgctgtgataaccccaactgcttgtatctcatcgcaacacctgacacgttaccagcgaaagagctatctgacacgtcaggtgttcgtgataggctgtgaatatctttgtacaggcggttcttgtatgcttcaacaccagccgtgtcatactctttatgaatgaagccagcgtctactgatgtttgtccgttcacagcattattaccagacttcaacaacaacatacgtgctgacttcaactcacgnaacattgtcatttttnactctgtttgttctttgagttgttcaatgtagtcagggttattcggatctaacatcaagttggcgccgtccattaagtcgtcaatatcgcccttattactacattgcgtcattcaagcagtcaatgtaattggct

SEQ ID NO: 531371 - DNA, 746 bp, Homo sapiens
gtggggtgagcttgtttgtgtccctgtggtgtggactgtggttggttgattggcagtgatcctggtatccgataacatggtcaaaatgcagatcttcgggaaacaccgcttaccggaaagaccatcaaccttgaggtggagcccagtgacagcgatcgaagatatgtgaaggcatggatccagtgatgaaggaagggcattgccacacgagcagacagaggctcatctttgctggcaagcagtggcacagagggccgcaggtcgtttctgaactaacaatcatccagaagggagtcgaccctgcacctggatacctgcgatctgagagggtggctatgcagaatcattcgtgaagaccctgagccatgatacgttggtgacggtcaagaggcgtatcgcctacacttgacttgatcctatcagtgactagcaaagacctaccatggcctgctgttcgatgtgagatgagtgagaatagaaacctgggggtgactgttctggtctagtcgctgagcaagccagagcacacgaaccctcaggggggaacacagggggcggcagtcccctaccggcgagctcctccgagagggattggctgacagttccacaacgttcgagactggtcggtgtagaaccagaatcgggcaaaaaagggagtaaagctgttacgacccctagggctgcaaggctagtagcacacacgacaccgagacaacacagaggaaggtggggacacactaagcagg

SEQ ID NO: 531372 - DNA, 178 bp, Homo sapiens
tgcgtctctaatgagcgtggtgtgtactcgtaggatgcatttggatgacatatggggataaaatttagagaggtcgtttagaacagggaattcaacatgatcggctattattgtgtcttcgttttctcatttaaaaaaattacagaggccgggtgtggtggctcacacctgtaattcc

SEQ ID NO: 531373 - DNA, 547 bp, Homo sapiens
  misc_feature (371)..(371): n is a, c, g, or t
  misc_feature (425)..(425): n is a, c, g, or t
ggacccgccaacatgggccgcgtgcgcaccgaaaaccgtgaatgaaggtcggcccgggtcagtcatagaataagtaactacacgcgccagggcacacgatttccacacgaacaagcgcggtggtgcgtaggagagtcgccatatagtccccagacaaaaaggctccgactaacaagattagcaggttatgctcacgcactctgatgaagcgaattcagtagcaggcccagtaagaggtatctcctatcaacgctgtcaggaggtaggcgagagaaaggagagactgattatgttgccgtgagggtctcagcccttggatcgggagaattatggagggtagagtcctgacatgctaaggaaaatgctgaagncttttggaacttgcggcagtctgtgccaaccttcaggtcatctcagcctacagnttgggatgaagtttctaatagacgcgctcggggacctgtatgaagtgtttgtctgtacgtgctggtattgatttgcaagtaacatctggggacaaccagcaaagaaaaaaagaaatgaaaag

SEQ ID NO: 531374 - DNA, 110 bp, Homo sapiens
caggatcagggagacagatctggtgagtgtggtggcactggagggaaacacaacggctgatccagatgaagtcccacagcaagggaagtcaagcattgcatatgcgaccg

SEQ ID NO: 531375 - DNA, 236 bp, Homo sapiens
  misc_feature (20)..(20): n is a, c, g, or t
  misc_feature (98)..(98): n is a, c, g, or t
cccatgttgtggccacgganccaaggctggggcctttgatcctcaggactgctgtactggagtcccatgacggcccttccctcagagcccggtgctgnacattatcatcacctactttgacaccccagctgttgaagtggctgaaaggaagagtgaaggaaagtgaaggacttggtcttgacagagctccctgggcccttacagaaggggaaaagtaaaggcgctgttagaactgt

SEQ ID NO: 531376 - DNA, 147 bp, Homo sapiens
  misc_feature (28)..(28): n is a, c, g, or t
  misc_feature (32)..(32): n is a, c, g, or t
  misc_feature (124)..(124): n is a, c, g, or t
acatgtttcaagctatgtaaatttatcnttcngtttaagcattaatatttgattagccagagttacagttcataaagcatatgtaaatatggagttatgtggcattttctgaaatattttaccntattgtattacactatcccaaag

SEQ ID NO: 531377 - DNA, 241 bp, Homo sapiens
ggccaaggtgggctgatcacttgagtccagaagttcaagaccagcctgggcaacatggtgaaaccccacttctaccgaaaatacaaaaatttgccaggcatgatggcacctgcctatagtcccagctcctttcagggggctgaggcaggaggattgttcaagcccagaagttgaggctacggtgagccaagattgcaccattacagtccagcttaggtgacaaagtgagaccctgtctcca

SEQ ID NO: 531378 - DNA, 140 bp, Homo sapiens
gaatttgtaaaccccgagcgaggtctgctaccgaggcgctgctgtgccggagaccccggtgaagcaccgtcatcatgtctgaccaggaggcaaaaccttcactgaggcttggggataagaggaggtgatatattaactca

SEQ ID NO: 531379 - DNA, 597 bp, Homo sapiens
  misc_feature (427)..(427): n is a, c, g, or t
  misc_feature (505)..(505): n is a, c, g, or t
  misc_feature (532)..(532): n is a, c, g, or t
  misc_feature (567)..(567): n is a, c, g, or t
  misc_feature (595)..(595): n is a, c, g, or t
gttccaaatattgcacagggcatatgtatactaaaaaagtattcattggtgatttgaaatacaaatttaactggacatcctgtatttttatctgctaaatttggcaaccctacatatattcccaggagcctctctttgctctctaggctctcctagttgaagattgcctgtaatgttgtttctcatctagcccagacacaggactctgacttaaggaagccaggctggtgactcatctaagtgggaaatttacttgctgactcaagaggacatagttcttggcaaacttttgccttagaataaaccaaaagggaaaaaaatatattagcaaacgttaaataccggagaattgtttaaaacactttaacttaagggcaacggccaattaattggatattttctttcaagtgattaaatgaagatttcnggggttcctcttttaccatagcttggcctaaaaagggatttttgattagagcaaaaagtttatttaaatatgatgtanagaagaataagattgatttgaatcaanttggtaccagagtttaaattcaacgcttactttangagggactgggtgctgacttgccctggngg

SEQ ID NO: 531380 - DNA, 290 bp, Homo sapiens
  misc_feature (155)..(155): n is a, c, g, or t
  misc_feature (185)..(185): n is a, c, g, or t
  misc_feature (194)..(194): n is a, c, g, or t
  misc_feature (246)..(246): n is a, c, g, or t
ggcaatgggctgaactgtaatgaaaatgttatttaatctttgtctctggattttgaaacctgaaagactttcccctttgttttactggaaataaaattgttaatctgtctgattttgtttgaattataaaccctttgagggacccaacataaccnatttgtgcaacaacatagactgacctcagnacccaaaanagtgtaaatatttttgggcttccagctttggttttgttattttcataactgnaccaacttagaacagactgaattaataaatgagaagcgccatga

SEQ ID NO: 531381 - DNA, 521 bp, Homo sapiens
tcgaggctgaaccagttctggtccccactcccactgttcccctcagcgccaaagttcattgtataattctgtgcttgtgtgtcctcatagcgtatttcccgagatatcagtgagaacatatgatgtttggttttccattcctgagttacttcacttagaataacagtctccagtctcatccaggtcattgcaaatgctgttaattcattatgtgagctggtctgtaattataagaatatttttttgggaattttattgttccataagctatgggggtacacatggtgttgggttagatgagtaagttcttaagtggtgatccgtgagatccctggtgcacccatcatccaagcaggatacacttcaccatataagtcgtcttttatccctccccactcgttgattgatgggcatttcacttggttctatgatttttcagttgtgaatggtgctgctagaaacatgtatgtgcaagtatctttttcaaataattactagtttttcttggatagatacccagt

SEQ ID NO: 531382 - DNA, 160 bp, Homo sapiens
tcaaagatcatttgaacaatatacaatatgtagtagcattcatcatcatataatcgtattagtcataatatactaggacaagataaaaaagaacctcttttcataagtataagtgtctttatagtgcaccaagcagactttaaataacttacaaaagcaa

SEQ ID NO: 531383 - DNA, 1887 bp, Homo sapiens
gactggggaaacgggagggctcactgagaaccatcccggtaacccgaatcaccggtggtcaccatgaaccacattgtgcaaaccttctctcctgtcaacagcggccagcctcccaactacgagatgctcaaggagcgagcaggaagtggactatgctgaagggtgacccacaaaacctggcatcccacgatgtccacgcgtgatccacatccgcagacgagacctccgttgcactgaccatgtggtctggtccctgctgcaacaacctcttcatgaacacctgagtgccatggggattcatagcattcgcgtattccgtgaagatctagaggacaggaagactggttgagcgacgatgaatcgagggcccaggactatgccttgcaacgatcaaatgcctgacacagtctgggacaatgaatttcgggccatcttcagtgacctattgctgccgtcatcatacatcccaagctgattggtcgtcagtgcccagcgatagatcaggaggcatcatgaggccacggagctctgccgtgacctgaattccacgtactctatcttacattactcggcctgccccacgaggcaggagcctctggactatggcacatgtatgccagttactcaaccttcaattcttggacctgtcctcagcgagtctgattagccttattttgacggcatataaagataataagggtttggtctgcaacaaaaacgacaacatctcggcacaccgaagagctaaacataggagggcgcaagacacacgatatacagaagcgaaggtgatcaaaagccgcgcgcacaagtggttaggagaactcgcagacgagaaaagcaaccaaccgcacccaagccacgacagaccagcccaagcaacgacagaagcgggacaaaagagagagcgccgacaacaaacaagccgccaagcagcgacaaccaaggcagagagaacagcagcgaagccacagaaaacagagaaacacagcaaagaacagacaacaagaacaaagacaaaacaaacacaaacaaaagccaagaacgacaaacggaaacagacagatcgacagacgaggacgcgcacaaacgagcgagaacggggcaaggggagagagagagagcgaaagcaacagacacagacagacacacgaagaagagacaagcgagagagcagagacagcggcagaaaagagaagaggaaagacaaacaaggaaaagacagcacacacaagccgagcgaggagaaggaacagcagaagcagaatagagagcagcgagacgagaaggagccggcagagaaggacacagcgaggacaagccaagcaagaaggagcaggcacaccaggaagagaacaacgcaggagccagagagagaaaacagagagcgaagagcggacaagcagagcaggagcgaagaagcgaacgagaagggcgacacgagacgacagagagagcaagacgaggcagaccacgaagcgagagaagcacaagagaagacgaggagagaaagaagaagaggcgcgaggagccaacgagagcgacgacgagcggaccagcagaccaaacagcgacagccgacgaagccagcgaacgaacgcgagagaggaacaagagaagacgggagaagaggaaaagaacgcaaagagaaacaaaggaaacgaccacaacacgacaagaagaagagagcagacagagcaagaccacgccaagacacaggcgcgaggacaccacaacaacgggagaagggcagggaaagcgacagaacgggaggagcgacgaacgagaagcagaaggcgagagaggagggagaagaagccgagaaagacgaaacagaagcagaagacgaagacaaagacagagacgaggatgaggagcggagaccag

SEQ ID NO: 531384 - DNA, 595 bp, Homo sapiens
  misc_feature (30)..(30): n is a, c, g, or t
  misc_feature (243)..(243): n is a, c, g, or t
gacgaggatactcagaggctgggaagggtnagaaggaggaggcaatagggagagatttttaaaagtatacaaaattagagctagataggaggaataaattctagtgttctacagcaatgtaggataactacagttaacaataatatattacatagtttcaaatagtgagaaggaggatattgaatgttcacaatacaaagaaatgataaatgtttgagatgatggatatgctaattgctctgntctgatcaccatacattatatgtatcaaaacatcacgatgggcagggtgttgtggctcacgcccataatcccagcaatttgagaggccaaggtgagaggatcgtttaagctcaggagtttgagaccagcctgggcaacacagcgagacctcatctctaataaaaataaaaaaaattagccaggtgtggtggcatgtgcctgtagtcccagctactcaggaggccgagttgggaaaatctcttgagcctgcaagatacgggttgcagtgagctgtgatcacgccactgcactctggccttctggcctcggtgacagagcaagaccctctcttcctcgttaagcgggtaccgag

SEQ ID NO: 531385 - DNA, 400 bp, Homo sapiens
taaactggattggcgggtttctctcccttgtgtgttgttgcggagcagtctcttgctagcctgatgcatggacgcagagatggattctgtagcttttttgagggggatcttgcgaagatgtcaagcagcattacttaccaagcctgtcgtcatatggactcgcatcagaccttaattttcttttcagcgcattcatgcctgcttatttccagagcccccgctttggctttggacttcaggtctgtgggaggagtgtcccaggatggctcgtgcggtcatttccaggcagtgccgctctccctgtggcttgtacccacggtgcctcactgtgtgagtgtcctcctgctctggttgcccagccggccatcacttcacagcgtgtgttcatttctcccaaagc

SEQ ID NO: 531386 - DNA, 1099 bp, Homo sapiens
gggcacctgggtggggcaggcacgagttatttaaaacagttacactgcctaattctgaatatatatatatatatatcttttcaccataaaaaaaaaaaaaaaaaaaaaaaaaaaaaaaaaaaaaaaaaaaaaaaaaaaaaaaggggggggccaaaaaatttccccgggggggcccagtaggcacccctttttttttgaaaagggggccccaaaggggggttatataaagactgacgagacggggcgcatgtttaacacagtgcttgggatggggcaaagcatggacacggtcagacttacttgtgaaaaagaaccctaacctgcgggggggggcacatagtggggaaacactccctcagcagagatatttacaacgtcactgcagggaaattctacacattttcgacggtgtttcactggggctcacacacacgaggaatcagtgatccgcagtgcatcgaaaatttggtgctcacagacgagtgtttgacatatgtgtggaaacatattttttcaaccgcgcggggcctccgtgctcatactaacctagaacacagcaagaaacagaagaagcacaccccacacaacgacaatggatgacacgagcgaatagatcgaacagcacaacatcaaacagagaacagactacacactaatgacaccaagcaactgatgacacactactactaacaagcgaatccacgaacaagaacaaggaataccaacacgatcacaaagatacacagacgaaaacatgagaagcagacaacaagacaacacaaaaacgaaaacgagaaaagaaaacaaagaaaaaagcaaaggaacgaaaagaaacaaccgacaaagagaaacaaaaatacaagagaggagaaaacaaaaacaaaaaagagcaagacgaacacaacacagacaacacaagcaaataaagactaacaacagaaaaaagaaaatacagaaacaatcacagagcagcaatgcaaacagcactcaacagaaaagcaccagacaaagacagcgagaagcagaacatagagacgacaagaactcagagaaagacgaacaaaagagaaagaaggacacaaatcagctctacgaaaac

SEQ ID NO: 531387 - DNA, 896 bp, Homo sapiens
cgcgatactgaatctgcgcatatgtcgcgttcatcttcttcgtagtcgcttccttgggggttactgaccgcaatctcatattgcctatgccctccgagagtttcgtggcccccggatgggttctggaagcccggagctgttcaggccaccagacaccctgggcaaaccggacacctttgcttggggtcttgggcaaaagttccccgaggataagggaacactccttctctcgccgggtttttccccccttcttgcggcggctcccatcttcaggtcataaaaggccaatcgcagctttgtaacaccaaccccttcggcaatacaagtccccacttttacccctatagggttttctcccccctctttcagaaaactgcccgcctccgcatcttcgattttcacacaccatttcttcccaagatgagcggccccaaaacactcgccacacccaaaccagatccccactggccgtcattccgcttcccatctttagagccatgtatcccccccccccccttggaaaattgctgcaaactcagctaatcccaaatctatatcatcaggcgtagcttactttcccatgcttgtgaacagcctccccccctccttattaaagcgaagactttctaccacaagcatctcccccttgtctattacggaagcccttcacacttacaatcacacaaagaggtcaatcaaatatcttaagacctgactatccccagcccagcttttaatcctcccaaaaaaggcttcatttcatctcacaaactactttgataccttctggagcacatagcccaaggtattttctcttatcacccctcggaggaggttttttctttttcgaggggccaataaaaacaaaccaattaatactcccccccacaatgaca

SEQ ID NO: 531388 - DNA, 178 bp, Homo sapiens
tgacagtgtgtgtcgttgatggatgggtgtggcatttatattgaaggatgtgcaggcttcctctcagagcctgcccaacactggcgttgatgtgtggaggggaagcaagatgggtaagggctcagtgaagttgctccaagaacagtagcttgatgaagctgtccagtaagtgccttgt

SEQ ID NO: 531389 - DNA, 82 bp, Homo sapiens
ctatcaactgaggcgattccgttgagctgctccatctgtagggcgtagcgggcctccacctccctcatccgcttatccaatg

SEQ ID NO: 531390 - DNA, 152 bp, Homo sapiens
cgtcgggaagcagaccctgttagctcttggggggatcaaggggcttcccattaaggagaaaagtattagcagtttcttaaaaaataaaatggctacacggaacatgatacatggataaagcttcaaaccaagaagatgggggtgattgcctg

SEQ ID NO: 531391 - DNA, 181 bp, Homo sapiens
tatgcaacttggaggcagaggctgtgcggtggactgagttcccttggtgatgtcttcaggcattaaagctacggccccctcaacgtcagattagtgatacgtcaatgctctacacagtccagtcttgtgcctggctcactccatgctgacaaagcagagcacatgaagcgacaaagacacc

SEQ ID NO: 531392 - DNA, 1189 bp, Homo sapiens
ggccgccgttgcgcagatcctgggccgcggctgtgtgggagggctgacgcgagcgggtgaccttcctggatggctgggatgctgatgctgatggatggccctgggagctgccgagctgtctgccgccgcctgcctgccatgaacaactctgtgtgcgcctgacgcagatcgggaagctcttctgtgggctggtcttgacttggacgcactgacccaatgatgactctgcgcagactaacttttcccaactactggagcaacgtcgtacgattcgtgtatatcatgaacacgataacagaccaccaatcccagatctcgacgcgctttgggcttctgtcaccacctcttacacacgaaccgcaaaacgtgctgtggcggaacgggtgcctgtgccaagacaaggacccgcacacagcataagaatgagcccgaaaacattcgaacaccccagaagcccatgccacacccccctgggcgcgcattgcaggcctcggacgagcaacactggcccgacacggcaccgcgactgggccagcgaacagcggaacccccaagtgcagagcgcattaaaccatcgctaacactcacaacctacacgcacttattctgtggtccgggctgcgaaaatattcccttcaatccactatgcttgggctggagcaccacgacgacctcacggggacaattacctttgccaccgaaacaggttcccgagaaaggctttgagttccagcccgggcacagaggttacgcttacacttcgaaacttcctaaatttggaagtccggcaccgccgacggaaactcgccagccaactgcgcggccccaccccgagaacgggggatcatgaaatgggacatcgttatgaacctctaacacacccttcatatcagacgcgcacgcgcgagcacacctcaacacctcagacactctccccgcggcttaggggaaagcaccagaggggcgagttgcgtcccgaatacccacccactcggccaccatactcccactcccacccacagagccccgtatccagcgcttggcgtgcgcccacagtatccccgacacgcgtcggcgacaaacgtttatcacgcagccgcggcaccgcgcctctgggactggcacttaccgcgcagtgcaacccaggcgccacaagacggcaaggccccccccacacacgctgcgcccg

SEQ ID NO: 531393 - DNA, 354 bp, Homo sapiens
gtctcagcctcccaagtagctgggactacaggtgcacattatcagatccgggctaattatggtatttcttggtggacccggactttggccatgtcgggcaagttggatctcgaattcctggcctcaaacaatccatctgccccaaggctcctgaagtactgagattacaggcatgagccaccagacatggccaggggcttaagtttcaacatgatttctgcagtgacagacatttaaaccacagcaaagaggatgagccctcaaaagatactgagacgcagcacccagagagatgggaaaaccagctggtgagtgtggtgggacagagctgagaccgaatcagaaggaagagac

SEQ ID NO: 531394 - DNA, 275 bp, Homo sapiens
gaaaaaagggtaaaaaaaaagctttgtttttttcacccaggaaaaaagggtggtgttttcacccgggcaactgctcgccggcctacatggggttaattcaagtttgctgcgagcccgactccgcccttggcattggcctccaacaagccctgttttttttggggtacaggggaacgggatggtttaaactttcctgctcagtgtgtaaaaaatgaagctaaaacccctatttttgctctccttaagctgttcaataaaccggttcctctttttta

SEQ ID NO: 531395 - DNA, 245 bp, Homo sapiens
ctacgagagactactcgaggaggaataagcactacttggggtggctatagcggcatggacaaacgctgcaacgatactgctttcactgatggtcaaggtattgttatattgccagtctttgtaaagtcattaaagcagaagtttcttcaatgatcttctctctaagaaacaccatcacctccatgtgccttacagaggccctctgcgttctgctgcgttgcttttgcgctctccctttctggtgg

SEQ ID NO: 531396 - DNA, 250 bp, Homo sapiens
ccaacttggcctcccaaagtgctgggattacaggcatgagtcaccgtgcccggctgccagccctttttaaataaccagatctcacatgaactgaaagaactcactcattaccatgaggatggcaccaagctatttgtgagggatccacccccatgacccaaatacctcccactatgcccacctgcaacattgggggtcacatttcaacatgagatttgggaggggacaaaacatccaaactgtattcagc

SEQ ID NO: 531397 - DNA, 170 bp, Homo sapiens
  misc_feature (23)..(23): n is a, c, g, or t
  misc_feature (70)..(70): n is a, c, g, or t
ctgggtgcgctgctgctgctggntctccttggcctcgccgtccttgtccacaagcactatggcccccgcntcaagtgctgctctggcaaagctccggagccccagccccaaggctttgacaaccaggcgttcctccctgaccacaaggccaactgggcgcccgtcccagc

SEQ ID NO: 531398 - DNA, 797 bp, Homo sapiens
tgcagtagctcacgcctgtaatagtagctctttgggaggctgaagtgggtgcatcgcctgaggttgggagttcaagaccagcctggccaacatggacaaaccccctctctactaaaaatacaaacattagccaggtatggtggtgggtgcctgtaattccagctactctggaggctgtggcaggagaatcgcttgaacccagaggggcggaggttgcagtgagctgagattgcgcctgttcactccagcctgggcaactgagcgagacgccatctcaaaaaaaaaaaaaaaaaaattggaaaagacacgttcacgggtattctagctctaaatttctggtccattaaactctcagttacacttcggtccgatcaggatcaacgtgatgtgacccgtcgtgtcccagggctaaggaaatgtccttccatccctttaagggcccatccacaatctatgtcatgtttgaagaggacttgggggacgaagcagacaggagaggcttaacgagaccctttgatttcctatggtcccagatgattactgaacgaccctccggagtgctagatcggcgcgggggtcattgggctcttcggacaccctacgtgtgttggtgccggtcggccttgactggaatgccttcccaagaatgtgacccttctttttaggcagcttaatcttctcacagcccttggtgtttaagcaaccccgcggttgatcatcccccgtgggccgcgctaggattcggggggaccagcgcggcttcttttgacaccccattctcgcacttttggccctgc

SEQ ID NO: 531399 - DNA, 1081 bp, Homo sapiens
ggcaacagcttccacaactgcttcatctcatgccaacactaatttattcccacactgtctttgtacatttcagagctttggtctacctgagtgggcctccttattcccactgtgccagggaaggtaggtttctactggctgactgagtactgtgagtagaggcaacactagatgccagcatgggtcttacttgactggggcagtaggctagagtgagggtgtggggtaggggtaggtaggggagtagtagtaggccagggtaactaggaatccctggtggattttctgattacctgtggtgagacggacagctacaggacctggagaaggggatgcagaggcaggcctgctgaccacacttgttgcaatcacaaaggtggagggtcctggtgccaggcagtgaactggcttctaatgtggggttcagtcagtgccagcaagtgggggaacactttcacgtattgcgctaggtacagcacttcctgtctgcatttcctatccctttgcaccagcttgaagaaatagagtaagacagaatcacacatcatgtggtgggccaatggacctaagtacctgtggtgaaccagttactactgtagctggagatcataagcacttgactacagtaacatcttagaatataatccgcgctctcaaccctaagttaagactcggacgcaaacaaagaagcatccaaagacaacagtgacttgagctatagatagtcaaaataatacgcgaagtgcactggtaacaggtgtcggacagcacggctggcatgaaatacaataagacagaacctattccgtggcagtgaatcctgcagaccaccatactcttccatatattatatatggcccagccatcggacccgagcggttctaacgcgggcgtcgcggactagggagacaaagaaaacgtcacggacccgaacgggggccccgtttggtggccacggcccaccagacagggagaagacgaattgagaagaggagagactaggaaaaggggacaaagggaggagcacccaggtgcgaggggacaagaagcggcaacagcagcacaaggacacgatgactca

SEQ ID NO: 531400 - DNA, 290 bp, Homo sapiens
accccttatagctactcgctcaccacttctgtttgctctgtgacgtattaatcctagatgtcaacaccagatgttatattctaacttgtactaactgacgtgtgtcatactatcatggaaggaaacaaaatgtacagatgaacattattcagtgttatgtactgtaggtaaatattcatgtagaatggacatcaatctacttagcaatatttggaggctatttcaacattgcactgtagaaatgtaaagtaatgtatgcgatgtaaaggaaagcccgcgagtcgcattat

SEQ ID NO: 531401 - DNA, 167 bp, Homo sapiens
  misc_feature (110)..(110): n is a, c, g, or t
gacagctcaggggacgaagagtggagaagaaagctcacaatattagcatttaaactgcagaaaagaaggcaagaaaaagaggggctgaacttgaagaagaagggtgaggntctaaagctatagacagtggagcatacagggcatggcactttattaggggctcctca

SEQ ID NO: 531402 - DNA, 555 bp, Homo sapiens
aggaaaagatgatcgccgtttgggtaaaaggtggaggagggccctaaattcttgaagtctggggacgccgccatggttaatatggttcctggcaagcccatgtgtgttgagggcttctcagacaatccccctttgggtcgctttgctgtttgtgatataacacaaacagttccggtgggggtcatcaaaccagtggacaaaaaggctggtgggggtggcaaggtccccaagtttgcccagaaaggtcagaagggtaaatgaatattatccctaaaacctgcccccccctttttaatcagggggggaagaagggtttcagaactgtttgtttcaattggccatttaagtttagtggtaaaaggcgggttaatgataacaatgcattgtaaacccttcagaaggaaaggagaatggttttggggacccctttggttttttttttgggggggggcggttttaagttattagtttttaaaaacaggactttttaaggggaacaacttggccaaaaatttgtcccagaattttgggaccccttaaaaaagttaaatggga

SEQ ID NO: 531403 - DNA, 358 bp, Homo sapiens
ccttgagaatctccaagtgggagccacatggccactttattctccactggattcactctaaagacacagatgggccaggcatgtgtcatgcctgtaattccagcactttgggaggctgaggtgggcggatcgcctgaggtcaggagttcgaggctagtctgaccaacatggtgaaaccctgtctgcactaaaaatacaaaatttagccaggtgtggtggtgggcgcctgtaatcccaactattcggaaggctgaggcaggggaatcacttgaacccgggaggcagaggttgcagtgagctgagatagtgctgctgtactccagcttgtgtggcagagcaagactccatctcacaaaaa

SEQ ID NO: 531404 - DNA, 232 bp, Homo sapiens
acgtttttgtggagtaaattttgggattggggggaaaaagggaccaccggcccatagccttggggttggacatctttagtgtagctgccccattgatttttttataatcccttggggtttgtacatttttggggggagaacaccaaattttttccttaatatatggacctagcttgaggcatttttaatcccctgccctaggcaggtaataataaaggttgagttttcccca

SEQ ID NO: 531405 - DNA, 146 bp, Homo sapiens
agactaacgccaggccagagcgatggaggcatccacctggcagaaaggcaaactctgtagactggcaggtattttcttgtgacatggcagttgtcacggatttccgtggactgcatctctaacagacattgctcctcactcatgca

SEQ ID NO: 531406 - DNA, 226 bp, Homo sapiens
gtggcctgtacgctgtgtggctcgtggatctttttaggacgctggtcgtgttgccttagggcccccagtgctggaggggcagtcatctagcactgatgatgcctcgcagtgatgctgtctcctgatcaggtcatgtcgtgaagtgtccagagttaagactttgacgtgcgaatgggggagtggtgcgggacacaatatcagcccctgacagcagctcgcccctgag

SEQ ID NO: 531407 - DNA, 1507 bp, Homo sapiens
  misc_feature (829)..(829): n is a, c, g, or t
gcgtcggggtttccttgcttcaacagtgcttggacggaagcccggcgctcgttccccatcccggccggaccggccattagcccagcccatcctgtctacatccttcacgcgcaactccatcggacggcacccgaaggatcgcctcggccagctcagctcactagcgccagggcagctcaacacgcactggcggccaggcagcacttcatccgtatcagctcgcgctgcgcgatcgacagaattccgcgtccacgcgtctggcaagcgatgtcggccacacgagatcttaccaacgcagtgtactttcgagtatggtccgaccaagtctaatcgcgtcgcgagagtcacatgctggcatgcgtcttacgacctcgctacggttctaatgctagatcgctattgctctatgacttgaactttatgagcccgcgaatggactcgtggccttgttgatatgcataccatttggtccacacagtaccgtcctcctttcatctcacacatctcactgatggacgaggggacacctaatgactgacgcaataccttgaatgcaagccatgcagaaacccttggcgaagcggatcgtcctcggatatgcttgtcccttttccatggggcataagtaccaaagtagaagcgccacgaatctggttggaatcgaatcttgggtggcaggtaagcaagagagccttgcagaattgcctacagtaggcatgctcggtaagacacttaagcaatttatgaggcatataaaacacagggcttggaaatcacggtccaacataatctgggggtaccccttcgcaatacaacttcggggggcccncccctggaggcaaatataaagattgtgaggccgcccacttgtttagttgttgtagcctcccctagtatccgaacggaaactattcactttgaacccttgtaaacttggaggtcgacgcgcttgaaaccacgcccgattcttcccaggcatattcggcgtgctgtgagcccacccgattggaattgcacaccccttttggttcgcttacttgcattaggggtggaaggccggccccgggaatattctcaggggcatatgggaggggcgaaactaatgcttcctcttttgaaagcatactggccaacaatttcgccttggggcaatgaaccaggtcgaattcacttggaacacacgcctaagggccacatcaggggcgtaaaactcttccccccaattaggtccggttgggcgtgtggacttttgcccctgtggggtgcaacccaaaagcgggcaggtggacaatggccagtggtttggcgggggatgaacccgtttaaaccggctttggccctatgtgacggtttcgctatcgccaagaaaccagtgccacgtttcaagagtcctcttctgcggtgtcgggtcgccacgtcccctctcaaggtatagcaaagggttgggggtccccctaacacagacacacaccacagtgtgagcctgctgggaaccaatggacaacag

SEQ ID NO: 531408 - DNA, 318 bp, Homo sapiens
  misc_feature (11)..(11): n is a, c, g, or t
taggcggtacngcgatactagatctcgggtcatacctgaaccgctaccaccaaagccagaggtcgccgcacacattccgggtctttcgataaagcgtaatggggctaagccggacaacatctggagtggctttcgccaagggccagatggcaactgcgttaccgtatcggccatcaaggcagccatgtaccgatttggtcaaagcctacggacatttttcgctcagtgagaaaagagcctggcggttatcacgtggtcatgcgcgacgatttccagctgagattgaccgactcggagttggcgcaagcagcacaaggt

SEQ ID NO: 531409 - DNA, 355 bp, Homo sapiens
acacaggctaccaatggcaggacatatcaagggggactggagcccacgaaacagcatacggagagctaaagccattcatggtacccttaatcaaggtctccttccgatctgtgtcttgaggtcaggctcctcctgtcttgttacccactgtgtttctcggctctagctcttctccccagcccctgcccaataactaccagctgtcattgagagaggctctgattggtcccagggatagccaatgggctggctggctctggataggggtccacccggatccagccggccctggctgggagaggcagggggcgggacagacagtgacagctaagtcagtccaaagggctgcagaatt

SEQ ID NO: 531410 - DNA, 145 bp, Homo sapiens
atttgttttggcctccgggccccctcgctccccacccacccgggccccttcctccgggggtcacctggggcctccatcccaaaagggcaggggttatttttttgattaaaaaaaataaaaagggccgggccccttttttttttta

SEQ ID NO: 531411 - DNA, 464 bp, Homo sapiens
ttccagacccaagccccccccaaaacaaggggaagtcgggcagttcagtggccttaccctggagggggcccattcccccccccgcaatttcgccaaaaccaaaaaatagcccccgcccccccccctgtgccccaaatgatggatttattgtacaaaaatcattttcccattttgggggggggtcaccccaacccctcaggcccccctgtcacggggaacaaggagccctgggggatttttcttttcctttttttaatgaaacaaaaaaagggccatgtcccccaggggtttttcctgcctgcccctccggtgacttttaacaggattctggggccaaggtttcaactcagggcaacggcaggccaggttgtgggtttccacccgggtttggccccaggggtggcaaccggattttggggcaacccctttggtttttttaaaaaaggtcaaaggtggtttttcca

SEQ ID NO: 531412 - DNA, 690 bp, Homo sapiens
ggaaacgcgcagtgagtgattccgcgctgtgtacggactaacacttgtcacccagaaggacgttcaacctccaaaggagaaaccaatgatatatatctcgcggagagtgtcacacatcaaaatgagaataaagtctagggatccaatcaaatgcagagaatgtaggtacagaataatcggcaagaaaaggactaaaccattgctcgtttttgaagctctttgaatgctgtgaatttacaggaatggatagacttataccaggatttgcgctctgtccaatactgaacggtgaatagattatcatattgcttacagaaagatcccccttatcttgtggagagacaatccaaggccaccagtggactcctgagaccttatacagaaacaaacctttatacgctgcgttgtccatatatatatatccaaggtaaagtataaggtgtagattgagcatttccagacgcttaaagttacggactagaacaatggtaacaaccatctggaaacgtatgtggatgtgcaaattggagtttaacattaaaacctttttatgggaacctttttgataatttggaaaaggtaacaacttccttaacgggcccaacggtgaacccgcccttcagttggaaccccgggttcacattttggacaagctcaagggattcttttattccgcggaattttgggctc

SEQ ID NO: 531413 - DNA, 966 bp, Homo sapiens
attattcccttgagctagcggtcgtctaggtcggagctatctttgggggcccactctgtcgaatgggctaggtcgtcactcttgagttcgtagctgattctagtgcttggaactgaactgtgtgtagtgttttgattcggagttgctgaagcagttcgaggataagagctcgtctcaagtgaaagtctgcaatttaggtatttacatcgagctaaagtcagagggtgtagatagagtcctttataataggctgatagctgcttgcatggaaatatagctctccggaggatgattcatattgcaattaaggaaacaagtagtaattgatcattaatgtaatcaatgagtggaggaatagatggtaataactgataatttaaggcgccgacttgttccgaagtatgttgaagtaccatgaaggttgtgatacgaagggaaagctatatgaatattgtgactgtttggtctcacattgacgtagtatagacccgtatgtgatatcatatagcatgattcctaaacttactaattagtatgagttcttcttgtcctctaagtcgttatccatgatagcaaggcatggtgaggggggttaaagagaaatggagatattgcaaaatctttaggttactcctcatgtaacgcaggtaggatgagtactaggaggaatgcgcgtaggcttttagataaccgttcttaatttaatattaaatgatggcaggtaaaagcagatgcgtaataatggcaatttaactgcagtgcatgagcttatatattttgacgaggagttggctgcttagtgccttttcagtgagcttgttctaagggggccgcaaacagttttggaatggataagagacaaaagaagtgtatcgacttgaaacgggatgtataggaggacacttaacccaaaaaaaaaaggggcagaaatatgggagaggaatcgttacgccgaggcacgccacc

SEQ ID NO: 531414 - DNA, 913 bp, Homo sapiens
gtggaatttggggttgctcttggaagtggccttgatgaggatcctttacaactattcagaggactgtgtgaagtagttactggaaaaagaacttgaattatgcatttattggcattaatgtaaacagtaagtcctaagctttgatggaagggtccatacatttttttttttttctggcggatgtggctatctagatgttctctatagcaattaatagcaaaaacctttacattctgggcttttataaactttaccagtgttgtctgaattcacatagtgtgctggtaacacacagcaacgagtttcctctctggcacaaatcctgactgggcctatcgggggtgatggccagatctttagccatggaccatacttggagagattatgctttcaaacagaaaatggccacccctactcctttacccagcataaactctagggtctacactcttaaaataatggcttacagtctcccattaaactcccctgtgcgccctttcctcttgcttggcaccatgctcgctgtggcaaacacctcatctcttgacataaatgggcggatccttaggcttaatcgtgttcctggcagccaaaaactgactcaggagaaagccatatttaccccaggcgtggaccgtgttccgctttccaaatgccttggaaccaggacacctacaatggaggggcccttataaaggtttccgcgacgtggccaataccctacacaacttcgtggaggcgcaccacatttagactacccccccggtttatccagaaggccaccaacatatcaatacagagccaccgtatctggacagcttcacaaggaagattccctcccagagcctccacgtcgtccacgcagagaaggtcattgcactacgcctcagcggacgaaaacaaccaagagcca

SEQ ID NO: 531415 - DNA, 437 bp, Homo sapiens
  misc_feature (12)..(12): n is a, c, g, or t
  misc_feature (40)..(40): n is a, c, g, or t
  misc_feature (113)..(113): n is a, c, g, or t
  misc_feature (119)..(119): n is a, c, g, or t
  misc_feature (129)..(129): n is a, c, g, or t
  misc_feature (135)..(135): n is a, c, g, or t
  misc_feature (137)..(137): n is a, c, g, or t
  misc_feature (146)..(146): n is a, c, g, or t
  misc_feature (360)..(360): n is a, c, g, or t
  misc_feature (417)..(417): n is a, c, g, or t
gcggatgacgcnggttgcagcgggggggcccggggcttgngttggcatgggatggggaacgcggtggcttccgcgaggtttcggcagtggcatccggggccggggtcacggcngtggantggggccgantcgagncngcggactcngcgaggcaaggcgaggataaggagtggatgcccgtcaccaagttgggccacttggtcaaggacatgaagatcaagtccctggaggagatctatctcttctccctgcctattaaggaatcagagatcattgatttcttccctgggggcctctctcaaggattgaggttttgaagattatgccagttcaagaagcaagaccccgtgccggccaacngcaccaaggttcaaaggcattttgtttgctatccggggacttacaatggccacgtcngtcttggggtgtttaagtgc

SEQ ID NO: 531416 - DNA, 176 bp, Homo sapiens
tttactttttttgggggctctcggtatcctttatcagggacaaacccagctggccccaagcctacggcaaaatctggtatgtacagtatagtctaggtgggggggggtacaggagctggcctggctggcacctctcaaggccttactcggtacacaggcgggatcctctaagagtc

SEQ ID NO: 531417 - DNA, 1122 bp, Homo sapiens
cagaggcagcaccaccacacagtcacccctccctccctctttcccaccctccaccatctcacgggcccatgcccgagccaccgtaaccacccgtgccacctaagacccgcagatccgtcatctgtccgtgtttacgttagcgcacatgagggatcatgagtaggtctgggaatggacgaggaaagggcaaatgtaggggcgtgtggtttcccttgtccccgtgtccggaccgtccgaatcccaggtgcgtgtgtctctgtctctccgtagcccctctctcacatcatcacagttcccagtggtggcctcgaagaaaggcccaggaagcagcgcagggcgtggagaataacgagccatcgttgcccgtcggcgcctgcgtcaggacccgtgggcgtaccaatgtggcgcacgaaactgctggtgggccccacgtgatccgcgcaatgacacgttcacccattagtcatcccatgcggtggccatcctcttggccccattgtccgtgagagcgccagcgaacagcagaacggggagtgggtgcagggctcatatgcggcgaggaacaggcgagcgagcgtcagcaggaagggcactgcggttgggcacgggtagggctgtatggcggcacctctagtgcgtggctgtttcaccgcgcagaggactagcaggacagcttgccaaaagagtagtagttcgaatcgtttcatgtcaccggcgaacagaacaggaaacaaagaaacgacacaacacaggacaagccaagaacggacacgaagcgacacgacacagccgcaacgacaaagagaggggccgaggaagaagcctgccacagaagcagagacaccgacacgagaagacgccaagacagacagcacagcaggcaaagaaagccgcgcacagagtacgcgccgcgagcaacacgaacacccagggacacaccacgcgccggtcgcataaacagacgagagccagcgggcacacacgaggcgacggaggaaacaccagagaaaagaaaccacaagaaacagaggagcagagaaaccagcggagaccacaccgcagaggcatctgcacagcgccggaaaaaacaagatagcgcagtaaaggcagacaaccgcaccg

SEQ ID NO: 531418 - DNA, 701 bp, Homo sapiens
gatcctgtggtcgtcgtctcgtgtggctgctgagatcgatcataggttccttcaagtggtcccttattttaactaactgtccaggacctgcgctccactgtcatcgaagaagtcttgagatgggccactgtggctccggaagcatgtgtctgaggtcatcgtcttggacatgtcttggccagcaggctgttgggcagaatcctgttagcacacagccagttgtgggatgcaggaattccctactctgttccagcatggagctgcccagatgatctgtgggtcaggcctaaaagctgtgtgccttgcagtccagtcaatagggataggagactccagcattgtggttgcaggaggcatggagaatatgagcaaggctcctcacttggcttactctgagaacaggaggtaaagataggtgagattgccactgactgacagtatactctgtgatggtcttacagatgcatttcacaactgtcatatgggtattacagctgaaaatgtatgcccaaatagatggcaagtgagtagagcaagatcaggacaaggttgcagttctgtcccggaacaggacagagaatgcacagaaagctggcattttggccccagagattgtacccgttttggggtcaactacaaaaggtcttattgaacgtaaaaccgatcagtttctccccatgtggccacatagtaggcctgtc

SEQ ID NO: 531419 - DNA, 300 bp, Homo sapiens
ccaccatgccccactaatttttgtattttttgtggagacagggtttccccgtgttgcccagggtaatctcaaactcctggactcaaacgatccaccggcctcagcttcccaaagtgcaaggattccaggtgtgagccactgcacccagcctttttttttccttatacttattttataatgttctgcaataagcagggtttttgaggcatgaaaaaaattttaagttaaaaaatgaaatagtcaagtagcaaatacattactgagaaccattttcttattaaagagcaaactatgagaata

SEQ ID NO: 531420 - DNA, 222 bp, Homo sapiens
agatcgacagctccaatcatctcagcgatcgtcagatcagggtcatccggtcactgtggtacggcatcggggttggcggcgtgctgatcgccgggttcatcatcctgtatcccggtcacaccgacctctggggcatcccggagtggatcgccggcatccagtcgatgcccagccgctgatcacggagcggaggtcgccgtgatcgtggggaccggcaggttg

SEQ ID NO: 531421 - DNA, 442 bp, Homo sapiens
ctgcaatcagccgtcgtcgtttactgcaaggcgcgggtgccatgtggctattgagcgtaagtcaggtcagtctggctgcggtcagccaggtcgtggcggtgcgcgtctggcctgcgtccagctacacccgcgtgacggtggaatcaaatcgtcagctgaaatataagcagttcgcgttgagtaaccctgaacgcgtggtggtggatatcgaagatgtaaacctgaactcggtactcaaggggatggcggcacaaattcgtgcagacgacccgttcatcaagtctgtccagacgggcacgaacagaaccgataactaccgggcttacaatctcaaggtgagacgggttaaacgcagcgcaggtgcaccaggcgccatcggtctggagtcagacgagaagccatgtggtatttcacgtcacccgtgcgaggtgttctttatgtt

SEQ ID NO: 531422 - DNA, 195 bp, Homo sapiens
agacggggggctcaggcagtctggctccatcattcacgttctaagcgtgtgtgtgtgtgtgtgtgtgtactgtgtgtgtgtgtgtgttttggccagggtggtaactgtgtatactacctccctgatgctgctggaaccttctatagagaggaaacgctgagtcaagctccagatgacaggccaggcagagtgact

SEQ ID NO: 531423 - DNA, 142 bp, Homo sapiens
gcacgagattttacaactgtggaatcaaactcatctacactgagtggcatagacaaggccaaacacctggtaactggcaaagctaggatgagacccaaccttccaaacatctatctacccgctaggtgtggcaacttatgcc

SEQ ID NO: 531424 - DNA, 446 bp, Homo sapiens
caatctgttcccatccaggagagaattgcacacagttgacaaagcgtctgtggtcgccaactgtgaacttgaacttgaatgggggtccctcaaagagtgccgcgcagtaatcatcgcttcccgtagccagccggtatggccggctctgcttgatgtccacgctgtagatgactttgttgtgtcctgtactctcgcctttagaagagccactatcccagaggaagactgctccaaagttctacccttccttccccgaccaaggagaatcctctaactagtctacagtccaagcaatgtctacgatcttcccagcgaaaggctgctaactcatacttcaacaggtgctaccttctgcgtggtattcccagatccttcagcttcccagatacatctccggaggcaatgtacaatccgctagagcaccattccttggtcaacaacaggta

SEQ ID NO: 531425 - DNA, 178 bp, Homo sapiens
tcaaagtcccatgagacaggtggagatacctttattactgttaattctgcagagtattcttggcgccacccagaataacttgtaatcttacacatattaggtattctcgtataatgcagtaatcctcattacctaattcaatttccttctcaatttccaacttaggcactggtcaggc

SEQ ID NO: 531426 - DNA, 320 bp, Homo sapiens
ctgggttacacaactagggtcagttttgcaggtggttaaagcatttaccaagatagttgtaggtaaagaagggcagatttattagagaaattgtgaaaatatgttgcagatgggcagctcagcagagaaggggctacctgcaaagaggcaagggctggaggaaagttttatagggtcctgctgaagggtgctacgtgtggaatgaggtcattgtgcccgcaggttgtttgtgattagctgtctctaacaattgttcatacaataattgttcattattgttctcaacttggggctctccccaacctggggacccttcctta

SEQ ID NO: 531427 - DNA, 361 bp, Homo sapiens
acctcctaccacggaaatataaaagatactcagaaactatgaacacctctatgcacacaacctagaaaacctagagagaaataaataaattcctgaagacacaaaatctcccaagactgaatcaggaagaaattgaaatcctgaacagaccaatatcaagttctcaaattgaatcagtaattaaaaaaacctactaaccaaaaaaagccctgaaccagatggactcacagccaaattccaccagacacacagagaagagctggtaccaattctactgaaactattccaaaatacagaataggaaggactcttccctaactaattctctgaagggcagcattaccctcgtggggtaggaggt

SEQ ID NO: 531428 - DNA, 535 bp, Homo sapiens
  misc_feature (205)..(205): n is a, c, g, or t
  misc_feature (335)..(335): n is a, c, g, or t
  misc_feature (360)..(360): n is a, c, g, or t
  misc_feature (366)..(369): n is a, c, g, or t
  misc_feature (372)..(373): n is a, c, g, or t
  misc_feature (375)..(375): n is a, c, g, or t
  misc_feature (379)..(382): n is a, c, g, or t
  misc_feature (386)..(386): n is a, c, g, or t
  misc_feature (388)..(388): n is a, c, g, or t
  misc_feature (392)..(392): n is a, c, g, or t
  misc_feature (406)..(407): n is a, c, g, or t
  misc_feature (410)..(412): n is a, c, g, or t
  misc_feature (420)..(422): n is a, c, g, or t
  misc_feature (425)..(425): n is a, c, g, or t
  misc_feature (427)..(428): n is a, c, g, or t
  misc_feature (430)..(433): n is a, c, g, or t
  misc_feature (438)..(438): n is a, c, g, or t
  misc_feature (442)..(442): n is a, c, g, or t
  misc_feature (445)..(447): n is a, c, g, or t
  misc_feature (456)..(456): n is a, c, g, or t
  misc_feature (458)..(458): n is a, c, g, or t
  misc_feature (463)..(463): n is a, c, g, or t
  misc_feature (467)..(467): n is a, c, g, or t
  misc_feature (469)..(469): n is a, c, g, or t
  misc_feature (481)..(482): n is a, c, g, or t
  misc_feature (486)..(486): n is a, c, g, or t
  misc_feature (491)..(493): n is a, c, g, or t
  misc_feature (498)..(498): n is a, c, g, or t
  misc_feature (502)..(504): n is a, c, g, or t
  misc_feature (507)..(508): n is a, c, g, or t
  misc_feature (511)..(511): n is a, c, g, or t
  misc_feature (515)..(515): n is a, c, g, or t
  misc_feature (517)..(517): n is a, c, g, or t
  misc_feature (530)..(531): n is a, c, g, or t
  misc_feature (535)..(535): n is a, c, g, or t
taccacgatatgggctaacaattctgttatccttaccaggatatgggctaaaaatttttttgtgtacatgtacacttaacatatataccaggattgaataaataagtagcaaagtttttactgtccgaaacagaatccaaggaaaaatgctagaacaaactctgtggatgttgggttgaaatccgaggtatcggtatgaatcacntatgagtgcatgcttttaaatacacccgagagttgcacacacacagcagtttgtacatataaaagtagatatgggctatgtgtgtttacctccggtctagtgtatatatgttctctgcccctgtcccccntggagggaccttgaaacagtgaacntccccnnnnccnntngagnnnncccnanttcnccccaattttgggnnccnnnaatacccnnnccncnnannnnacaangggnccnnnggaaaaacntnggganaaantntttttattcccnntacnggggnnnggccnaaannnttnnaanaacntntaaaaatttttgnngggn

SEQ ID NO: 531429 - DNA, 455 bp, Homo sapiens
tctgcagacatttgttgtttccagtttttggccattacgaataaacatttgagtacatggctctttgtgaacatgtttttcttgcccttgggtaaatgagtgggattgttgcatcatacagaaagtatgcattttaactttttaaaaatctgctgggcggattgcttgagccccggagtttgagaccagcctgggcaacctggcgaaactccgtctctaccaaagatacagaaattggtcgggtgtggcctgtgcctgtagtatcagctacctgagaagctgatggaggattgattgggcctgggaagttaaggctgcggtgctgtgctcacacccctgcattctagtgtgggtgactctgtctccaaaaaaaaattttttttttttcaaagttgtaccattttgcatttctaccagcattgtatgagtttcagtagttcctcatctagccgcat

SEQ ID NO: 531430 - DNA, 317 bp, Homo sapiens
gagagggagtctcgctctgttgcccaggctggagtgcagtggtgtgatcttggctcactgcaacctctgcctcctgggttcaagcaattcttctgtgttagcctccccagtgggtgggactgcaggtgtgtgccaccacacctggctgttttgtatttttagtacagacggggtttcaccgtgttggccaggctggtctcgaactcctgacctcattatctacctgcctcagcctcccaaagtgctaggattacaggtgtgagccaccacgccctgcaacattaaatattttattaatttcatctttttcaagaaat

SEQ ID NO: 531431 - DNA, 102 bp, Homo sapiens
tagaaagaagcaaaagtctcaagcttatcatattcccagaagaaaaataaagaatgttactgtggacagagtatactgaggacggctcgggtaaaggaccag

SEQ ID NO: 531432 - DNA, 372 bp, Homo sapiens
ccgccatgcctgagcttccccccgcccccgccgtgggctcctgtgcggcccgagcctccccgacgagcgccgccccctgctccacgatgcccagtcccatcgaccacccaagggctgaggagtgcgggctcacggttacaggattcccatttcagaactacgaccatttgaaaaatagaagatttaaagattgacgcaaagtgcatgtaccatgatacaccagacggagtctcactctctcgcccaagctggagtacagtggcgcaatctcggctcactgcaagctccgcctcccgggttcacaccattttcctgcctcagcctcccgattagctaggactacaggcgcccgccaccacggccggctaattt

SEQ ID NO: 531433 - DNA, 106 bp, Homo sapiens
  misc_feature (6)..(6): n is a, c, g, or t
ccatgnttgggcatcatggctactgcatcttatgatactcgagtatatatctgggatccacataatggagacattctgatggaattggggcacctgcttcccccac

SEQ ID NO: 531434 - DNA, 199 bp, Homo sapiens
tatgcgcgggtcgtgtgtgtgtgcggtcgggctgagcagtgagctgcgcaagtgtaatcagtggatgctggtttgagcgaaggcagagtgagctgctcctcggtctccaccacagaggactgcattgcccttgtgctgaaaggagaagctgatggcatgagtttggatcgacgcaatctgtacactgcatgcctctttg

SEQ ID NO: 531435 - DNA, 634 bp, Homo sapiens
  misc_feature (283)..(283): n is a, c, g, or t
  misc_feature (455)..(455): n is a, c, g, or t
  misc_feature (464)..(464): n is a, c, g, or t
  misc_feature (621)..(621): n is a, c, g, or t
acaactcgttgttggccagtcggggaccagacttcgctcgtactcgtgcgcctcgcttcgcttttcctccgcaaccatgtctgacaaacccgatatggctgagatcgagaaattcgataagtcgaaactgaagaagacagagacgcaagagaaaaatccactgccttccaaaggggggggtgaacaggagaagcaagcagccgaatcgtaatgaggcgtgcgccgccaatatgcactgtacattccacaagcattgccttcttattttacttcttttagctgnttaactttgtaagatgcaaagaggctggatcaagcttaaatgactgtgctgcccctttcacatcaaagaactactgacaacgaaggccgtgcctgcctttcccatctgtctatctatctggctggcagggaaggaaagaacttgcatgttgatgaagaaagaagctaattgnaagaaggcncttaaaccaaaaggacatctagagtaaagcgcagcttaccaatggggcctgcaggaagtcatgcacttttatcaaaggtggccaattttttttggctcaatccctttcgaatacgggaatttccaactccatccaccaacaccatttaaagtttaanagcgtattaaaaa

SEQ ID NO: 531436 - DNA, 826 bp, Homo sapiens
  misc_feature (61)..(61): n is a, c, g, or t
  misc_feature (67)..(67): n is a, c, g, or t
  misc_feature (70)..(71): n is a, c, g, or t
ggcgcaggcaggagggaacggctggttgcaggtttctctcgccctggtccgcgcggcccgncgaggnggnnaccaaggtgggtgcggggcccgggcccgggcccaggacacgcggggactctcgggagccgtgggccaggcgcttagccggccacctcgggccctgtccaggcccaggcgttccagggctgctctgcgggccgcgtgcgagagggactctcgggaggccccggggcgccgcacccactccttcccacttgggactcccgcgggcgcccggctctcgctcctctggccagcgtgggcctcccaggccccctcgcggctctctccagagcaggagccccaccttgggccgcccctctcacacctgccgtgggtctggtacgcgcctctgtgtcggactccgcgcccgcctgcgtgggaggaagccaggactcccgggcgaccgggccattcctgtggtttgtgtcagttccacagcagcacgtgggcactttccaccgtcagccactgggcagcccggggcactcctgcagcgtcccctggccctctccagggcaggcgaaggttgggcagtcctgggcggccagcaccccggcgtgcatgtctcctgagcagctgcccatcgggcctctgctggcctgggggctccaagatgcaaggccggcgggagctgggggggagagcctttgagttgactccaggaggaagcagccagcgcttccctccgagtggcacctgagaggctgagtgatgacagttggaatggggaacggacttgcccgaccttctcctgtccgatgggaaagcagtctcattggcc

SEQ ID NO: 531437 - DNA, 319 bp, Homo sapiens
aaaagtaaaggagaccaggcacagtggctcacgcctgtaatcccaacactttgggaggccgaggtgggtggatcacctaaggtcaggagttcgagaccagcctgaccaacatggtgaaaccccgtctctactaaaaatataaaaaattaccagggcgcctgtaatcccagctactcaggaggctgagatagggagaattgcttgaacccagggaggccaggaggttgcagtgagccaattcgagccacttgaactcccagcctggggcaaaccaaggagccaaaattccgtcttcaaaaaaaaaaaagttaaaggagga

SEQ ID NO: 531438 - DNA, 373 bp, Homo sapiens
  misc_feature (58)..(58): n is a, c, g, or t
  misc_feature (330)..(330): n is a, c, g, or t
  misc_feature (341)..(341): n is a, c, g, or t
ggacaggtgattaatttttaaaaaaggtgggaagggggcagggtccttttttaaatgncccagcagaaaacccaagggtggaaataacttccttaggagtaaatgatgtttactttaagctgctgctccgtaattcacccacgctgacgttggtagattacatccacgaataagtcatgtaataataggacagccatgaaaaatgtagagatgtgtcaacagggtggaaactggttccttggtgaagaacaagccatgcagaaagctggatttctaacattctcaaatctctttttatccaaacaatctaattaatggggattgtattcnatgttataacntcacttcaaaaattcctaggcttatgatgtta

SEQ ID NO: 531439 - DNA, 204 bp, Homo sapiens
ccctaaggttctttgcctagcctcgcccaagaattggtgtggcggcttgacctatggcgagttgacagatacttggaccaagtagagagaaatgatctgtaggtttttattgatgcagagcgcaatgttcataagcttcctcatgcttggaatggggtccctgaatgggattcgccacatgcatagctcgtggtgatttgcctt

SEQ ID NO: 531440 - DNA, 335 bp, Homo sapiens
  misc_feature (183)..(183): n is a, c, g, or t
  misc_feature (222)..(222): n is a, c, g, or t
  misc_feature (307)..(307): n is a, c, g, or t
  misc_feature (315)..(315): n is a, c, g, or t
aaacttgagtctggatatgagggaggagggggccacagttagaagtttgaccttctggccgagcacggtggctcatgcctgtaatcccagcactttgggaggccaaggtgggcagatcacgaggtcatgagttcgagaccagcctgaccaacatggtgaaaccccatctctacttaaaatacnaaaattagccaggcgtgtggcgcacacctgtaatcctancgactcaggaggctgaggtaggagaatcacttgaacccaggaggcgaaggttgcaatgagctgaaatcatgccactgcactccancctgggtnacagagcgagactccatctc

SEQ ID NO: 531441 - DNA, 583 bp, Homo sapiens
cgacgccaggatctgacctgcaaatgctcacgagattcctaaacacagcactgattggaacatgagctcttcacggtgcggcggatccttgggggctcctgctctttagtaaaaacacagctcgcctctcatttatccaccgtggagctcctcacccgcaagccctggtggagctgctttgaggatggaccagagcctcattctgtgatgctatcatttctgggtccacagattcactgcactggccatacacatgctcggctgccgggggaccaggaatgcagggtgcgggctcctgacctgtgtttctaaagtctgctcattcacccctcgcccagtgcttctcatgctttcaaggaacacacaccctttcaagggtcttgtgtgtgccaggcaccctgaacaggcccagccccgcacttaatgagctactcacgaatcagaggccaggatggtgaagtgaccggcagtcacactgcttgcacgggggtgacatttgggggcaggcggctgtagggtccatgacgaaaactccactgtcggttgtggggtcggaggaagccgagggctaaaggatgagtat

SEQ ID NO: 531442 - DNA, 362 bp, Homo sapiens
ccaaggacagacagtgtgagggtctatcctcatgcccaagctgggtattagccatctcagagcagaaaaacagactatctggccgagaatcccccccatcttttttcccacaaagtgttcaaggaaagtaacacttttaggaagatacctcatgtggggacaccctatccccgccacacacacactctgcattcatgaagttgaaggacccgagctggaaagagattccagcaaccttttcccaccgggcaccgcaatgttggcaaagagatctcccaggcagtgaatgttcagccagtgttcattgacttagacccaaaaagcccacacagagcctccccgcattataataaaggaacccg

SEQ ID NO: 531443 - DNA, 400 bp, Homo sapiens
  misc_feature (269)..(269): n is a, c, g, or t
cagaaagagttggagaaattttgcacccccttttttcccaagttgtaccaaagtgcaggaggcatcccaggaggaatccctgggggtttttttggggggggggctcctccttttgggggggttttctcagggccccccctttaaagggtttttttacccccccaagtttaaatgtagcttttttcccccctttttaaacttttgggggccctaattttgtggcaaatttttgggccgtttttaaaaattaaccgccctatagtgggttnttgggctttttcaaaattttaatttggaacatttgcccgggggaaggaaaaaactttgcctttttttacccctttttttttagtggaaaatccaatttttttattaaaatttttttaatttggccccctta

SEQ ID NO: 531444 - DNA, 605 bp, Homo sapiens
  misc_feature (446)..(446): n is a, c, g, or t
  misc_feature (502)..(502): n is a, c, g, or t
  misc_feature (526)..(526): n is a, c, g, or t
  misc_feature (528)..(528): n is a, c, g, or t
  misc_feature (605)..(605): n is a, c, g, or t
aaattgtttttaataaaattgcttcttaggggtataaaaggaaatgcatagacacggtatcagcattctaatattttgccacttaggttgatttactttgctgataagaattatggatatcgagtgtacagtatgtgcatgtgtcacatatttatgtataattgtgtatggaaattgtagcacatatacatatactaattatgaaaaagtgtctgtatacactaaatttaaatcctaaccacatctgagtttgctatagacaaaacaattcgctagctgtcgtatggtggattgaaccttttgaggtaagaaacttgcagtgtcagcctagtgcaattcggtaagaaattgtgtgtgtattaaattggaactgtctgatagctgaataagagcctaagctcatcttctgttcttctggccatccaatgaaacggagcagaacacanatttctttccccgctgctctgtagctcacctttctgaaatgtctttgaaatctttnctctccatcttcatttttctttgntnattatttacatcataatttgatgtgctgtcttcgcctttgatgcgtatccttctagtgttttatggctcacttttcn

SEQ ID NO: 531445 - DNA, 322 bp, Homo sapiens
cactcaacaaacccacaggtcctaaatcaccaaactgcattcaacacatttcggttggggcgcactcggcagccacaacccaatctccgcagccagtacatgctcaagacttccacccagtccaaagcgcaactcactcatcactcacattgcatcccaatcacacttgcaccaaaccggcaaccacagttcacccctacagggcatcacaccagcgccaatccctcatatctcagcagatcccatcatccaaccaatcagaggtattacgcaccctcgcatagtatggcatccagcgcaccatccccgcataggtgccagc

SEQ ID NO: 531446 - DNA, 603 bp, Homo sapiens
aaattgtttttaataaaattgcttcttaggggtataaaaggaaatgcatagacacggtatcagcattctaatattttgccacttaggttgatttactttgctgataagaattatggatatcgagtgtacagtatgtgcatgtgtcacatatttatgtataattgtgtatggaaattgtagcacatatacatatactaattatgaaaaagtgtctgtatacactaaatttaaatcctaaccacatctgagtttgctatagacaaaacaattcgctagctgtcgtatggtggattgaaccttttgaggtaagaaacttgcagtgtcagcctagtgcaattcggtaagaaattgtgtgtgtattaaattggaaccgtgtgaagaaaaaacacacatgtgagaatatcagagataccttagactcttgacacatatcactgtataagagaccaaaagcatattttgttgtttctcggccctccctgtgacgggcacaacacacaattttttttccgccggtgtgtggacacacctttgagaaacgcttgaaaaatcttttcctcaccatccatattaattttggtttagttttacgccccccttttc

SEQ ID NO: 531447 - DNA, 1013 bp, Homo sapiens
ttgccggccttttcaaatgaggtgaaaccccccgccccgtgtgcccgcctttacacaggggcccctttttgagccccctgtccttgtatggacccttcccgggccttagcccaatgtggaattgttccgcattgccccgcgttcccatttgacggcttccgtcaatacttaggccctacttgtgccccacccaccccggtgccccagtattgcccacatgatgggcgcccgagtgtgcaccacggaggaaacgccaccaatacccccaggcccacaccacaacaacaccaccggtggcgccaaaagggccctttcgattaccggggattaaagtcccctaatgttagttacgcctccacgagagttttttgttttccttttcgccaccgcgagttttttttctgagcgcctctttgagccacatcgccacgcctctatggccccttagccccccccacttaaggaggggccacctgggcccccccacacacggcacttcacccccgcctataattcccctagagatgttcccaccactccctctaaccaccactcccgctattacctctcgccatccacggaggtatttcacatcaccgcgtgagggctcacccacatagggtgctataatagggaaaccacacccgcgaacccccacatataattcacagccacctggcttatttacccaatgtttacactgggttctctaattttacccctcctaccacagcctcacagaggtaacttcgaagtcttcccttcacccacatttccgacggcaatttatcggctcaacacattttttgtaaccaccacaggcttccaccggaacttcaccgtcacttattggctcacactttcctcacctatctgcttcatccccccactaatatttcacctttacactcccaacatcacctttggcttcgaaagcccccccctgatactggcacttttgtagatgtggtttgactatttctgtatgtctccatctattgatgagggtctta

SEQ ID NO: 531448 - DNA, 509 bp, Homo sapiens
  misc_feature (32)..(32): n is a, c, g, or t
  misc_feature (411)..(411): n is a, c, g, or t
caaaaccggccaagttttatcgtgatgagctncccctggggggccaaaaatgtcggggatcccgggaccccccctgcggagaggggaattaagcctggtcttcggccacagagccccggtggggcccccaccttctatgtcccgggcccccagactgaccaaaccctagtccttctgatgggcaaagaaggggtccccggggggttggtcaccaaaagatgtatataaagggccccccccctcggggggtcccagaaatgacctggttagtcccttccccttaaccgctccccgaaggtttgcccccctttcccccccaaacccccccaaccccttttattttttgggcccttcccccaaccccctttttgctgccaaaaccccatggggtgggggccaggggtggatggncaaccccccccccccccccaaatcccccccggggggggttggaaaacttttgttttttggggttttttttttttgaataaaaaagattctcctaccca

SEQ ID NO: 531449 - DNA, 610 bp, Homo sapiens
  misc_feature (610)..(610): n is a, c, g, or t
aaattgtttttaataaaattgcttcttaggggtataaaaggaaatgcatagacacggtatcagcattctaatattttgccacttaggttgatttactttgctgataagaattatggatatcgagtgtacagtatgtgcatgtgtcacatatttatgtataattgtgtatggaaattgtagcacatatacatatactaattatgaaaaagtgtctgtatacactaaatttaaatcctaaccacatctgagtttgctatagacaaaacaattcgctagctgtcgtatggtggattgaaccttttgaggtaagaaaaaaaactggagtgtgagagcctatgcaaattcgggagaaatatgtgtgtgtgtttaaaattggaaccgtgtgagagagaaatttcacatggtgcgaaaatctcagataccctttagtctcgtgacatataactctgaatgagaccctaagctcatcttgttgttttcgtgccatccaatgaaacggagccactttctttccccgtgctgctgagctcacctttctgaatgtctttgtttgatgtgctgtcttcgcctttgatgcgtatccttctagtgttttatggctcacttttcn

SEQ ID NO: 531450 - DNA, 247 bp, Homo sapiens
gagttcagtggcatgatcatagctcactgcagccttggactcctaagttcaagcagtcctcctattacaacctcttgagtggttgggactacaggcatgtgccaccatgcctggctatttttttttttttttttttttttttggaaaaaacgggttttttacgggttagttttaacttctgggtttaaagggaccttccttaagggtgggatttttggcaaaaaccctttgcccttgggaacatttt

SEQ ID NO: 531451 - DNA, 691 bp, Homo sapiens
  misc_feature (105)..(105): n is a, c, g, or t
  misc_feature (108)..(108): n is a, c, g, or t
  misc_feature (113)..(114): n is a, c, g, or t
  misc_feature (118)..(118): n is a, c, g, or t
  misc_feature (142)..(142): n is a, c, g, or t
  misc_feature (149)..(149): n is a, c, g, or t
  misc_feature (158)..(158): n is a, c, g, or t
  misc_feature (189)..(189): n is a, c, g, or t
  misc_feature (192)..(192): n is a, c, g, or t
  misc_feature (203)..(203): n is a, c, g, or t
  misc_feature (207)..(207): n is a, c, g, or t
  misc_feature (243)..(243): n is a, c, g, or t
  misc_feature (281)..(281): n is a, c, g, or t
  misc_feature (285)..(285): n is a, c, g, or t
  misc_feature (289)..(290): n is a, c, g, or t
  misc_feature (292)..(293): n is a, c, g, or t
  misc_feature (399)..(399): n is a, c, g, or t
  misc_feature (405)..(405): n is a, c, g, or t
  misc_feature (442)..(442): n is a, c, g, or t
  misc_feature (511)..(511): n is a, c, g, or t
  misc_feature (519)..(519): n is a, c, g, or t
  misc_feature (544)..(544): n is a, c, g, or t
  misc_feature (582)..(582): n is a, c, g, or t
  misc_feature (608)..(609): n is a, c, g, or t
  misc_feature (613)..(614): n is a, c, g, or t
  misc_feature (620)..(620): n is a, c, g, or t
  misc_feature (663)..(663): n is a, c, g, or t
gcaatcatatacctgcacctaaaatatacaacctcggcgctgccattgcaggaagacaaagagactgtctagagagtaacgcggcgccgccctggcgcagccccnccnccccnnggcnccaccaaagggaagtgggaatgcncaccccncccgtctcncgccaggccgaaagcggcagggggagaattnacncccggcctgcnaaangcagccttgtgtccccacttcagagccccaacttcnccaaagccagtgcctgggaaatggccttgtcggcagcnggcngganncnngcgcagtgtgccagccgtgcaaacccccaccagactggtgcagtgtgccagctgtgcaaacccccaccagcagcacccccaccagcagccaaagaaaacaatttcnaaagcngcccccaggatttcatgccacgggggtggtgaggggnaggaggaggtggaaagcattgaatcagaaagtcttccaggtaccagcaatgccagggttaatatggtcnggcttgcntttcaggtgagcacctgtagctggnaggaaagtggcgtcgtggtggaggtgggcatgaattcnagaagccttgggggggcgtccggggnncttnncactangtcgtgctgcctcctgggggaattcctaagctttttttgaatnagaaaagcactgacaagcagacagaatt

SEQ ID NO: 531452 - DNA, 384 bp, Homo sapiens
tgtagagcatcccccccgttcccgggtagaggattcccagaggctgcatattttataattgagcctccgggcatactagttttgggctgggaaccttgcttaaagaagacccttaagctgtagaacatttaaacgttgaagccacaacgcagattgaggccttgacgatggagcttgaagatggagccccgtgacctataacctacccacctgttggcctgctttcttgggcgtttctgggaggagttcttagcctgatgaaataacttggggcgtagaagagctgtttaattttaaaggccttagactggggatatattagaggaagcggattgtcaaattaagggggtcattgtgttgagctaaacgctgggaggaggtacc

SEQ ID NO: 531453 - DNA, 238 bp, Homo sapiens
  misc_feature (47)..(47): n is a, c, g, or t
aacaaattggtgaacaaactggtgggatttttgcccaaaaacggggntgggggggcccccttcagggttttcctttcccctttaagggcgaaaaaggggccttccctctccccaaaaattggggtccttttccccccctcctttttgccccccggggggggggggggtggtaattttcagggccctgttgctcccttttttcgttggggaaaaataaagcccaatgttgggcccttta

SEQ ID NO: 531454 - DNA, 350 bp, Homo sapiens
agcactttagcgaatgacttgcttgtagtagacattccaatagtgctacgcgaagcaaagcataaaggaatgtgctgggacaaaataaaactatcatgctcaccattagtaaggtgcatatgacagtgtcataacccaagccccttattacaggcctagagacagatgaggcaaagaataattaagaaacgtgtagtcagcacaggccatgaacatgctggtgaataaccactggaagactaggatgaggagtagactgtgagttttccactgcagctcctgcattcaagatcactggacatgacagagcagtatagttcaagtgaacacgttcagagccatggcaaggg

SEQ ID NO: 531455 - DNA, 255 bp, Homo sapiens
gtgtgttcagtggttcccatacaaaaattagctgggtgtggtggcatgtgcctgccgtctcaactactcaggaggctgaggtgggaggatcacttgagcccaggaggttgaggctacaatgagctgtgatcacgccactgcattccagcctgagtgacaaagtgataccctgtctcaaaaaaaaaaaatcgggatggcgatcaactgtgcatagggagaaattactaaccatgggtaaggacaccggaaataagg

SEQ ID NO: 531456 - DNA, 341 bp, Homo sapiens
tgcctgtaatcctagcactttgggaacaataattgttattgctaataatagcacttagggaggctgaggttggaggatcatttgaggtcacgagttcaagaccagcctggccaacatggggaaaccccatctctactggaaatacaagaaaattagctgggcatggtggtacacgcgtgtgatcccggctgctcgggaggctgaggcgggagaatcacttgggcctgcgagacagaggttgcactgagctgatatcgtgccactgcactccagcctgggcgacagagtgaggctctgtctttaagccttagggagaggcatgttctctcgaggggggggcc

SEQ ID NO: 531457 - DNA, 86 bp, Homo sapiens
cgtttttgttttaggccggctcaacagtgcagcctggtccctgggggctggacccaggctcctaaataaaccagcaactccctcga

SEQ ID NO: 531458 - DNA, 285 bp, Homo sapiens
  misc_feature (154)..(154): n is a, c, g, or t
  misc_feature (282)..(283): n is a, c, g, or t
gacgtggcgattcaaaagcttccggtcctgttcgccagcgacggatattgctgtgccagttgtcgggcaagcgtaatgccgtcgatatccggcagatcaaaatccaccagtgcggcagcaaacggttcgctattttgcagtgtctctaaagccngcgcggcattgccaacagcaacaatctgcgcaccactggttttcagcatctcaatggtaattcgctgggttagcgggttatcttcaattaacagcaaacgtaaaccgtcaagacgcaccgcctgattnnct

SEQ ID NO: 531459 - DNA, 692 bp, Homo sapiens
gaggcatgaggcagatcagtgcaggagtttctgttgagggggcaggcggtggtgaggaaaccgagataagttaatctcttgtgaacagatagagattcaatgacaactacgtgtacaaagatatagtcaaataggtgtactaaggatatcgctgtagggttcaaagttatgtgaagcgtaatattgtagatagcttaagatttgaagaagaatgatatgagagacttagagagagtagcactgatgagggagaacgataaagagcgtttcataaaagcatgtacggagcgtggagactgaacgtcttcgtatcatggaggtatagacacatgtatttaagactgaaacttgacgatgaaagtgactactagagcccccggatttcaataccaagtagaagggcaatgcttcaagatttaaaatgaacggtgacttaaacagcttaaagttatagtatcaaaagttgtagtgtggattatcatgattgtgaatggcgatctgtgtagaatcgtagattaaacgggggggtgatgtacacagatgcttgagatccaggacgcagggagagatttgcgtcatttaaacgtctagttaaagcatatactaaagggaaaagaattcaattattctgtaacattttgtgggggaatattgattcgttagaaaatcttgcaataaagacgggtgggcgc

SEQ ID NO: 531460 - DNA, 401 bp, Homo sapiens
ccttaccttagaagttgtggtcatctgcagctgtggtcgtactgtgatgtgtaggaggaagagctcagtgtggaaaaggagggagctactctcaggctgcgtccagcgacagtgcccagtgactctgatgtgtctcacacagacttcaaaagcctgagacagctgtcttgtgagtggactgagatgcaggataacttcactcctcccctttgtgactatcaagagcctctggcatctctttctgcaaaaggcacctgaatgtagtcttgagtccctgtaaagcctaatgtgaggaggtggagagacagaccaacacccgtgtccactgtgacccctgtacccatgctgacctgttgtttcctccccagtcatctttcttgtaccagagacgtggagctgga

SEQ ID NO: 531461 - DNA, 160 bp, Homo sapiens
tgactggtggtgacctgacagctgttgttatagtctgcacgacaggagcgataatgccgagtgtctcacgtttctgactagacaaatgatccgtcagatacgcctcgcccgatgtgtaggaagaggcatatcaagaatactgaggcgccattggcgtgaa

SEQ ID NO: 531462 - DNA, 366 bp, Homo sapiens
aggggaagaatgatatagtttggtttggatgtttgtcccctccaaatgtcatgttgaaatatgatcccccaatgttggaagtggggcctagtgggaagtgtctgggtcatggggacagattccctcatgaatgtcttagtgccctccttgtggtaatgagtgagttcttgcaaaatctggttgtttacaaagggtgtggcacctccccactctctctctgtcttgctacatggtatgctggctgcctcttcactttccaccatgattgtaaggttcctgaggtcctcaccagaagccaagcagatgttggtgccatgtctgtaatagcctgaagaactgtgagccaaataaacctcttttctttat

SEQ ID NO: 531463 - DNA, 706 bp, Homo sapiens
  misc_feature (23)..(23): n is a, c, g, or t
ttctgttgatacccccggagtantggatatgttgatccaggcctcgggagtgagctgagagtgcacacgcatgagttatctgatttagtgtatctgctatatattttaagccttcatttgcaattcatgtaacagttgtgtcataaattacacaataaagcagctcctgttcaaatttttaaaaaaaaaaaagaacatcacatataaaaaaccactgttggcagccataaaagaattatcctacgcgagttgcctcttattccactcgacttcaaatttctatgatgccagagtgtgctctcatatattcgatcgctatattaataccatacacacatgcccgaatcatttataataacaacattttctaaattcttgcgtaaaaactactcgctcttaattgttaaacacttatcttacacacacccacctcatctactattcatataattttaatacactaatcttcacccacaaaacaacccaataaaacaattataaatacactctatctgctatactatcttaaaaccacttttccaccatcttcttctatccatctgttattccaaaccccacacatccaactatatcctcacttctacttcttttatacaattcttcccctcaactctaacaaatatattaccatcatctaacaaactcctaatctccctacccctctcattctatactaacacacccc

SEQ ID NO: 531464 - DNA, 288 bp, Homo sapiens
  misc_feature (64)..(64): n is a, c, g, or t
ggggggcccccccccccgttttttttccccctttaaaaacccggggggggttcccccccccggntttttttttggggggggggggggggaaattttttcccccggggaccccttttccccttggggcttttttgggggcccctttaacccggtttggtcaaaaaaaggggggggggggggggggggttttccggggtttttttccccccccgggggcccttttttttaaaaaccccccctttttggggggggggttttttggggttttatttttttttttttgggcca

SEQ ID NO: 531465 - DNA, 291 bp, Homo sapiens
tcttagacgcacctgggcccccacctgccctgtgctatctcagcccctggcttctgccctttttttcttccctctcctgctcccctcatccatgtgtaaaaaccaggcacccagaaaacgagtagggtgaaacttggtgcctgcctttacctgcagggggcttgggcatcacttgacctaggcctccaagactctgccctcctccctgggtcctccaacagccttcagcttcgtccagcacccagccctttgcacctgtgggaaccccctgcctggggatcaatttcaaac

SEQ ID NO: 531466 - DNA, 116 bp, Homo sapiens
cgcgcattgaccacggaacaccgcgggatggtccatctgcttgtcggtagcctgatgcgcgcttcgtcaagagtgacacctgaatttgctacgcgccagacccgtggcgatatagg

SEQ ID NO: 531467 - DNA, 716 bp, Homo sapiens
  misc_feature (294)..(294): n is a, c, g, or t
gtgattcccgagagatctggtggaaagtcagcatcgcggtactccggggcttggtgtacgtccgagatgaagcaccagatcatgcaccgatgatgtgaagccctccaatatcctcgtgaactctataggggagatcaatgctgtgtgactgttctgtggtgcagcgcgccgagcgtcatagcacgtccatggtgccaactccttcgtggcgcacgcgctcctactgtggctccggagcggttgcagggccatcattactcgcgtgcgagtcggaacatctgggagcttgggccntgtccgctggtggacgctggccgtcggacaggtatcgccattccgaccgtgaccgacgctaaagagctggaggcctagtcctatggggcgagcccggggttcgacgagggaagaaggagagccatcatcagacagtctcgtcctctggaccgaggtgcccccacggagtggccaccgatcagcgtgtgtcacgggtgatggatagccggcctggcacatggccatcgtttgatctctctggactgatattggtgaacggaaccatctcctatgctgcctcaactggatgtgttcaacccgcgatttccaggagttaggtcaatgagatggcctcagtcaagaatcgcagtcgtgcagcgggcggaacctgtaagatgctcagaaaacaaccttcatcaaggcggtccgagggtggaacgaag

SEQ ID NO: 531468 - DNA, 228 bp, Homo sapiens
acaaggcacatgccttcccttcatcatcatgcatcccccatccagtagtggtactgtttgtatacagttgattgagccagacattgacacatcatcacctaaagtccatagtttacactagggttctctctttgtgttgctcatgcgggtgggtttggacaaatgtatcatgacatgtattcgctacttattgtgtcgtatcagaagaatttctgtgcccttttcaat

SEQ ID NO: 531469 - DNA, 267 bp, Homo sapiens
gacatgtccctgccacacacctttcagaagcttcaccctctctctttgtcccttttcattttggaaacctcactaaaaatgtccaggttgccgaagacgtagatcgcccgcgaaaactacattcctaaaagtcttagctggaaaagaactacctacctcggtgcgaggccccgataccacctggcaaaaggtacgtctcactctcaaggacagactttcgatatctggggcttctcatccctgaccagtggctgaattaaaaaaaaa

SEQ ID NO: 531470 - DNA, 407 bp, Homo sapiens
gtgagatgcggttgggggtcgatatgagagcgtgtctcatgtgcgtacttgagcacagacacagtcggatgaggaagcagatcggtgagttcgccatgtgggaaggaagagagaagcgcaggaggagaggatgtgctggttgctgccccgagactcttggtgtgggatctcgaagactgcgatggcgaagtcggtgagcagaaggcaggcggtgaactggtggatactgccctgcacatggatcaggaagcagcacagcgccttgaggatgcggatgtgctcgagcaggaagtcctcgtccgcgcacagggcccattccagagccaggcgctcctcctcggcctcttcatcctcctcttcgtcctcctcttccccccaaccggccatcttcgagggtaccgagctcg

SEQ ID NO: 531471 - DNA, 350 bp, Homo sapiens
acttttataagaaaacctatatatcatttttgagagtaaaacactctagttattttctatccgacgacaagaaccagctattgactgaactagtaacacctgtctctctcactttgtctctaaagaccatgacttcccatctcagacccttcccagcccctggtatccaccattctactctctgcttctatcagttcaacttttttagatttcccatgtcagtgaggtcagactgtgtttgtctatctgtgcctggcttatttctctctctctttttttgtgtgtgtgagacaatcgtgctctattgcccaggctgccgtccagtgctgccatctccgctcactgccgcc

SEQ ID NO: 531472 - DNA, 111 bp, Homo sapiens
tccttaacaagctctggtggagggaagtgaacagagaactgagatcagaggcctgggttccatccctgccttcacggcacattgatatggttttaaaaccacacacaagtc

SEQ ID NO: 531473 - DNA, 185 bp, Homo sapiens
actatatcaagattccaaggataacgtatacaagagtcttaccaaccaagcaggcatactagtattcgacaatatcattaaaatacacagccctgttggggattgctttaagaatgtaacatgagataaagtgcttagacattaagctttctgacttccaaaatctaatagaatatatggtcagg

SEQ ID NO: 531474 - DNA, 160 bp, Homo sapiens
gggattgcgcaaagcaatgcagcataatgcagtgggactctgtaaggcacatggaggtgatggtgtatcgttagatgagaagatcactgacagaaacttactatgctaataattgtgctttacacaatgctgtgcaataatatacaactcacttgtacca

SEQ ID NO: 531475 - DNA, 364 bp, Homo sapiens
taggccagttttctctagtcgtcagcggagctcgatggggtgtccccatgtgtgctccaggggggttctctaaagttccatctgtcaggtagttccccccgagactgtgccgtccctaagatgctggtcttgacctgcttgagccactgcacccagcctggaccagcttttaatagatggatctttagaagagaatgtgttttgagggtctttcctggtttggttttttagctcaagagctccctctcctgttgtcatagtgtgcctttcttgtagtcaaactctctgattttcctagtgtttttttcagtgggatacttattaccaggaatatttatttttttttccagcgccagcgaggctg

SEQ ID NO: 531476 - DNA, 1353 bp, Homo sapiens
  misc_feature (231)..(231): n is a, c, g, or t
  misc_feature (308)..(308): n is a, c, g, or t
gctccgtaattcgcatcataagttacccttgtctaatctactacaggcatatcactatctgttaacgctgacctataaattcttagagctataatcgtagagttgacgcaagggtgtcccgagagcgggatgtatggcacccatacgagacgtgacatacaagaccacatttgcgcatgagccgcctgatagatacgcatctcacgctaaatgatcgcgctcgatataganacgcgcagacgatcaaagtcatagcacaattctagctcgcttcatttacaatcaatcacggtgcgccggacctcgtntacactgctccacgccagtgcgttcatcttgtcctagctaatcgaatacgccaccttcgcgcgatgagcccgaaggctcggcgtgggactttaccttcgaagggttcaggacgtccttgatgatcctatgctcatgcgccacatcataggtcgtaaacccgcatctcctactcaaacaattatcaagagattagaaagacaattggcacatgcgcatcgtgatcggcccgcttgccaattcttggtggcgtctcccaagactcaattcaggcgcacgagctcgaagtacctacttgttaagtagaattcgtcttggcacatcaccccgcgagtacgagtcgcgtaagggtatttgccaagtagcacccacctgaaaattattgtgtgggcgcttccctgtgccataatacccaacaatcctggggcgctttgcacatacaacggaacaagcacatacctagccactcctcccatagaatatacaacatacacatagacgttggcgtgcacacttgtgaggcgccatatacgtagtgcgcgaacaacggtggagtggcgaacactacactaatttcattttcgcggcacaaaacttttacagtactataatatatcaactgcgcaaatccacggggggggcgcctctcccattattctcgcccacgacgaatattagtcccgtggttaaaacgacgaggacgaaaatgttcttcttggcaacacaacttcattactccaatacctgaagggtacacattttaccaaacgaacaaacagcttccacagcatttacagataatcttgaccaacaagacacatagtggtgggcgtgtcccaaattgtgcgggggcaccccgttttgacaatcaatcaatatataactacgcagtatatttgtcctgctgtctacacacgtgaagcaagagaacaaaacaaaactgtggtgttggagacataacgtgtggtgcggcacgtattaataaataatgacaaaatccacacccggtatctgattggtccctatagaacggtgagatcatattat

SEQ ID NO: 531477 - DNA, 208 bp, Homo sapiens
ttttgtttcactctctttttaaatgatctcaaacaacctgtagttcttatgcatttaatgtcgtttaatcatttgccattatttttttgctttatattatataaaggtattcaggcattataccaaaaattaggggaaaattaggtgtaattgaatttcccgggggcccccacgcttacaatagattatacaattacatgggccaatt

SEQ ID NO: 531478 - DNA, 282 bp, Homo sapiens
caatggtgagaaggatagattctggacttttttgttctccagataaatgtggatagatttggggagtgagacaatagtcatggagtgacccttaagactttgtgctgaaaaacggaaaggatagagttatgctaatgatgagcatgaagaatgtgcgtggaccaggttttgcagtatgcatttcgtggcaaaacagagtagaactgctatctgtacaggcttcaaaacttatcctagctgtgatctgcatggacttgctttcagcatgatttcggggaagac

SEQ ID NO: 531479 - DNA, 364 bp, Homo sapiens
  misc_feature (21)..(21): n is a, c, g, or t
  misc_feature (24)..(24): n is a, c, g, or t
  misc_feature (164)..(164): n is a, c, g, or t
  misc_feature (229)..(229): n is a, c, g, or t
  misc_feature (231)..(231): n is a, c, g, or t
  misc_feature (253)..(253): n is a, c, g, or t
  misc_feature (256)..(256): n is a, c, g, or t
  misc_feature (299)..(299): n is a, c, g, or t
tgaattttccactctttcaanaanatggataaagcaccaagatggaaaaaaggggtagtgcaattaaaattgaccataaaacgctttaaaaataagacaaatcaacatgataatgaaccataatttgatctcaagatgtaaaaaaccaataaatatgtgaatcngcagaagaaatcttaagcacacggtgatttcatgtccccacaaaaagtaggcaacgtttcttagntncagaagtttcaagcttcacttntgngcagtagaaacaaaagtaggctacagtctgtgccatgtgatgnacagtttctgaaatgttttacaagactttgataataaaacccttaaacttatgttcgttccattt

SEQ ID NO: 531480 - DNA, 187 bp, Homo sapiens
tcgtggtcgatctagaggttcccagcggcgccttgttttgcctttccactcccccagccgcctctttgaccagttcttcgtgagtagcacctgtgggatgtctgatcttttcccgtccgtctacttccctgagatcccttctaccttcgtgccaccctcctttgcgggtcggcgtctgcggcggggg

SEQ ID NO: 531481 - DNA, 140 bp, Homo sapiens
tatctagaggatcccagaggcactcacgccagccatcgcggagagctcagagggccgccccaccctgcctcctccctgctgctttgcattcacttccttgtgcagagtcaggggacagggagagagctccacactgtaac

SEQ ID NO: 531482 - DNA, 269 bp, Homo sapiens
  misc_feature (86)..(86): n is a, c, g, or t
agcaggaatgaaagtggggctttttccgccccagggttccaggaaatagtttgaggcaaaatggagggtatgaggggccttcacanttcattttatcccttttacccatcacaaaaaaaaaagcaacaacacctggatttttccaaacaacttttatttcctcagagttttccttaatcctatggaacaaaaagctgcccctgaatagggcccagtatagggggttgtttttttactccctccccccaaaataaaaaaatagactttta

SEQ ID NO: 531483 - DNA, 159 bp, Homo sapiens
atgatttttgttcttttatgtgcgtgataaaatacaaagatgtgtgttgccaacttcttccttttaaagctaagggcaagcaggttaagctctttcccagccccttaagcccaagcccctttccaaagttggtcacagacaaaaaacttaattgccctt

SEQ ID NO: 531484 - DNA, 272 bp, Homo sapiens
ggtgctgttcctgatgtagacaatctatggatgaatgttgggcatttccgtaatggtttatgtatgggacctgcttctgcacagttgtttagctcagttaatgctagagcaacccacattaaccgacccagcaccatactcccctgaacgcctaaagacagaacagttggtcatgggctaaacgacaaaaaggcaagcttcaagatttatttagattcaaacattttggctgccatacgctgggcttgtttgccatataaccaataggtaat

SEQ ID NO: 531485 - DNA, 137 bp, Homo sapiens
atgagaataattataacaagctcatctgcctacgaaaacagactaaaatcgctcatgcatactcttcaatcagccacatagggatagtacaaggaaggggtaggctatgtgttttgtcagggggttgatagttcttg

SEQ ID NO: 531486 - DNA, 220 bp, Homo sapiens
ctctcccttcttttctgcctaacaccatctcatcgtttctggcctcactgtgggacaatccacacacattcttcttttcctctcctggcggggcacagagccacccccttggccttttcttttcttggaagggttctagttcaggcttcttattcatcagacccttctaggccccttcatctatggcaggttaaggcatgtgaggccttggttgggatgt

SEQ ID NO: 531487 - DNA, 1462 bp, Homo sapiens
  misc_feature (236)..(236): n is a, c, g, or t
ccgagagagtgcctcagttaaaataaagggaggaggaagactgataacggactgagttctggccgtcccgtcacccctgatttctggcaccaggcaagtcctcaacagtgcactgatgtatgtgcttttgtaacgatgtcaattctgtccgtttcacattggtgctgggtactagtggtgtcatggtggtcttgcgatgcagcatgaagcgtgtatgctaggtgaaggtttgcgantatagtcaagctgaaatgaatgttaggtggaatcgagaaagttggtggcagatagctttgctgcgaattgcttggagtgtttaagaaggtattgtttagtagtagtagcattgatcattccaatagtcctgaccgcaattggtcatagcagctagcgaatatgtcaatcgacttgtcatcgtgtagcttgtatggatcatggtgtggtccaactgatctatgctttacaaacattcaacacttctttcgtcctgatcataacgcgcgaacataggaagacaaagagcgaccaagaagacgaacaccacgatgaaatggacacacaaatgataaacagagataacaaaagagaagagaagcaaaagacatcgatcaaggcgagaacagcgaggaagcgcgcacccaaagtacatggggaaccgaacgaaaggcgaaccccaaccgcccgagaagagggtggcaagcgtccaacacgcaccgacaagtcagctgtaaggacgaacagggactgggacaccccctagacgaacccgccgcggcacctcgctgcgagacccagctccgggaacacgtaaacctaaggagggccccaagccgggacgacgccatacacggaaaccaggcactacaggaaacaacatacggacccacagcagatgcccagggagacaagcacagagcacaacaaacaaacaagggcacacaaccagggaagcatgcaagcgctgtgcggagaacaccctcaaccaaaggatacacagaacattaacggggagcaacaagcccactggcaagaggaagcccaaacagggcgcatgaacaaaaacacacaagagaccaaatacgcctataggaacacgacgagaggacacccgaacgcacacaacaaaacgaacgaacgcaactgaaaccataccgcacaacgcaggaggaaagcgaaggagccaacagaggaaacaaaattcaacacgagagcccagagccacataaaaaacaggggaccagaggaggaggagcggcgcagccggggggaggacggcggaccgacgggacacacagacagcgagaagagcacagcgatcgcggcaccaggcacagcggggccagacgggaacgccggaacagacacccccgcccagacggggtgctaaggagcgcggagcgcagctgcgacaagccaggaagcgggcgagggacggccgtataggcgaagctgagagcgacaa

SEQ ID NO: 531488 - DNA, 871 bp, Homo sapiens
agagaaattttccactagaagaaaatccttgctatctatttttccaatagaagaaaatccttgctatcatattaatttgatgaataaccaaatttattggcagtagttaaaaacaattttttttaaaacagtctcactctgtcgcccaggctgagtgaagcaatgtgatctcagctcactgaaacctccacctcccgagtagctgggattacagacatgcaccaccaccctcagctaattttgtaattaagtagagacgggtttcgccatgttgaccaggctgtcttaaatctcctgcctttacgtgatcggcccccccttaagccttccaaagtgctgggaattacaggtgtgagccaactgcaccctggcctgtagaagctaaaaatttccttgaagaaaaattcctgatttaaaaaataacctttatataagtccacgtgcttgtcgacaaatgcggtacacactgccatccatgcttgtctggaaacaagccttaaatagaattcagattacggctaacatgattttcacaaaacgcacattcaaggtttcccatctatgatttgccacaccatttttctggacaaccttttactttccattctatccctgacggattttgctacccaatacttgtggaatgcactaacgggtatgtaccttccagtggtccagaactgcatacctcttgtaccggcatgttgggccactggaacatataaggggcagcccatccgacaatagttggttccccatattgtgcttttttgcccgagattaacaaggtctaatccgcttacaaggaccaaatattcggccccacatctcccaccttgcaaaattagcggagtgggtctacaacccaaca

SEQ ID NO: 531489 - DNA, 1656 bp, Homo sapiens
  misc_feature (1282)..(1282): n is a, c, g, or t
tgctttgctccttagtcttggtcgtgtgtctgttccgtcgtgttgtgatgagcgcgccgtacggtgtgtgtggtctagctcatgacgtgcgtggatgcattgccgacgtgtgtttgtgtgcgcgccgtcggctatatgtatatgttctgtggtcgctgtgcccccccgtcgtgccgtgtgttctgcttagttggggcaaccgctatcttgtttgatcatctgatcttttagatgtcggcctgctctgaggtggacctctctctatccaacggtggtgatggagtccctcgcgatcgttcgttccctcccctccccccccctcctttgtgtggtctcccttttcggagccctttttcgtcccacagatttgttctttggcaccccacatgtatgacacacgaagctgggtgttttgcatgatggtggtacatcgcgcaccgttgggcccccgggtgggtgttttttgggaacagggaggcacctatccccttgttagatatgaagtaccagccgaggagaaatgttggagagttgtggttagtaacaccccacaggaaatttaatgattcccccgcggtggtttaatattcctcaagctcgtatctagtgctattagcgccaagtgtatgttggccccccgcgaagcccttattatgtttggcggcaacaaagaagggaaccacagaaagggttctctgttatttttaatcttgggggctcggggaccttgtaagttgaacccacgtggtgttgcaaaaaaatataaactttgtgggtgtgtagagcccccccccaacagtggcgaggcgtctgttagtaaggccgccacagcatgttgtctagcacaacttataaagatatacatatggagaagaagttctatttctcgttgttttgttgggtacaccgctcctgcacggagatgtgttctacccttatagagtgattatctttcacgcttctttaagcgcacgagaagtgttttcaacgggcactctttaaataaataatcgttttggtggtatatgaaaggtatgttctccacacaactcgggagaaacacatagaaatgttataggtgagtccacacagacgtgcccacatttcaccacggtgttataaggcacggccacaccttataaattttctgaaaccctataagattttagaaatggcacattggtaatataaaaaacacccctttataacccagcgtatatctctgtttatattttataccctgtttaaaccccacgagttgggaaactctatatttctgcgnactataattttctcttaaaattatttgagatgagaactcttgtgaggtatctcgttgttctctgcgctctttcacaacactgagaagtgagaattatagttttcactgagatatatatgccacccctctaatatatgtttaaaccacacatgctcttgtataaactctttgtggagttttttggtggcttatattgctataatgcacacttcacgcactgtggtattgttgagcacttttaaatatctttccctccacatttctgttaaattataaaaagatagtgtattttacacgtttcccgggagttgtgagaataaatgttgcacgtttttttaaattaatggaaaattaataacttttggttttgccca

SEQ ID NO: 531490 - DNA, 196 bp, Homo sapiens
  misc_feature (55)..(55): n is a, c, g, or t
gtgatacaccacgaaggttaaacacaagatgaagagtagactccttttgaatatngtagtcagacaaagtacgtccatcttccagctgcttgcagagaaagatcagtctctgctgatcagcgaggaattccttttccgtatcctgtgatcttggcctttctacattttctacttcgtatccgacgggtttcaacct

SEQ ID NO: 531491 - DNA, 83 bp, Homo sapiens
ttttggaaaactcaccaaattcgatgaatacattttcttcttaacccattcggaattattcctaataaaatgataaaatacgt

SEQ ID NO: 531492 - DNA, 285 bp, Homo sapiens
agaacctggcggacctttgactagcggagagacacacgtcttcttggcaccatcaaaggacatatctctctgttaccctttcaaactaggaactcttcaatacatcaggggttgtgagggctttgggcattcttttatcttgggtccactgtgagtgacagaggtggtgcggcctgggaaagatctccctcctttacattttctctatctccctacctcctcctatattctaaaactagtgcctacgcaacagaagggggcagggtgctacttgtaagaagagat

SEQ ID NO: 531493 - DNA, 785 bp, Homo sapiens
  misc_feature (109)..(109): n is a, c, g, or t
gggaggctgagctgggagaattgcttgagcctagaaggtcaaggctgtaatgagccatgatcatgccactgcactcccgcctgggtaacagagtgagaccttgtctcanaaaaaaaaaaagaaaagaaaatttagaggattatatagctaaaaataatttcttaacaattaacaaaactttgggtaaggaagcaagtttacaacagtttatctaaaatcgctgttccttttcacaagaaataactcagtctggaacaactatttttgtgagtgaaaatttcccttttacagaagaaaccaaatttgtaaaaccttaggtggtaatttatgcgaacccaattatagataaccttatagaacaattttttttaaacctttactggggatcaaaaagattcactccttgtaaatttccaataccatttcaatttttcaaattaacctttctgagaatagcaaggaaacttcctgataacagacagaacaacttggggactctcactcttgctcacgattttcccactgttttctgaatagtccacatcttttacttaaaatccttttaccttccgggcacgcacctggccacaacttcccgtggacataggagagctgtgagtccattaattgcgcccaatttaaaaacctgcgcgatatccatttcagtgggtcaccacacgtgcatatttctcatcgttccactgcgacccacgaccggattccttcgcgtctaccccacgttttgattgggcacacagactgtttggggcaccactttttttctc

SEQ ID NO: 531494 - DNA, 413 bp, Homo sapiens
gctgggggatggtgaaggaataatataaattaaaagtagataactgcactatctttatctcagttacctgcataataaataatgagaaatatattgtgacttataatatggtagatatgttacaaaaccaagtacttaatcttttacatcatgtcttcacctatttgtattttaaccagtaatttcaatggtctgaaacatgattctgagcttcacataatatcttaactgtggaactcaaaagtttgatcactgaatttggcagttattaatacctaggtacccccgctgttacacaggtatttagatacgtgtacctgaatgaagctgcttttgaattttgttatgttgaaatgcaagacataacaatgatggcagcaattaaggtcacagaaatcattaggtaaaggaaa

SEQ ID NO: 531495 - DNA, 159 bp, Homo sapiens
gacatttcttatttttaaactccaatataaaaatatgtgttaattgttatgatttgtgtcacatgctatgctccagggctggacaggaaacagtgtccccattctagtatttttataataagcaataaacaaacaataaacaatgacaacaagaagaga

SEQ ID NO: 531496 - DNA, 140 bp, Homo sapiens
ttaattcaagagcctttaagcataaagtaacataacagcattgcacggggccggcactgccgctgccttcactgagggctgcagtgctgatctgagagcttgtaggaggcaccatcgatgattacgtttaggggagggaa

SEQ ID NO: 531497 - DNA, 943 bp, Homo sapiens
gagagccggttcgcaccgacagacggacggaggtccagaccgcagccaaggcgcgcccgtgcccccggccgggtccccgccccgcatccagccccagctcccgccgtcccccacgacccagcgccatgcgggcctaggggggggcaggcgacaacttgcgccttgggcccacctgagacccggtccctaagcgcccaaagggcagaacgccctgaatcggggagctccgcgggggaaccaccgggcctcaagctggcccaggcgcccgggcccggtcggtgggcgtggttcagcacccgcaaggagtgacgcggacaacatgtattatatgtgtcgcaagaacaagaggagctaaggtcacacgactattggccacggaaagattttttataccttcttgtcaaggggaatacataataagcaatgtcgtattcaggggggtggcctgtgggtagcacaaaacttgatgctggaaaaacagatccgtgacctagcccgggtggaggggcaattattgctaagatttgggccccatccacatcatggtgattggcctaggacgtcacagactggtcctcaaggtggtgtggcagcaccatgactccgtacaagagcgtgaaaatgatgtgccaatgatacaagaccggacttcgggaagcgccccgaataggagccgagggtgcctccggtcgccaaacccggtattgtcgtgcatacgcagatacgatgcatgagcacaggcactgatactgggatgcaccgacaacaggtcctaaacatcgcggcgaagtgcggtgtccgacaagcgtagagtaattccggcctagacctggcaagcaaaggggcgtgatctacaggccgaggtaatcacgatacgcgtgcttacaaggtccacagtcgcaacgggggcagagcaacaaattgaacggagtctgtgtacagc

SEQ ID NO: 531498 - DNA, 145 bp, Homo sapiens
aaagggggggggggtttccccaaaaaaagggaaaaaattcgggaaaaaccccaagggtttggaatttttttttgtcctttttcccccaaaaaagggcccagggttttttttaaaaagcccaaaaaacccctttggagcccgtcca

SEQ ID NO: 531499 - DNA, 564 bp, Homo sapiens
ccacgcggtcaggtttgagtcgcgagcgagccttcttttgtttttgttatatgtttgcactatttctttcttctcatggataaaaactacacaaaagctaatggataattaatttaaaaagcaaggttacacattatctggggtttaagaaatttggtcagctgggcagtttcattcattggagcccagggtcatatctctcttatagccttagtccacatgagaatgattctgcgggtcttctcattcggagatcttcagggctctctcaggcatcctacacaggtgagggcgtgccaagtgggacaaaacaaaattccttctatcagtgtaccatatatgtggcattggtcagtgaagggtcattcacccagaacttatggggtttgccagtagtttggtcaaacttgggggtcaactttctccggtggctccggggtaaagcacattttctttgggtacaacataagctttaaggcctcatgtttgggtattagaaacttgaccaggaaagaaaaaaattaaaacaaacaaaacaagaacaaacagcgatttttaaacaac

SEQ ID NO: 531500 - DNA, 103 bp, Homo sapiens
tagtcagcctctctctctctattccaatatgtttcatggagaacatgcactcttttataagcaaacaaatatatgccatgtgagattctattattattcacaa

SEQ ID NO: 531501 - DNA, 242 bp, Homo sapiens
  misc_feature (42)..(42): n is a, c, g, or t
  misc_feature (49)..(49): n is a, c, g, or t
  misc_feature (61)..(61): n is a, c, g, or t
  misc_feature (79)..(79): n is a, c, g, or t
  misc_feature (99)..(99): n is a, c, g, or t
  misc_feature (112)..(112): n is a, c, g, or t
  misc_feature (119)..(119): n is a, c, g, or t
  misc_feature (147)..(147): n is a, c, g, or t
  misc_feature (177)..(179): n is a, c, g, or t
  misc_feature (194)..(194): n is a, c, g, or t
  misc_feature (199)..(199): n is a, c, g, or t
ctttctttctatggccttgttcttcatctgcaaacaagagtnaattagnggcaaggttctnttcacttctgggattganagaaccagcatttgtgaagngtttatatagggnctacagnggggtacattctgtttaaagatttatgnatcagctggcttgcttctctcctatctctnnnggggaacttgatggnatttntgccttagcagattgtacattatgtttttataacgtcttttct

SEQ ID NO: 531502 - DNA, 113 bp, Homo sapiens
gaactactggtcctctgtaaaaccccgatggtaaagagtgttatcgtctccatcatccattagtggtactgatgtgtcgaaaaaatgctgggatccgtcccgaaactgagaca

SEQ ID NO: 531503 - DNA, 450 bp, Homo sapiens
cggagggcggcggtgatctatagctgaataagcacggtcaggacaggcacgcagcggcagcagacttagtagcagcagcagtacccttagtaccaggtgcttaggtgggagaagctttcaggagagctgccttttgaagcttcttaacttcattgcctgattattctgtgccctcgatgttcttggcttcataacttttttaaacaccggattcaagaatctgttcgacctaagggccctctgtgccctttgcgtcagtgggacatgtgaaaactcattactgtgagaacacaaatccgctggttggggcatgaccgcgaattcattgtaaatttcgaatgcgtcagtgagacataacatgtccaatagcatagaagagagaacaactacctacaatggtggagccaaaaagaggacaggaaaaacgaacagatgaaaaaacaaacgaca

SEQ ID NO: 531504 - DNA, 235 bp, Homo sapiens
caagagaacctaggcttccatctttctccacagtccctagtgcacgctgagcacctattacagacttactgatgatctcactgaaccctaacagacccctgctacttcaagtgtagtccatagaccagcatggcattgcctgggactttcttagaaatgcagattcttagacactgtcccagatccactgaatgagaatctgcatgcttaacaagatgtccaggattcagaaaca

SEQ ID NO: 531505 - DNA, 771 bp, Homo sapiens
  misc_feature (10)..(10): n is a, c, g, or t
  misc_feature (66)..(66): n is a, c, g, or t
  misc_feature (195)..(196): n is a, c, g, or t
  misc_feature (227)..(227): n is a, c, g, or t
  misc_feature (234)..(234): n is a, c, g, or t
  misc_feature (248)..(248): n is a, c, g, or t
  misc_feature (262)..(262): n is a, c, g, or t
  misc_feature (281)..(281): n is a, c, g, or t
  misc_feature (321)..(321): n is a, c, g, or t
  misc_feature (327)..(327): n is a, c, g, or t
  misc_feature (329)..(329): n is a, c, g, or t
  misc_feature (331)..(331): n is a, c, g, or t
  misc_feature (336)..(336): n is a, c, g, or t
  misc_feature (453)..(453): n is a, c, g, or t
  misc_feature (510)..(511): n is a, c, g, or t
  misc_feature (528)..(528): n is a, c, g, or t
  misc_feature (548)..(548): n is a, c, g, or t
  misc_feature (668)..(668): n is a, c, g, or t
  misc_feature (687)..(687): n is a, c, g, or t
  misc_feature (707)..(707): n is a, c, g, or t
  misc_feature (744)..(744): n is a, c, g, or t
gtattttggnttttttattactggaggaacagagctaaaggcctaaagaaggccttacagtttatnacagttaatagaagagtaacatctttttacaataaactgttagaaatgataagtgtaaagttgtgcgtctctgcggctcctgaacttgaagattattatgaatagattggaccagcattattttttaannactttgatacttagaactttccaactttaanattcagnttctttaatggtgncaacagtagttgtnttgaaccaaaaatagtcangtaaataatgtctcagtaaagcaaaagcattatcttctcncatacnananattcngagttcatttcttttcttgaccttggaaatttctgttttccaaatacctaggggaaatgaataccttctgcgttgggtccatgtggcgatctggtggggtcatctgtgtccctgggncgggcccgtttgtcgctgagacctgtgctggttggggtttgctgtgttttgtctgcnntgctgggatcttctggnattatagtattatgggctgngcggtgaattctgtagtttttttccaagagttgttgcactgcacttgatttaaatgcagcagagagtgtcttgtttttcctaacaaaggttatccttactagaccatcccattcctgaanattgatgggtggtggtggnttcttaggttctatccttanatctctggattccaccttgggcggtggtctgaagttnttctttccccctttcattagatggtcc

SEQ ID NO: 531506 - DNA, 560 bp, Homo sapiens
acagacatactcagacctataaaaggcctgaagggtggatgtggcggtgtgcgctgcacccaccaagactgatgcctgatcaggggaggacactataataagtctcttgtacagcaacagagcctctaactacagtgcgctatctccatggggctctcagagtacgtccgagctccacaccaagaagagagccaacccacgtggatgcagctcggtactatagggctgacttgaaactatgataagactgcctcaaagcatgtgccacaaccccggttcttgcagacccccacagagtcttgagaaatccctcttgtggtccacataggggaaatatagaatacgtcaacagaacaggctgaagtcttggtcatctacatgcttgcaaattccagccttcctggcctgtgagtgtagcatgactaatagcaggaagtcagcaatctccatctttcacaaaaacgtgatgtgttacacgtacgctgcccggtgaacactattctccacctccctccctcccaaattgctattaccgctgggggatcctctagcagtcaact

SEQ ID NO: 531507 - DNA, 115 bp, Homo sapiens
gcaatcttagctcatgtgaagcttaaattcctgggctgaagagatccctccacctgtagcctccttaatagccagtcatgtgccagcctgcctagctatttgtattttagtattg

SEQ ID NO: 531508 - DNA, 120 bp, Homo sapiens
cgtgtacctcattgtatttatgctgactcgccgacactccatggtaagctatatgaagatgatctgctgcaggtgttctgagccctaggattcatctttcttttcaccgtaggtgtgggt

SEQ ID NO: 531509 - DNA, 277 bp, Homo sapiens
  misc_feature (208)..(208): n is a, c, g, or t
  misc_feature (231)..(231): n is a, c, g, or t
agttcgacgtgatgactctccagtagagaccagctctgtgtggctatcacatgtccgacacagttttagggaaactatttatactatatcaatcagacgccaggctcttactcacactttgcacttcacagtgcgcagacacatagtgttgcaatacgtgcacatgctcagtaatatatattgcctgagtacagttcattggaggtantcagtagtccgctggcgcctgantggtcgcttaggtggttctctgactgccccacagtacgcggctgtc

SEQ ID NO: 531510 - DNA, 193 bp, Homo sapiens
cttggtccccgcccatcgctctcatcacctcggccacagtcccccacctgccacggctcctccctcttgcagcagcacctgccctgtttcatcatggtgaggcccgtccgggtcccaacttggcccatgatatgacagcccttcttggggcaaagaatcgtgcgggtcctcgcagctcgaattcactcaatca

SEQ ID NO: 531511 - DNA, 123 bp, Homo sapiens
caccatttattcatgcctactttatttttctgatttcactaaagggttccaatcatatagattatgtgcttaagggcaagaaatgagcataattaagataccctacttaaaaaataactactt

SEQ ID NO: 531512 - DNA, 441 bp, Homo sapiens
cgtcgcaactaaggacaccagcagaacgcacggcgtccgtatctgcggtatgcagatgtatgatgcgcagcatgataagttggtattccaagataagtattatggccggaatgtcaagccacatgaatttacctctgtgctagagtcctttttccacaatggctaccaagtgcttgtgcaccatataccaccgctggtggagaagctgcattgcttagcacgccatgcatgcaagctcgtcggctatcgattttacgcaagcagttggctgctcatttacgacggggatattcgccgtcaaaacacactatggcagggtttcgaagcagatgtctggcaaggggctcggcgtccatcagcgcagtcagatgcgaacacggaacattcagagtcgtttccgcaaatgacgcctggatcagaggccagcacagggtaccgagc

SEQ ID NO: 531513 - DNA, 1236 bp, Homo sapiens
  misc_feature (1055)..(1055): n is a, c, g, or t
  misc_feature (1100)..(1100): n is a, c, g, or t
  misc_feature (1122)..(1122): n is a, c, g, or t
gacttctccacttctgttcctccccgccctggtgctgctccgggtcacatactcgtcctgagccggcttcagcctctccgcgcagaagtctcccggagccgacttctgagagtcgagtactcctatgtgaagactaccaagctcgtgttcaagggaaccaaggcgaagaggcgagatggaaagaaagtatcaaggagtgagctgaagccactgcccttgagaaccctctcgaggagtctgggctcatgaggatgccagaataagtggcagtaagaagaaaaagaacaaagataagaaaagaaaaagagaagaagatgaagaaacccagcttgatatgttggaatctggtggacagtaacaaactttggtgaaatttcaggaaccatagccattgaaatggatgagggaacctatatacatgcactcgacaatggtctttttaccctgggagctccacacaaagaagttgatgagggccctagtcctccagagcagttttcggctgtcaaattatctgattccagaatcaccctgaaatctggctatggaaaatatcttggtataaattcagatgaacttgttgttgggcgttcagatgcaattggaccaagagaacaatgggaaccagtctttaaaattgggaaaatggctttgtcgacctcaaatagctgctttattagatacagtgaagcagaggacatagaagcaaaaagtaaaacagcaggagaagaagaaatgatcaaggctctcctaatctctgtcagaccttcacctttatgaccttgccttatctaccagaacacagatccctcttactaaagattagatcctgtgctgaaagagaaaccaagaaaaaagatgacattccagaagaagacaaaggaaatgtcaaacaatgtgaaatcaattatgtaaagaaatttcagagcttccaagagcacaaattaaaataagtaaagaagacagtaaaattcttaaaaaggctcagaaagatggatttttgcatgagacgcttctggacacgccgaagctggactgtactgctgccatctcgnctcactgcaacctccctgcctgattctcctgcctcagcctgccgngcccctgccattgcagaaacgncaccacgcctgactggtcttcgtatttttttagtggagacggggttttgctgtgttggccgggctggtctccagctcctaaccgcgagtgatctgccagcctcggcctccggag

SEQ ID NO: 531514 - DNA, 1074 bp, Homo sapiens
  misc_feature (893)..(893): n is a, c, g, or t
  misc_feature (938)..(938): n is a, c, g, or t
  misc_feature (960)..(960): n is a, c, g, or t
ctcgtgccgcggcctcagcctgtccgcgcagaagttggccggagccatggccgagtactcctatgtgaagtctaccaagctcgtgctcaagggaaccaagacgaagagtaagaagaaaaagaacaaagataagaaaagaaaaagagaagaagatgaagaaacccagcttgatatgttggaatctggtggacagtaacaaactttggtgaaatttcaggaaccatagccattgaaatggatgagggaacctatatacatgcactcgacaatggtctttttaccctgggagctccacacaaagaagttgatgagggccctagtcctccagagcagttttcggctgtcaaattatctgattccagaatcaccctgaaatctggctatggaaaatatcttggtataaattcagatgaacttgttgttgggcgttcagatgcaattggaccaagagaacaatgggaaccagtctttaaaattgggaaaatggctttgtcgacctcaaatagctgctttattagatacagtgaagcagaggacatagaagcaaaaagtaaaacagcaggagaagaagaaatgatcaaggctctcctaatctctgtcagaccttcacctttatgaccttgccttatctaccagaacacagatccctcttactaaagattagatcctgtgctgaaagagaaaccaagaaaaaagatgacattccagaagaagacaaaggaaatgtcaaacaatgtgaaatcaattatgtaaagaaatttcagagcttccaagagcacaaattaaaataagtaaagaagacagtaaaattcttaaaaaggctcagaaagatggatttttgcatgagacgcttctggacacgccgaagctggactgtactgctgccatctcgnctcactgcaacctccctgcctgattctcctgcctcagcctgccgngcccctgccattgcagaaacgncaccacgcctgactggtcttcgtatttttttagtggagacggggttttgctgtgttggccgggctggtctccagctcctaaccgcgagtgatctgccagcctcggcctccggag

SEQ ID NO: 531515 - DNA, 1290 bp, Homo sapiens
  misc_feature (301)..(301): n is a, c, g, or t
  misc_feature (1109)..(1109): n is a, c, g, or t
  misc_feature (1154)..(1154): n is a, c, g, or t
  misc_feature (1176)..(1176): n is a, c, g, or t
gacttctccacttctgttcctccccgccctggtgctgctccgggtcacatactcgtcctgagccggcttcagcctctccgcgcagaagtctcccggagccgacttctgagagtcgagtactcctatgtgaagactaccaagctcgtgttcaagggaaccaaggcgaagaggcgagatggaaagaaagtatcaaggagtgagctgaagccactgcccttgagaaccctctcgaggagtctgggctcatgaggatgccagaataagtggcaggtatatcctgaatgaatgtgagatttttacnctgtgaatttcctgtgaggagagtaagaagaaaaagaacaaagataagaaaagaaaaagagaagaagatgaagaaacccagcttgatatgttggaatctggtggacagtaacaaactttggtgaaatttcaggaaccatagccattgaaatggatgagggaacctatatacatgcactcgacaatggtctttttaccctgggagctccacacaaagaagttgatgagggccctagtcctccagagcagttttcggctgtcaaattatctgattccagaatcaccctgaaatctggctatggaaaatatcttggtataaattcagatgaacttgttgttgggcgttcagatgcaattggaccaagagaacaatgggaaccagtctttaaaattgggaaaatggctttgtcgacctcaaatagctgctttattagatacagtgaagcagaggacatagaagcaaaaagtaaaacagcaggagaagaagaaatgatcaaggctctcctaatctctgtcagaccttcacctttatgaccttgccttatctaccagaacacagatccctcttactaaagattagatcctgtgctgaaagagaaaccaagaaaaaagatgacattccagaagaagacaaaggaaatgtcaaacaatgtgaaatcaattatgtaaagaaatttcagagcttccaagagcacaaattaaaataagtaaagaagacagtaaaattcttaaaaaggctcagaaagatggatttttgcatgagacgcttctggacacgccgaagctggactgtactgctgccatctcgnctcactgcaacctccctgcctgattctcctgcctcagcctgccgngcccctgccattgcagaaacgncaccacgcctgactggtcttcgtatttttttagtggagacggggttttgctgtgttggccgggctggtctccagctcctaaccgcgagtgatctgccagcctcggcctccggag

SEQ ID NO: 531516 - DNA, 225 bp, Homo sapiens
  misc_feature (224)..(224): n is a, c, g, or t
atacataagaaaaagaaaaacataaaaactacaattaagactgtatgtgagccaccatgcccggcctatttttctttttttgtagagacagagtctcactatgttgtccaggctggtcttgaactcctgagctccaatgatcctcctgcctttgcctcccaaagtgctgggattacaggaaggagtcactgtgcccagccagtttgcagttgtattaggattanc

SEQ ID NO: 531517 - DNA, 1166 bp, Homo sapiens
  misc_feature (799)..(799): n is a, c, g, or t
  misc_feature (805)..(805): n is a, c, g, or t
  misc_feature (944)..(945): n is a, c, g, or t
  misc_feature (972)..(972): n is a, c, g, or t
  misc_feature (1002)..(1002): n is a, c, g, or t
  misc_feature (1025)..(1025): n is a, c, g, or t
  misc_feature (1039)..(1040): n is a, c, g, or t
gacttctccacttctgttcctccccgccctggtgctgctccgggtcacatactcgtcctgagccggcttcagcctctccgcgcagaagtctcccggagccgacttctgagagtcgagtactcctatgtgaagactaccaagctcgtgttcaagggaaccaaggcgaagaggcgagatggaaagaaagtatcaaggagtgagctgaagccactgcccttgagaaccctctcgaggagtctgggctcatgaggatgccagaataagtggcagtaagaagaaaaagaacaaagataagaaaagaaaaagagaagaagatgaagaaacccagcttgatatgttggaatctggtggacagtaacaaactttggtgaaatttcaggaaccatagccattgaaatggatgagggaacctatatacatgcactcgacaatggtctttttaccctgggagctccacacaaagaaggggaaaatggctttgtcgacctcaaatagctgctttattagatacagtgaagcagaggacatagaagcaaaaagtaaaacagcaggagaagaagaaatgatcaagattagatcctgtgctgaaagagaaaccaagaaaaaagatgacattccagaagaagacaaaggaaatgtcaaacaatgtgaaatcaattatgtaaagaaatttcagagcttccaagagcacaaattaaaataagtaaagaagacagtaaaattcttaaaaaggctcagaaagatggatttttgcatgagacgcttctggacaggtagctatttatttacttattttcantgtttncagtagccaatagaaatggcatgtagaaaactatattctcttaaattactgtagttttcacattttgtcttcatttctaatttatgagtgtggcaatattacctagagaggacatcatgagttgggaaaagactgtcannaaagaatatctaaaaattataacgatnctaagtatatactttaagaaattcaggttngactgtatctacttcataaattnatcattatcttttnnataactattagaccagaagtagaaaggaagcgttggtcgtataaaaatttggtgggttctgtaaaggagtgcagttcccttaaaataaggtttttaattaccaattaattataagttaaaagtgaa

SEQ ID NO: 531518 - DNA, 285 bp, Homo sapiens
gcttaaaacaggcttgcttatttggttttgtcaagttttacgaaaatatatgatatatatttatactaaaactatataatccttagatttagggaagcaatcagttaatgtctttagcacactaaagcagtattaaacacaggtacaaggtggaaattgtagaaactgaagaaacaggcaaaatgtctatggtagggataaagggttaggtattatgtaaatatgttatttctctctttacataattgttgtgaaggtctcacttttccaggtgtatactgggtt

SEQ ID NO: 531519 - DNA, 189 bp, Homo sapiens
taacgcgctgatagcctcctaacgcgctgatagcctcctaacgcgctgatagcctcctactgcgctgatagcctgctaacgcgctgatagtcttcaaatgtgctgcgattacgggcgcgagccaccacgctcgtgacttttgacatcttttatcaggctttctgcgccgaggacgctacacacatagag

SEQ ID NO: 531520 - DNA, 737 bp, Homo sapiens
  misc_feature (301)..(301): n is a, c, g, or t
  misc_feature (529)..(529): n is a, c, g, or t
  misc_feature (535)..(535): n is a, c, g, or t
  misc_feature (617)..(618): n is a, c, g, or t
gacttctccacttctgttcctccccgccctggtgctgctccgggtcacatactcgtcctgagccggcttcagcctctccgcgcagaagtctcccggagccgacttctgagagtcgagtactcctatgtgaagactaccaagctcgtgttcaagggaaccaaggcgaagaggcgagatggaaagaaagtatcaaggagtgagctgaagccactgcccttgagaaccctctcgaggagtctgggctcatgaggatgccagaataagtggcaggtatatcctgaatgaatgtgagatttttacnctgtgaatttcctgtgaggagagtaagaagaaaaagaacaaagataagaaaagaaaaagagaagaagatgaagaaacccagcttgatatgttggaatctggtggacagtaacaaactttggtgaaatttcaggaaccatagccattgaaatggatgagggaacctatatacatgcactcgacaatggtctttttaccctgggagctccacacaaagaaggtttgtgtntggaanggaagatcctgccacaagtgtagattttaggacattcattcacttaggccaaactctaactagtctcaaacattttccaaannaatggaaccattgcatttgactcttccatttttttaaattccttaatatgtaccaggccattggcaaggtccctctttctaatataaggcatttggaaaacattccggtataggttcca

SEQ ID NO: 531521 - DNA, 504 bp, Homo sapiens
gggaactcaatgtattcgtcatcacttgaaatgtggtagcgcttacaaagttgatcgattggattctttttaaaaatcaaaagccaagtgaacaacaggatatatagactgataaactatttaggctgacatagatattttacacacttgtcttcaacctgtgactctcgtctgtttacacttcgacacacacgacattactaacgacgttactgtttgtcaattatttctgaccctacctaatattgttacacaactctccctagttcgacgtattctatagaagttttacaaacggacacaaggacacctggacagcctattctctgtcctgcgagttcgaaatacaaccttacgacccttcattaatatatacccgcccaccaagaacattacaacacttttcataccaaggggtctaaaaaaccttatttaccaacccaaaatgcttccttgactccgtaggtatcaatatataggttaatcaatgggagggcggggtat

SEQ ID NO: 531522 - DNA, 121 bp, Homo sapiens
catagtgctcacacctgtaatctcagaacttcagaaggcctattgtgggaggatcacttgaacccaatagttcaacgtgatatacaattgtgccactgcactccaggcaagaccctgtctc

SEQ ID NO: 531523 - DNA, 661 bp, Homo sapiens
ggccagacgcggctgtgcacatacacagaggggctcacgagacccatgactcctacatactcttttgtgtgtccgccaccacccactgtcttacctcatttcaaccgcaccacaccggctgaagcgggccacaatgggcagtcccccatggcagccctgatcttataagcagacaatgcacggggcagtcatgccttaaaagatagccaaccagggtcacttcacttccacgaggaatatgcaacacggcggccttttcgtgctctatgaaccaaagaaagctgggtcccagagaggtggggggccacggagcaagcgacacacagaagactggagccacgtgcaccctgtcagacttccggacttctctctgtgaaccagagccccgctgtgctgtaccctctgtcacgagcggctgtgggacacaccattttgtgcacagcccgtgcgtgccttcgcacaaggtctggtttccttggttcagacaaagcattaaacagcacggagctcttggagagaggtatagtgccccatggggaaaaaatggccccttgtggggctccaatgtgcccctgtgcgctttatgccaacgggagaaatgcgccattccttcttggagatatgagggatgagagagactctcgacatttttcgggtttag

SEQ ID NO: 531524 - DNA, 209 bp, Homo sapiens
catctacaatatacattcacatgttagtaagatcataattagtcaagatatgttacaaggatgcgtattctcattgttatttacacatccatgcaagcattcctgtgggggaaaaaaatcacaaaaatttatgcagattatgttaacataaacccatggtccggagacggcaccgggtcaccgagctcgcaattcgacactccatggtc

SEQ ID NO: 531525 - DNA, 828 bp, Homo sapiens
cagctctcactgagacagtgatctgggaggattttctggatttttttctggcaaaaagagcatcatttctgactccaagtggaagggaatggataaagaagaaaaatatcagtgagactaccgtgacaccattgcccgttctttcatgaggttttgaagatgtctgcaagacacttctaatttgcaaaaaggaatagcagtttgatcttcggtaaacactttggggcatggaattttaatatagcagtaaatgttttactgtttcttttaaaccattcttgatattgttgtgaaaaacctaactttagcagagagtaaaatttaattcaagattgttcctcgtgcactggagtataatcatttgattttttttcttctcagcgatatggaaattatggcttatgattaaattgcatattccaggctacacaaatttatatttgctcctgtttgatagtgtcatgaaagttcaggaggagaatgcaaaaagaaactaatgctatattataattaagaggaaaactccattaaagaaataagtactgttttaagtggctacttatttgtgtttctgtcttaagtgagtacagttgcctccctggtgattcagcaatgaagttctttgcagctctgagctgtgtcggaatgcgtagacagttgatgaagaaggaatcaatgcaaatggattcatgggcagggagtattaagtaactcagtggaaagtcaggacaagtgttctgtaaactgacgttcacttaccattggacagtttatttacctttacacaagggcacatttaaaattctaggctcttgtgaataatgccca

SEQ ID NO: 531526 - DNA, 355 bp, Homo sapiens
tctagaggatccctgaggcagaagatcactcccggagtgataatgcttgcagggggtttgtgtgcgtgcgggatgacgcttgcagtggggtttgtgtgcgtgcgggatgacgcttgcagtggggtttggtgtgcgtgcggcgatacgcttgcagtggggtttggtgtgcgtgcggcgatgacgcttgcagtggggtttggtgtgcgtgcggcgatcacgcttgcagtggggtttggtgtgcgtgcggcgatgacgcttgcagatggggtcaggtgtgcgtgcggcgatcacgcttgcagatggggttcggtatgtgtgcggcgatgacgcttgcagtggggtccggtgtgtgtgc

SEQ ID NO: 531527 - DNA, 323 bp, Homo sapiens
gcacgaggtttgtctcccctctccaaagtaaggaacccagctgggcgtggtggctcactcctgtaatcccagcattttgggaggccgaggtgggtggaccgcttgagtccacgagtttaagaccagcctgggcaacatggtgaagccccatctctacaaaaaatacaaaaaaattacccgggtatgatggtgtgtgcctctagtcccagctacttgggaggctgaggtcagaggatggcttgagcccaagaggcagaggttgcagggtcaagatcgcaccacttgcactgcagcctgagagagagagagccagaccttgtctc

SEQ ID NO: 531528 - DNA, 149 bp, Homo sapiens
ccatagcaaaactcagagatctacacctaggcatacaatctacactcttaaaaaacaaagacaaagagaatcttgtaagcggcacaagtgtcttatcacacaagagatccttgagcataacacagtatttttcactcagaaaccaatgc

SEQ ID NO: 531529 - DNA, 1050 bp, Homo sapiens
gatacctcctcatcaactctgacatagtgtgctgaacaggacatgtacgagtggactacgatcaatgcgtgcggcggcgggttgccgcgcggggggcgggtctggtgcggagtaggtggtggcggatatggtcgaggcagtctgtcgatatcccggaacggtacttctgccactgctgctccgtggagattcgtcccgtgcctgccggaattattatctgtccttagatgactgcgagtctgcgattttatcgaggaggctatccccggaagagaccagggatgctacagaaaaatggttctgcgcccgctccagaagctccctacaagaccagatgccggccatgcggctggaagcactgtggaccaagcatcctgtgcactgctggcggcacgggataactgagatctttgcttatctggcaattctttgatgagcacgcatgtgcggatgaatcccccagcgatttcccatcctggcgtgtcgcatggctgacagaacggcagaggacccttgatgagccggcgggataagagagcactccgatcccggacagcggctacggggcccgagagtcccgtcgtcgcgtctcaccacgcggcgggtcaccgggcggcaacgaaggcgtcccacgctggaagggatcatccagcagctcgtcgacggctatcattacgcccgccagcatcccccaggcctgtgctcctgtggagtcctgcactcaggacctatggagtagcgcctggtggggcaacggcgtggaatgccatcattacacagctcctcaatcaagttgaaaaacacagggccccccacccggcgattaaagagaaatcccagggctcccccacggcccgtcatgaggagcacgtagtctggatcaaatgcctgtgtgcaggagaaaccgcggggggcgtgttgggagtgcttgtacctggtcccagtgttttccgcttgaaaagccctgcggaaatcggagaaggcagccccgggggtttccggcccccagacaacgtgtgtggtcccacaaagcggtggtcccataagccc

SEQ ID NO: 531530 - DNA, 1232 bp, Homo sapiens
ctgttttcttttttctctggttggtcgtgtgttgttgtgggtcgaagggaggaggcgcagagcacagtgtagggtgttggagcatcttcttgctgccacgtgttgtgtgcacttgcgcgtctgttcgcttgttccattgtggtctgaaacaacatgggggtctgccccgttgttcgtccgtcgcttttgtttgcccccgtacgtatctggtgcgccactttgctccctttctccgggttttcccccccgggggccctttggggctctccagggtggtcgtgaacccttacacgggttctctctctttctttgggggcacatccgaggtgggcgcccaccccagtggtccatgtgtgtgccctcccttgccgtggccccagtggccaatgccctctggtgtccgggtgggagtccggtgccgggggtcccaggccagggtctctagctgtgtgcccgacgtctcgttccccacgggcgtaggcttgtctgggcactcaacgtattactgtcgtaacagtacccagtggccaaaccgtcggtgcgcccgtccaggggaacccccggtcgtaagtcgcccaagtggcactgtcccgtaagtgcgtgttcccgcgtaccgcgaaaagttgtgtaggccgtagtattatcacagcgtatcgccagtgccccccaacgtgatagtacgtacacggtagggggccccacccagtgaaggtgaccccccccagtgacgtccgtgtacaacgtagtgtccgtcgagtcaccccctacgtgtaaaaagtagtgtgtaaccaccaaacgtgtcccaccgtaccgtctccgtccacaccaaagcccccagtttaagaagtgtaaaaaagtgtgattgacaccaaacctcgtgcaggaccccaatagtgtgaccgagaaagtcgtggtgtcgcgtgtcagtgtcagtggccccccaccccagtccgtaggccgtatcccgcccgccacggtacgtgagtcagtgtcgtagtgtgtcccccgtcgtatgttgagtccccacccgtccacaagtagtcgtcagtccacccaccgacgtatagtcacccacccccaccagtggcgtatagtccaacgtataccctccaaaccaagtgagtaaccagtacgtccgtgtacacgtagtgtccgtcagtcaccccacgtgaaaagtagtgttaaccaccaacgtgcccccgtaccgtcccgtccacccaagcccccagtta

SEQ ID NO: 531531 - DNA, 510 bp, Homo sapiens
  misc_feature (2)..(2): n is a, c, g, or t
  misc_feature (86)..(86): n is a, c, g, or t
gnaccccgcgcattcctcctcctcctgagaggagctcagcggaagaaggggaagcttattaagctgatgaaagcagtgaagaagangcaggcactgttggagagaagggcatttcaccatcaaaggctgctggagaaggtagtaaagcagggctgtcaccagctaattgccagagtgaccgtgtgaatctggagaagtctttgctgatgaagaaagcagctctccccactttcggttctgggcattgcacagctgaagaggtgtttgcatctgaagatgaatctgaagaaagctcctcactcagtgcagaggaagaagactcagaaaatgaagaggctattagaaaaaagctttcaaagccttctcaagtgagcagtggtcagaaactggtgccacagaacttcattgatgagaccagtgatatagaaaatttactcaaagaggaagaagatcacaaggaagaaaataatgattccaaagaaacgtcaggtgccctcaagtggaaggagg

SEQ ID NO: 531532 - DNA, 384 bp, Homo sapiens
gtaaggagtaacctgaaggtgtagaattggatacagatgaaccttcaatgggattcaaggctcacctgagcgcgttgactggagtccacactgtcagacagaaagactatggtgaaaggaggaacgctatatgatgatgattggggaaacatcaaaataaaaagtggaatgactctactaatgatggggtgagcagatgctcttccataagaaccctcaggcctgtcttcgtagaatacatgacagaagaacagctagtatctgctatggagtcaccatgtggattggcaaaccttggtaacacttgttacatgaatgccacagctcaatgtattcgatgtgcgcctgctcgatgcccttattactgcagtccttagagtttgt

SEQ ID NO: 531533 - DNA, 610 bp, Homo sapiens
ggatatgtcgacccacgccgtcgggagcaggtggttgtgacaattcactgctggtgcgggcgctggaccgcttccacctggcgctttcgggctcccggggtcctgctggcctgctgccgggctcggagacgctgccacggagactcgtggaacgagtggcccgcgagcgcctggtccaccacctgcagggtctccgggcggccttcctgggtctgcctgatagacgtccgtcaggtcgctgttagacacctcgctgttctgggaaggagggccctggcctggccgagttgctggccaatgtggccagctccatcctgagccatcattaaggcctctctgacagacaatgcaccttttctagccgaccaaagaggtgttcttctccaacaagccctacttacagtgaggtgacgttctgcagtcagggagtgtccagtgagtggtcctctagtcgtgggtcgttcgtccgacgtctatgtgccaggacggctccagagctttcgtgctgacaggcctgggtgagaaggggggtgcctacacgcacctgccctgttccatgttgcatctcctcgcctctgcctggactacgagacggcgcagcatctcctag

SEQ ID NO: 531534 - DNA, 667 bp, Homo sapiens
  misc_feature (546)..(546): n is a, c, g, or t
gcactgcgtgcagcctgggttcccgcccgcgcctctccctccacacctccctgcaagcagagggagccggctccgatcttggccagcccagagaggggctcccatagtgcagcagcaggctgaagggctcctcaagcatggccagagtgggctctgaggccagcgagcaagggctgccagcatgctgtcacctctcacttccttctctctctctttctttcatttttgagacagggtctccctctgtcacccaggctggaatgcagtggagcaatctcagctcactgcagcctccacctcctgagctcaacccctcccacctcagcccctaccacctcccctcatcctcccacttcagcccctcaagtagctgggaccacaggtgtgcaccaccatgcacagcaagttttttcactttttgtagaggcagggcttgctatgttgcccaggctggtctcgaacccctgatctaaagcgatcctcctgcctcagcctcccaaagtgctgcgatcacaggcatgagccaccgcacccagcctcctgctntctttctgcatctccctctgttcctcctcttggtcatttgttcattcatttgacacacattcagtgacacagtccagtgccagagcccccttctgggtgctgcaaatgtggcggggcgcct

SEQ ID NO: 531535 - DNA, 150 bp, Homo sapiens
  misc_feature (77)..(77): n is a, c, g, or t
gagagaaagaaaaaggaagaaagtgagtaaaccaagttttcctctttccaattatacacaaaggttgccttggtgcntgccaatctgctatagggatacaatctctggaggctatgggtgggaatgaatgcaaggatatatagagtatag

SEQ ID NO: 531536 - DNA, 165 bp, Homo sapiens
ggtcgctctagaggtccctcaaacctgcagccctgtgcatgctttctcagtcttgtggtggtactgtatacaatgactagcttcccctcctcccctctttaaatcaccattttccattggtagttcgatagaaattttttttcttaaacgttgcatattactggt

SEQ ID NO: 531537 - DNA, 130 bp, Homo sapiens
  misc_feature (72)..(72): n is a, c, g, or t
cgccccgtgcagcctgtgtgccctgtgagtctatgccccatgagcatgtgtgccccatgactctgcgccccntgactctgtgccccgtgagcctatgtgctctgtgggtctgtgccccgtgagcctgtgt

SEQ ID NO: 531538 - DNA, 412 bp, Homo sapiens
acaggctttcgcctctgcgagtaaatcacgagaggacacatagaaggtgagccacactaattatgaaaatccacagtgtgaaaggacagcgctgccctgaccatacgccaaagagttcaaagccggcctccagaacatggtccagaagagctggagggagcgtcaacatccgggggactctgctaatactcgggcccagctccacaagctgcgggtccatcacaaaggacagccgcactaggctaatatcgcagacctgggaacactgccactgccattcaggggcgtatatggacaagacaaaactggcttggctcttcgggccaggggtgccttttccaaggatactcagagcattttgtgggaacctttcactcaaagtgaaaaataattcctaaaacgtgcataaaaa

SEQ ID NO: 531539 - DNA, 1630 bp, Homo sapiens
  misc_feature (374)..(375): n is a, c, g, or t
  misc_feature (739)..(739): n is a, c, g, or t
  misc_feature (1536)..(1536): n is a, c, g, or t
agcggaaggatcactcatgcttccaggctgcacagagcactgttggatctagctgaacgaatgttttctctgtctctgggtatcaacggtttctgtacagcacagattatgacagcgtctttcttaagagacaagttctcactacgttgcccaggctggtgtcaagctccgggcctcaagcgatcctcccacctcagcctcccaaagcgctgaaattacagacgaagagaatgtttaaatttcatcaaatgaaacatatttttgaaatacttgataaaatgagatgcctgagaaaacgttctacagtgtcattcttgggagttcttgtcatttttctcctttttatgaacttgtacattgaagatagctatttnnggaaggagacaaacaacttataagggaaacatccacacatcaactgaattcagaacgctatgttcatactttcaaggatttatctaatttctcaggagccataaatgtcacctatcgctacctagctgccacacctttacaaagaaagcggtatcttacaattggactttcttcagtaaagcgaaaaaaaggaaactatttacttgagacaattaagtcaatttttgagcaatccagctatgaagagctgaaggaaatttcagtggtggttcacctagcagactttaattcttcctggcgtgatgccatggtccaggatattacacagaaatttgcgcaccatattattgcacggaagattaanggttatacatgctccagaggagtattacccaatcctagatggccttaaaagaaattacaatgatccagaagatagagtcaaatttcgttccaagcaaaatgtagattatgcttttctgcttaatttttgtgccaatacttcagactattatgtaatgcttgaagatgatgttcgatgttcaaaaaatttcttaactgccatcaagaaagtcattgcatccctagaaggaacttactgggtaactcttgaattctctaagcttggctacattggtaaactctatcattctcatgatctcccacgtttggcccattttttattaatgttttatcaagaaatgccttgtgattggctattgactcatttccgtggtctgttggctcagaaaaatgtgatccgttttaaaccatctctctttcagcacatgggctattattcatcatacaaagggacggagaataagctgaaggatgatgattttgaagaggagtcatttgacattcctgataacccccctgcaagtctgtacaccaacatgaatgtgtttgaaaattatgaagcaagcaaggcttacagtagtgttgatgagtacttttgggggaaaccaccttcaacaggagatgtttttgtgattgtatttgaaaatccaattataataaaaaaaattaaagtaaatactggaacagaagatcggcaaaatgatattttgcatcatggagccctagatgttggggaaaacgttatgcctagcaaacaaaggagacaatgttctacttacttaagactaggagaattcnaaaatggaactttgaaatgtcaggtgtaaatccaaaaattccatttgatataccttgtatgaggatatatgtcaccaaaacacaaaaggaatgg

SEQ ID NO: 531540 - DNA, 646 bp, Homo sapiens
  misc_feature (374)..(375): n is a, c, g, or t
agcggaaggatcactcatgcttccaggctgcacagagcactgttggatctagctgaacgaatgttttctctgtctctgggtatcaacggtttctgtacagcacagattatgacagcgtctttcttaagagacaagttctcactacgttgcccaggctggtgtcaagctccgggcctcaagcgatcctcccacctcagcctcccaaagcgctgaaattacagacgaagagaatgtttaaatttcatcaaatgaaacatatttttgaaatacttgataaaatgagatgcctgagaaaacgttctacagtgtcattcttgggagttcttgtcatttttctcctttttatgaacttgtacattgaagatagctatttnnggaaggagacaaacaacttataagggaaacatccacacatcaactgaattcagaacgctatgttcatactttcaaggatttatctaatttctcaggagccataaatgtcacctatcgctacctagctgccacacctttacaaagaaagcctactcaggaggctgaggaggccaaggcacaagaatcgcctgaacctgggaggtggaggctgcagtgagctgagttcgcaccactgcattccagcctgggcaacagagcaagactccatttc

SEQ ID NO: 531541 - DNA, 205 bp, Homo sapiens
gcttgatctcaggaggcggaggttgcagtgagtcgacatcacgccactgcactccagcctgggggacagagtgagacttcgtctcgaaaaaaaaaaaaaaaagtggacgggagggccaaaccaaagggggggtttaaggggggggggcaaggatggaacccaaggggtgtttaaacccttttgcaggcccgttcctcaatttggt

SEQ ID NO: 531542 - DNA, 302 bp, Homo sapiens
gatgggaggagaaggacgggtgtaagagcttaccatcaatgagaaggcatcatggagcagaacttccgggagcatggtgcgggagctggagagggagaggaggaagtgagtggcgtgcgctggagcagcgggagcagtgatgctgtggaccaagtgaatggtgatcatggatgctctggatgagagagccaaggtgctgcatgagtgacaagcagcaccgggagcagctgcatagcatcagcgactctagtgtggtctctgccggaatttggtgcattgatgagcaattactctctcccccc

SEQ ID NO: 531543 - DNA, 782 bp, Homo sapiens
tctcattacctccagtggtcatcgtcatgacagcccttcactcccccgcagagcctcaggagccgtcacatgacagtgcgtttcaaattgccaatctggcagactgcccgcagaatcattcctcctcctcctcgtcctcctcagtggggagctaggcggagccaacccagccaatgaagaagaggaaaaggtagtggaggtctagcgatgccctgcataagagtgctcgatcaacttgtggctgtcttgcagcagtttgctagtgatacctgcataaacggggacaccagcatcatgcaacatatgtagaaacatgtggaagcagctcaagagtaaaaaaaacctggcacattcactagaaggcttcttgatagtcaaggagtcttacatataactggaagaagactaatttctaaaaagaggcttcacctgcttaaccttctcactttctccatgcaataaacatgtccgatacttactttacatactgggggatgtcatacatggttctccaatatgtatgcagtagtacaatatcaacgatgacacagctaaatattccaaagaaacaaccttgtgtcccagacggctgaaagcatttccgaatggattctctttaagagcaggtagttatatacttatttttccacaggcatttgggagattgaaaggggcaaacgtaatgtcattgatatataagaagactgctttagtcacaccacgtgaagaaaatatacagaaagttaatatacatattaatgtaatagggggctttcttcaat

SEQ ID NO: 531544 - DNA, 958 bp, Homo sapiens
aagtgtcatttgggtgtcgcgtggggccgaatgcaaatagttatggctgacaagatcacagcccctgggcagggtgcacagtggaatgtgtgaaagatcagtttggctacattaatatgatagtagagagatagcaagaagctctttataccatgtgaaagaagttcaggatggcataggagctacaggcacggagatgaggatggagttctcagtgattactataatcagccgcacctggccaaaggtgcacggcgccgtgtaaatgttgggcggagtctgtgacaggggccccaaaggactgtttcgcaagcttccctcgagctgatcggtatgagccaattcgcttgaagggcaattattcatttcttggaattgatagccaagagtccttcggcctaattggttaccattcggtccagcccaaggggtaaccaagataaacttcaatcggaggttttgagtgaaggaacaaagcaacaagatccggtcacagcctgggctttccacttggaatttaacacaacattccagcaaatgaacaccaaatttaaattccaacgtattgatccaggttggcggggcacttcttgttgaaaagggatctgaactatgtcacagtcttacaataccactccccggaaaagtcttggacaaatactttatttgttacgtcgagcacaaatcaacagcagaggttgtaaacaccatttcgtcgttgggaatgtttaaaaacacaacataacgtgaacgtgtaagaaaaacccatttccaattatttgcccaggttgcagctggacaaaacttatgggttggcgccttatatgttgcacatctacggcactttatggggcgcattaagagcaacaggtagttgagaatccatttgcctgtgtccgtgaacacctcatcacgacttgtggccaataaatcttgactatgaaactatagccacccg

SEQ ID NO: 531545 - DNA, 343 bp, Homo sapiens
agtccctttccatccctgggatgtcaggcctttctagaaggtgcaaagaaatatgtttgtttgtgatataaatatccacagcctttcttgccttctctcaacagtttgcaggcttgattctcagagctttgctatattgatgaggtagaggagagctggatgcattcctgtcagaaagaatgaagaatgtctaagagagaaatgcataacgggggtccaggtgagtgaagggaagattctagaaggtgagttttggttggagaagatgttggagagtttgggatgcgtcataccagagatcgaagcccagttcttgtgctgtgtaggatggaaaggtggatct

SEQ ID NO: 531546 - DNA, 1663 bp, Homo sapiens
ggctgcctgagtcgactctgcgccgccgccgcgatggaggccgccgcccagttcttcgtctgagagcccggacgtggtctactggcccctgatggcccatcgacggctgcacatactgatgtacctgggactgacgcgctgtcatgccgctgatggtgtggctgttctcaatggtgcaccccactgtccactgcgcttcagcttccggacctgccctggcaggtgcccctggctcggggtcatgcttgtctggctggtgtgcgggtgaacaactggctccacactcaccagccgctggtgcttggccaatcgactgcgttatgtcctgtgcccactgctgcagctggcctgcaaggagtgccaactactacgtgctcgctgactcagtgcgggcaccgtgagcctgggcctggactgccgagggccaggaggtgttcgtacccttcagcgcggatgctgcccatggtggagcccaacgacctcgtgtacgatggctgggacatctcgtcgctgaacctggcgaggcgatgctggcgcgcgaaggtgctggactgggggctgcaggagccaactgtggccgcacatggaggccctgcggcccggcttctgattacatcccgaattcatcgcggccaaccagagcgcgcgctcggaccactcataccaggctcgcgtgcgcagcactgcacgaatcgcatggagcatccgagactaccggactaacgaggtgctggaaaaggccatagtgtgtcgcacggccaaacgcaccgcctggaagcgatccagcctcagacagcagagacccttggcacattatctgccggagattcccccacaattacggccactgcagcgtgcctcctggatcccaccggccactcataccgacaccatcgcggcacacagaactgtttactctccactttttcggctcagttacgcgatagttattaacaaacaagaaacacaccaagaaccacacacaagccgctctacaagaagtacacacagctcaacaacgcaccagcctaccaaaaccaccaaccaaccccacaccaaccctacccaaacactcctaacactccacaccaccacagaagtcaacacaacaacgtaactcaacaacagaccaccaacaccaaccacaacaacacacctcaccaaccttgcgggagaggggcgcaggcagaccggagcagggggcaggcggagcgaggagggtggagagtgggcgaggagggacgggagcgggaaggagcgccgagcgggcgggagcgggggcggggcagcagcgccggcggagggctcgagaggggggggcacacgagaagcccgagcgagacacggacgtggcacgggcgggacggccgcgtgagctcgagagaaggagcaggccaggggcggccgacggcgcgacgcgacccgcgccagcacagcccgcggcgggagcggcgaaagtgagaggcagcggcacgacggccgggcgcgccagtcggctgcaggcgcccgagtgggcggggggggaggggcgcagcgaggggagggcgacggaaagcgacggcgacagacggaggaagagcacagcgagagacgcagctcccgggccgcgcggactcacgtggtaggcgccgcacggggacgcgacggcgactgagggcgccac

SEQ ID NO: 531547 - DNA, 961 bp, Homo sapiens
  misc_feature (131)..(131): n is a, c, g, or t
  misc_feature (512)..(512): n is a, c, g, or t
  misc_feature (560)..(560): n is a, c, g, or t
ggccgggcgcggtggctcacgcctgtaatcccagctctcagggaggctaagaggcgggaggatagcttgagcccaggagttcgagacctgcctgggcaatatagcgagaccccgttctccagcaaaaaggnaaaaaaaaaaaaaaaccaaaggaaaaaaaaaaaaaaaaaaaaaaaaaaaaaaaagtgtgtgggggcgcgcgccctgggccccgggaaaaggtttttaaaacccatcgcggtgtggggcgcgcgcggggcccccaaggtgtacacggaacactggggcctcaacggcggtgttccccgagagaaaacccggggccagaacacagggggggggttttcccccaaaaaaaaagcgcccgggggtgaaccccaggcgcgttttgagacaacacccacaaggggagagttcagagaggcgctcagaaagggggcgtctctaataacaaccgagggtgctcccaggcaggaggcgccgcagtattaaaaattaaccgcccgcgcgtngtgaggttacacaacacgtcactcgcacatacatccaccaatcagcangcctaccatcaccaatcactatctcagctacgcgcaccaactcagcacaccacgcaacctctagcaaattagctcaagtcagcacaacccttcactacaacacccacactacacagctcacgcaccgacacccccaacacaacgtcccgcttcaaccaacaccacacttactactccctctcctcacaaaccccagacccactaactacaaaaccactaactctaccaccgaatactaacctccccaactggtagccacacatcccaacactacaatccactacccctctactgtagcacacccgatcaagacgcagagaatacactacccaacccacaacaagtccacactcagactcacacaccctactatccactccagtcaacactaccaaacctat

SEQ ID NO: 531548 - DNA, 428 bp, Homo sapiens
  misc_feature (226)..(226): n is a, c, g, or t
  misc_feature (307)..(307): n is a, c, g, or t
  misc_feature (317)..(317): n is a, c, g, or t
  misc_feature (334)..(334): n is a, c, g, or t
  misc_feature (350)..(350): n is a, c, g, or t
  misc_feature (383)..(383): n is a, c, g, or t
  misc_feature (422)..(422): n is a, c, g, or t
ggcacagcagaaggtcgaggaataacaatatgctgtttctgccctctggtggttgaaagagatgttgtaaataagtaattacaaagatgtgtggtcctatgactctaaccacctatggcattatagtttcttttattccacctgcatttattggttcactgatgtatcaagcatgtaatgagcatcttctatatgactggtctttatcagtactctaaagtgcctngtctagtagcattctggccattagaaacaagttaacatatgtgaggtcttacaaatgaagttccaaaagcccgcttttgcnatgtctagancctgacttttgggcacnccaggtttggattgcnaagtgtcgtcctatctaaatctaaaatttctangatacactgaacttaattgggtagtacacatggtgaatngaaaac

SEQ ID NO: 531549 - DNA, 540 bp, Homo sapiens
gcctcaaacggcgttccggccacaacggcgtttccgctttcgagaccacaacgcgcgttccgcctcacaacgcgcgcttctcgaggcccctctgttctatataaaggctctctctagttataagagattatacacacacatgctccaaggcaattccccgctttccacagtggaggttcacacgcctcttaaaatctacccacccgagtcacaaaaggggaccacacagcacttcacagcacacgcacgcacaatgcacgcgtcacacaaacggctgtatagcctaagccacacacacccccacaccgggagaaacacagcacgtgagttaaacctttagcacatataacgaaaagtttaaactaaagctatactaaaccccacgggttggtcaaattttgtgccaagccacccgcggtcaacaccgagttaaacccacaagtcacatatgaaagccggcgtaaagagtgttttagatcaccccctcccccataaagctaaaaactcacctgagttgtaaaaaactccagttgacaccca

SEQ ID NO: 531550 - DNA, 752 bp, Homo sapiens
cggcatggaggaggcggaggccgcggcgagccgggccgagacagtgagggccctagcggggcccgagcggggcccggggcccctaagccataacctagaagtacatagggctaggcaggacataaggtagacccgccaataccggtataggacgactaggaagcccaggcccctacatacaagccctatagggtgctacggcagaagcggagactaggtacctataacctaggaagtaataaaactagacaaaccatgcgggaccctagcggacgatatctagtacagcacagggtgcctgagctataaacctagctaggtagacctagtacatatgtcacaataatacaatgtaagaatacctaggtacactacgagcgagcccatacaagagaaagccaatagaagaccctagagccaagaagcgaagcactaatagatagcacgccctaagagcctgcctaggaagacccccacggcgccacagagtgcgacgtggtaccaccggacggcgttcctaggcactgtacgcaggtagtacataatccacacgtaccggcataggccacacacgtaataatatgtagggccaggcgggctatagtagcaccccaagcgtgtagacctagagacgcgccaagacagaggccccagtagcatgccaagcggcccgggggagcactacccaatggtacaatatggaccttaccaaccatgagcccacggggacccctagttacactgggccgcca

SEQ ID NO: 531551 - DNA, 960 bp, Homo sapiens
gtacgtgcgggtgttcgatgtgacgtgattgcgcactgccctccacagacaccagacaggtccggacctgccacaagtgtgggacccagctgcggtgacatccattgtgcactttggggagagggggacgttggggcagcgctctgaactgggaagcggcgaacgaggctgcgagcgatgagcagactccatcctgtgtcttaggggtccagcctgaaggttctatcagaagtaccccacggccgtctggtgcatgacaagccccctagccggcggccgaagcgtttacgatcagtgaacctgcgagtggacccctgagaggatgactgggctgcccgtgaagctacatgggaagtgtgatgaggtcatgcgagtcccctgcgtgctggtgatgagggcagtcacagtcggaagtcgctgtgcagaagcagagaggatggccccgcctggggatcggggtgcaccgttagctcggaccccatcctagggggctggtttggcaggggctgacaaaacgcagcaaaaatggaagaaagtgacgtaatcacgtgctcgatgaagaacagttggcactttgcagatggcagtgtcacggtgaaggtgtgtttgcccccacgggtctagggagaaccgaactcttgggggatgacattttcacctgtgacattcttacgcatttgtctctgaggaagcccttgactgctgggttgtaccctgatacggctggccatcgaggacactgccatcggcctctgtgtcatgagtggcagcgacttctggaaacgggactgggttttcaggcccgcctggaagtgagggcagggctttctcgttccaccggcagctcaggccacgtttactacatcaggaaaggactaagactctgtggtgcgaaggggcagccgtcaacctattccacgtggggaacaaacaacgcttggcacgagcgtgccactaagc

SEQ ID NO: 531552 - DNA, 637 bp, Homo sapiens
tcctaaaagtacaaatccagtttatccatctgtttatgacccagtacacgggaggcaagtggttccacttcataaactccattccaactccttggaatgtccattcttgggcttacgggaaaaatctaaacgggaaggccaggcaatgcttaggcaactaaaagtcaggtggggggataagtgcattaacgttccccctcacgggggtatggccagcggggcactgtgttatccgcaagcgtggttttcataaaccgtgtcaccctggaactcttgtctgacccccccatttctctggaacgcctacaggcccggtgtctcgggtctctacagatacatcatccaccaccacgaggttacagacagcgcctttactgggatagctcgccctataggttgctctggcgggactactacctgcgctcccacggaactcgccgacactctctcctcgtgtgaaattcccagacctaattcttccaaccatgtccacctcaactgggggaagaaccatgatttctgatccaggacctttatcctcgcgtcccatgtgccccttcagcggcgtcactacacagccgactccgcaaaaatagcaggggctagtctctgaattgcccggacaccgggttcagga

SEQ ID NO: 531553 - DNA, 150 bp, Homo sapiens
tccgcgttagcgtcccatcagcggattctatatattagaccttgttgggttatctgatgggagaagactggccatcttgcgtaacatcagtagtaaaaaccagttaaatttttaaccctttgcaggaattgctgatgggagaagactgcg

SEQ ID NO: 531554 - DNA, 290 bp, Homo sapiens
  misc_feature (70)..(71): n is a, c, g, or t
agaatttcagaagctgatattacctccatcggtcaggagaggggaatgttggcggcccgttaaaccgggnnacaatgtccgggccaaggactttgagaaagcatacaagactgtaatcaagaaggacgagcaggggcatgagttttaaaggggccccttcccttccctccaccacaccattcaggggggggggcttttttggcccccccagcacctttgtcccaaaacctcattcccttttttttttacccaggatgggttttttcaataaatagataagatggaatcca

SEQ ID NO: 531555 - DNA, 533 bp, Homo sapiens
agaagtttctcggtgaagtaatttttagaaaagtatagtctagattccagcaatgtgaaataaacgtgcttcagatgttttacttaagtcattagtaagggaaccagtaagatgttaaaatgttcctaagaatatctgaaaagctagatatacatgcgcaatttacaaataaagttaggataaaattgctgggctagctacaaaactgggtaatgcccagcatggccataaaccctatagggttatctgttccattagacagaagttgtttgtgtctcccaaattaacttctgcgccaactgggtaattatcttttggcacatgttaccatgctacctgagaaagcaaactaatgtgtaatacttggtagccacttgggtgaatctaaattggaggttatagtctgataaatacagatttgtttgttcatattgcagtgaatgtacatggttgctggccacagtaacattttgcttatgtagccatattatatggtcttggtataaaaggtttggatatggaaaatttaagtt

SEQ ID NO: 531556 - DNA, 295 bp, Homo sapiens
gccaattaaaggggggaatttttttaaaaaatggcccttatttgttttgacttataactgatttgagggaggcaaaagctatgttaggctgccaaaaggacataagcagcccttgtccatttttttagctccctaaattagccaaataaagacttttttttcaaatcaggaaaactatcaaagcccaattcagatcctccatttacagccagttttgtcatacccctttgcattgcagcccctagtacaattccttggaaacaggggggctcaataaattttttttgaatgaata

SEQ ID NO: 531557 - DNA, 186 bp, Homo sapiens
  misc_feature (133)..(133): n is a, c, g, or t
tactccagaccagttgaccgtactacaagttgaccgagtataactactcatctggaaagagaagaagagacacctactgccattctcaactcctgactgctggtagctcatctacagtagaccagatggaaanggggatttacatcaatgtgagtgttcggtcacttgtctggagggatcctctag

SEQ ID NO: 531558 - DNA, 1290 bp, Homo sapiens
taaaaaaaaaaaaaaaacgtgggggatcactctcatacggtcgtctctctctctctcctctttatatataaaaaaaatatttctctctctcactatactaataatttatgtgtgggagccaccccccaaaaaaaaaaaaaaaaaaaaaaaaaaaaaaaaaaaaaaaaaacaacaaaaacagagacggcggcggacagcgacgagaaagaaacggcgaagacgcggagacgcgacacacaacgcagacgcgcgcgaccgccaggacgtcagggacgagagagcgagacgaaacagaacgaaacgagagaagcacacggaaggcaggccgcactgcgaagcacaacggcaaaggagaaagaaacgagagcgagagaagagaacggatagacacaaaaaaatagaaagaaaaagaacggaaaaagggggcgggagcacgacaaggagagcacagcgcaaaggagctgacacaggtgggcgtatgagacacgaggcgggcagacccaacacaccacaaagaacaaaaacagagaacaccatccaccccgacagaccgcaacaagaaaaagcaccacagagaaatcgcgcacaccgacctgcaggcgaatgcaaacacacaacgaccaccacagagaaacacgaggcgacagagagcccaaatccacgaacaaaaagacatgaaaaaaaaaaaaataaacttaaactaacaactccactacaatcaccactaagacgtagtaaataaataacgctcatacattccattcacacagcactcattcacatccactaacaggacaatagaagacactaagcatccccccgccacacacatagggcgcacaccccagccgagaaacacacagcgaacaccgagaagaaaaaagcaaagacggagcaggaaccagaggagcgcgccctaacgcccgaggaacggcaaaaggaaagagcacggacgagagaagcggcagaccagcaaacaacaagccggacgcagaggccagaggagcgccaggacaaggagaaaaaaacaaaggagaagacagccggcaaaagcagaccaggcagagaagacgagaaaaccaaccaggagcagaagcaaagagagagcaacaccacaacgacaacacacagagacgagaaagagaagagcaagaagagagagacgacagcgacagcaaagaagacaggaccgcccaacccccgagaaagcgaggcgcgggagaccgccaacgaacacacgaggcaaacacaacaagacgggcaaagaaaacgccgaggaagcggagacgc

SEQ ID NO: 531559 - DNA, 461 bp, Homo sapiens
aggcattgaggatttcaatctcaatgaagagggcactgagctcctgggagtgaagtgacttgtccacactgccataaccagcgggtggctgagctgagggcctagccactcctgcagcttgttgcactaacgttgctgcattggcaccaaagctaagagattctgcagaaacatgctgggcgcagtgtctcacgcctgtaaccccagcactttgggaggctgaggtgggcagatcatgaggtcaggagttcgagaacagcctgaccaacatggtgaaaccccgtctctactaaaaatacaaaaattagccgggcgtggtggcacatgcctgtaatcccagctactcaggaggctgaggcaggagaatcgcttgaacctgggaggcagaggttgcagtgagctcagatcgcgccagtgcactccagcctgggtgacagagtgagactgtctcaaaaaaaaaa

SEQ ID NO: 531560 - DNA, 418 bp, Homo sapiens
ttctggtacagatccaccagcagctcctcgcttattctgcttgccttcattacgtgttgacgttcagatctagggaacgggaggcacctagcaaacctaatgacagagcaacctgaggcaaatttaggttattaacattaagagatctgtttcagagaatgggaatcataggctcgtatgtatgacgttatatgcttcctgggctgacttatgaagaaagtaattcttttcaatcaatttctcaagctgagactgaatgtcagaaattttagaccaggaaaagtcaaattcacttaatggaaccttggattgtttcaagtagcgaagaaaacccaattcttctgggcgcaaaataagcaaggcatgccctctcccatttaggcctctggctgttctacccacacgatgaatatattcc

SEQ ID NO: 531561 - DNA, 856 bp, Homo sapiens
cgacgcagtgtgttagtttgctgagaatgatggtttccagcttcatccatgtccctgcaaaggacatgaactcatccttttttatggctgcatagtattccatggtgtgtatgtgccacattttctttatcctagtctatcattgatggacatttgggttggtgccaagtctctgctattgtgaatagtgccgcaatgaacatacgtgtgcctgtgtctttatagtagcatgatttatagtcctttgggtatatacccagtaacggtgacaaacgttgccattttaagttcctgctcccttgctaacctcatgcatttcaagaaaatctcttctaacaacaagcagccagaaaaagcaaactgtaaaacacaaataaaacagctcgggcacaaagggagggagaagaatttcttgcttaaccaccaaacttcaaactcatacaatgggccctaataagcacattcctttacttttaggtgcactaaaatagaaaagccgaagggaaacttgaggggtgggtatgactgcagctgcaggaaaaaacaaattaaaaaaggaaacaaacaaacacaggccaggggcagtgactcaacgcctgtaataccagacatttcggattccctgaggtaaggagattagagaccagctgggacatcatggagaaaccaagtatctaataaaaatacaaaaattagccgggaagtaagtggcgggtgaccgtaaatgacagttaatcgagcacgattaggaaggaaaatggttgaaacacgggagaggaggattgaataagtgagaaacggagaaggaatattagctgggaaaagagaaaatacgtagaaaataataataataata

SEQ ID NO: 531562 - DNA, 225 bp, Homo sapiens
  misc_feature (13)..(13): n is a, c, g, or t
  misc_feature (75)..(75): n is a, c, g, or t
  misc_feature (171)..(171): n is a, c, g, or t
gaaaatacaaggnttagccaggcgtggtggcatgcacctttggtcccagctactcggaggcctgagacgggagantcgcttgggcccgggaggcggaggttgcagtgagcagagatggtatcacttcactccagtatgggcgacacagcgagactccatttaaaaaaaaantaaaataaaattgattgtaaaagatgcaaagactggaaagattgaagggaaaca

SEQ ID NO: 531563 - DNA, 200 bp, Homo sapiens
cacgagcacagggctgaactaccactcgaggcagtgagcctaaggccaggtcggccaacatggcgaaaccccgtctctactaaaaatacaaaaattagcgtgggcatgccttgtactggctgcttccaccctaaagcgtcatccagagggggtgtccaattctttgtacttgcaggactagctgcacagtgaccgaagca

SEQ ID NO: 531564 - DNA, 387 bp, Homo sapiens
  misc_feature (21)..(21): n is a, c, g, or t
  misc_feature (48)..(48): n is a, c, g, or t
  misc_feature (52)..(52): n is a, c, g, or t
  misc_feature (111)..(111): n is a, c, g, or t
  misc_feature (137)..(137): n is a, c, g, or t
  misc_feature (176)..(176): n is a, c, g, or t
  misc_feature (246)..(246): n is a, c, g, or t
  misc_feature (335)..(335): n is a, c, g, or t
ggcagggctatcatggacctnttccatgaagaaagagacacagatctntctntggaaaggtgcaggctctgctgcaggaggaaaatggcaacaagaagcccagttggtganttgatgggactccgtgcagccatctngcgtggccaccgtgaagtatggaccagcccaggtgagtntttaattgatgggactctgtgcagccatctcgcgtggccaccgtgaagtatggaccagcccaggtgagtntttagttgatgggactctgtgcagccatctcgcgtggccaccgtgaagtatggaccagcccaggtgagtgtttagttgatgggactctntgcagccatctcgcgtggccaccgtgaaagtatggaccagcccaggtgagtt

SEQ ID NO: 531565 - DNA, 1044 bp, Homo sapiens
  misc_feature (1044)..(1044): n is a, c, g, or t
ggtggatgataagtacccagaagggactgtgtccaaaaaggagcaggacagaaacgggttggcgtatacggatgggctgacagatggcagccccaacgaggctttggctctgaggaccctgtttggcctgagagtgagctcaatcgtggtgagcaacacccctgtaattcctgcgatggtgaaaggatgtggccccggagacccatcacggacaagaggatgctaaaggttagcagtcaagcatgagagatatccagacatctgatgcatgaaaggaaccatcattcaagtgcccatgaatgcacagactcaccatgcaagaaaccttctctcctcatcagcatgggaccccctcaagagcctcatgtcgcgacaaaatcagtggagagagtcatcttgggcacgcccatggcccctccaacagaagagtagaggaaacaaacattacaatcgaccactctgcatacaacacacctgcgctaccgttgtcatgaagacacagaagtgggcagtaaatgaacctgggaataagccccataggcaacgcatgacaggagacgcgagcactgaacctgccgaagaacccctatgaaccgagatacacatgagatccaaccacagaacaacctgcacagcgtgcacacagaccaaacaccacaaaatataatagattccacaacacatcaagcacaaggaaaactcaatcacagaacccgcagaagcacgcaacgagaagacaagaccagagcgattatgcgaacgcggaatacgagcagcacagaacacgacaatccgtagacggaacgacgaacgcggacgcgcacggccgaaaggacggcgaaagaaagaggaaggaaaggagacgtgaacgacaaagggaacagaaaacgacagagagagacaccagaaatacagcgaccgcgcacgaggaaggaagcagcaacacagcgaagacagaaccaagaagctcaatgtagcatgatggataagcacgcacagaaagaagacagagcggacaaacacagaatgacgtggagacgaatn

SEQ ID NO: 531566 - DNA, 964 bp, Homo sapiens
acgcgtacggtcctccttgggtgactcaaccgcctcgtccggcgcatcatggacgcccccaggcaggtggtcaacttatgggcctggtcccgccaagctgccgcactcagtgtgttagagatacaacaggaattattagactacaaaggagttggcattagtgttcttgaaatgagtcccaggtcatcagattttgacaagatgattaacaatacagagaatcttgtgcgggaattgctagctgttccagacacctataaggtgatttaactgcaaggagggtggaggtgcggacagttcagtgctgtccccttaaacctcattggttgaaagcaggcaacggtgtgcggactatgtggtgacaggagcttggtcagctaaggccgcagaaaggaagccaagaagtagggactataaatatcgtacacccctaaacttggggaggttataacaaaaattccaagatcccaagcaacctggaaccctcagaccagaatgcctcctaggtagtatcattgcgcacacatgacacggtgcctggtgtgacagtttgcctttataccccgatgtcacagggagccagtactgattttgtgacatgtcttcaagagttccttgtccacgccagatggatgtactcaacgtttgcatgtgatcttagctggtgcccacaacaatgttggccccgctggcgtcaacccggggtgactggtcgagatcgacccgctggagtagggcctccgagagtgccttgggcctggatacccgttgcgacctgcaaagctctttacaggggcgccttttagatccacgacagagtgggcgcataacactcatgggtgcggacctgaaatatatcataaccaccataaaatggagcacaagaggacgagcccaaaacacactccgggacacaattacaatacatgcacccggcaggggaccaaacacggagtaattcttg

SEQ ID NO: 531567 - DNA, 319 bp, Homo sapiens
cgatcccgaccggatcgagtacgaccgcgagcaactccgtaagttctatcgtaaccgcggctatttcgacttccgggttgtgtcgtcggtcgccgaactggcgccggacaagaacggtttcgccatcacctacaccctggatgaaggcccgaagtataagttcggcaaggtcacggtcgagacggaactcaagaagctggacggcaatctgctggctcagatcctgccgatccgccaaggccagctctacgaagaccagcggattgaacaggccaccgacgccctgaccttcgcggcgggcgcggcgggcttcgcattc

SEQ ID NO: 531568 - DNA, 382 bp, Homo sapiens
cggcaggttgtactgttccatgggtgaatggctctaacacggcctgtaaaaactgggtaaggagatgtaagagacatgggccaagtgctaaatggaggaagagggtaatggcagggcctaggaagggcagtagccaggctgcccaggagttacgaaatcacctgggccgggaatctgaaaagcgctgcctgatttcagcagcttttttttttttttttttggagatgggagtctggctctggtcgcccagggggggagtgcgggggcattcattttctgctcagtgcaaggctcggacttccggggttacacccacacacgcaatttctctgtgcctcagccctccgtgagtagctgggagtacaaccgtgcgcgggggggg

SEQ ID NO: 531569 - DNA, 298 bp, Homo sapiens
gtccgagtattagaccgagtaaacctgaccgagagactacttcctaaggaatattactttaccccatctggagtccagagcctcagcatccagatgagtgtatacattctcgacaagaaggctgacgcggaccggattgtttacgagaacccagatccctctgatggttatgtcctcatccctgacctcaagtggaaccaacagcagctcgactacttgtacttgatcgccatctgccatcgacggggcatcagatccatacgcgaccttactccggagcacttgccgctgctcagga

SEQ ID NO: 531570 - DNA, 167 bp, Homo sapiens
  misc_feature (121)..(121): n is a, c, g, or t
gaaaatgcgttgagtgagtggctgacattccatcacacacgagcctctcgatctcacatgccagagtgccaggttgatacaggcgcatgtcgaacgttggcagcatgtgggtgtgctccantggtcacctcaagccacgttcctacagatgatatggcgtcctcagt

SEQ ID NO: 531571 - DNA, 439 bp, Homo sapiens
gggatggtcagtgctcgtgggatgcagtgggtcttcagggattctcgccgcattattatgtagtggttcagaagctgaggctactgcgttctctctatggtgctggcagcggggcagcttgttatccgtgagggtccgtcgctcgtgggtgcctgacgttgctgtagtttcgtgtgaagacgtggctgtactgtgggctcctgtgtgtgctggctgtgaccactgagactccgagacagactgcccatagatcctgtgtaacggtcagggcccagggccccccacagcatggctgagggagcccttcccgagtagggctgtctccaagtcgcccgacatccatggggtcaggttttcctgggcacttttgttgatagcagatggatcaatattagtagccccgatccaagattgaactgtgaaagagaggttccagggg

SEQ ID NO: 531572 - DNA, 482 bp, Homo sapiens
  misc_feature (71)..(71): n is a, c, g, or t
ctttggtcgacattgctgctgggaatgggaatcctgttcactggggagctctgggagttcttaagctttgntgaaagggcccctgccatcatttataacatcctgctttttgggctgaccagggccctgggtcagagcttcatctttatgacggttgggtattttggtcccctgacctgctccatcatccctacaactcgaaagtttttcccaattttggcctctgtgatccttttcgccaatcccatcagccccatgcagtgggggggccctgggcttgggttcctgggttttggtcttgatgccaagtttgggaaaggagctaagaagacatccccctaggaagagagagactccctccccatcaagaatatttaagttattttttcaaccagggccattttttgggaaaatgggcttaataggaaaatggggctgggttcccgttttttttaataaaataaaatcaagccaaatcccca

SEQ ID NO: 531573 - DNA, 466 bp, Homo sapiens
  misc_feature (48)..(48): n is a, c, g, or t
  misc_feature (56)..(56): n is a, c, g, or t
  misc_feature (75)..(75): n is a, c, g, or t
agatctttccatatgtcaacccatcactttaagtattaatttttttgncttagaanttcctctcacagtcatccnttttcccattcttatggattcaatgttatgttcctggaccccatatcttcttatttcttagtactccttttgtcagcagctctatacaaaggtttacagaaaataaaattggtccgggagtgacgctcatgcctataatcccaacactctgggaggccgaggcagatgaatcacctgaggtcaagagttggagaccagcctggccaacacagtgaaaccccatctctactaaaaatacaaaaattagccaggcatgatggtgcacttctgtaatcacagctactggggaggctgaggcttaagaatcacttgaacgcaggagacagagctgcagagagtcaggatcccaccagtggactccagcctgggcgacagagagaaactctatctc

SEQ ID NO: 531574 - DNA, 559 bp, Homo sapiens
taggcccatttgagttatttggtttccaattagggaaatagttggtattaggattaggattgttgtgaagtatagtacggatgctacttgtccacatgatggtaaaagggtagcttactgggttgtccccccgattcaggttagaacggaggaggctctgcggctaggagctcaataaagtgattggcttagggggcagaaatattatgcttggtggtttgggattattatggaggagtggggatttatgtgcataggattgaggagtggattagttaaatagggcaagggacgccctccataggttgggtaaggggacggactcgggaaacattggtgttaggcgaattaggaaaatattcatctcgggcattgaatggtggggaagggggtgtttacagggggttggcatagggatataatggctcggggctcgcctagggaggctccgggtggaacaataggtggtcaagggtccttaagggagagaactgccgcagaagttaagcccgaggggcgtctttgatgtgggctcagcacggggtgggacagggtgcac

SEQ ID NO: 531575 - DNA, 1426 bp, Homo sapiens
cttttgtggggatctcttcacacacgcggttctgagagttgtgatcacacaacggggacggtgttgtctgcttcgcgcttgcagcatccttcacatggggtttgtgtgtttatctccccacggcagtcttctatggggggtctcccccgttccttggccagaagagaggttttttcccgcgtttttttacaggtctccctgggcgcagactgatttttcaggggttgaagcacaggggcttgctgttacgccctttctaaggtttattgtgctccccacggagcccccaagtgggcgcccaataaggggggtagcccttttgtacgcctggggggcgccccccccccaaaggaggtaattgaaaagtatgtgataaagggggcaccctctggggagggggagataataatgtcccccctcatattagtgttgccgccctgaagttgggcgccccccgcgagaaagatatgtatcacatagaaaacgccctgtgttttgttgtggtttcggacaccggggtgtttttctcctctggagagtgcgccctttcttttttctgccccaacatgttccgcaaagaggtttttcccttttcgggtatcccccggcggggcccccccggatgtttagtacacctcctctccccgcggcttttgccagacccaccgcgttggaggaaaataggtgtttttttgtgcccagccccgtttttggggcttattaaattggaagcacttctcccccggaggaagctcacctggaagttatatatcacattttatctctctggccccaccgctcctctagatagggtttcacacgctcttcatagtgctttgagagccctcgggagacctccacagagattgagaactccccaacacacagggcctcgttttcccttcttcacgcgcacagacctctgtcccacacacacctcgggttttcccacgcgtggacaggcctcccgcgctctgagacactttctgtgtgccacaagtctcgtaacacacaaaaggttgtgagtcttgttggcacactttccacaaccactttccacaggagaggcacagccctctcgtggttctctggagacccacagttgggtgtcacaccgctgtctggctttcccgtgtaccccacaggcacatgtgaccacagaagaaacacagaagttacccctgggggccacctgagttttcctggacacacagagaagtggtgacccactgaaagtatagagaccacagtgggctttgccttttgaacaccctccacagtggtgctgctgggcgtaggcctggctgtggtggtgtccctgactttgactgctgtgtaatcctggttctcaccacggaggtgtcgcacctgcactccccaccctgtgtcttgcgttctccgaaataaaagaagaaaagccaaatta

SEQ ID NO: 531576 - DNA, 254 bp, Homo sapiens
cgccaaaacatacctttgtgtatgtgagggcattcagagattttttaagcgataatttttactgtactttgatttttgccctatatgctcactttagaatcctaaggtgggacttcactgtcatcaccacttgtgcccctccatcaaatgactacgtgaggtagtatacaaactataatgcccccacttctacagacgacggaaacaccaagagaggttatgcaacttgcttggcaagagcacagggaaatttt

SEQ ID NO: 531577 - DNA, 312 bp, Homo sapiens
  misc_feature (102)..(102): n is a, c, g, or t
ggggaaattttttttttgggagaaaaaggattttttgggggctccttaaaaaaatgccaaacccgccgggggccccttattaaattaaaaaagggccccggnggccccgaggaaacctttttcccattgtttttccccccattccaggccaggtttcttggaaaattgggggtttttggacccttccccttaggcaaaagggaaaaaaaaagggggggaaaagggcagggggctccctccccaggaaaccaagggttcccctgggggtgcagaagtttttttagccaagcccataaaactcctttccttcca

SEQ ID NO: 531578 - DNA, 962 bp, Homo sapiens
  misc_feature (119)..(119): n is a, c, g, or t
accctcgcgaggtctgagagtcagtggagctaccaggaagcatcatggggccctggggagagccgagagctcctggctgtggctgcctccgtatggtcggtagcgttcagtagcctccnagtgacctgtgtgggactggacgtgatgagaggttgggaggtgcgcctgcggtgcctgcgtgcgtgcgttgctcagcccctccgtcgtgcgagccgtgtgtgcccgagtactgtgtgcttgcgccggctcaggagactataccatgatatggctcagcttccgcgactagaaagctctgagcctagttaatgctgtttcgcggtggggcgtctttttggtcacttgtctcctggacctgctgcctgactacctggctgccatatatgaggccctggcaggccttgcagcgtgagcgtctccagttcccatcgtgcaaagagttcgatcctggccatgggcttcttcctggtcctggtgatggacgcagatcacactggcttacaaggaagcagctcagggccgtcacctctggcaggaaagcaacgggcatctgctgggaacacgtgaatggtggggcacgctagcattggtcgatgactggggccaggggatcccacgaggctgagtggtagccgccgagataatctcctctcagctcttgacgtgccttgtgtactgcgtgttctccctgggcctctccgactccggtgttcgaggggctggcggtagggctgcagcgagaccgggcttcgggccattggatgctgttgcctggcttttgcttgtccacaagggcattcctggctgtcagccttgtcacttgcggcttgttgcagagccccccttaaggggcacagggtggtggcttggttgtggggatcctcttctcatgcatgacactctagggcatcgggctgggtgcaggtctggcagagtcggcaaggactcttgacagttggcca

SEQ ID NO: 531579 - DNA, 152 bp, Homo sapiens
gttctaaaaaaggaaattctgtcatctgagacaccagttgatgaaactgttggacattacgacatgggaaatacggcacacacagaatgaagactgcatgatgccactcacatgaagtatctaaaataggcacatatggtgaaaccacatgt

SEQ ID NO: 531580 - DNA, 80 bp, Homo sapiens
aactcaatgctgaaacactttgcacaatgcctggcgtgttatgcactcaataataaacattagtgtctatcgttaaaaaa

SEQ ID NO: 531581 - DNA, 476 bp, Homo sapiens
gaattgtgatcgactggtcgtagctggatcaaggcggagaaccggggggtccgctgtccttgtagtcccctatcccatcctggcctcgggctgagacttgccaaggagggcaagacgtacaggtgtaaggtatgcccactgacctttttcaccaatgtcagagatgcagatccactccaatgtcgcacacagatgtgccaagccccacaagtgcccgcactgctccaagtcctttgccatcgcctcctacctgtgccagcacctgcgcatccacctgtgcgtcaagccctaccattgctcctactgtgataggtccttccggcagctctcccacctccaagcagcacaccagaatccacacaggcgacagaccctacaagtggccacatcctggctgtgaagaaggcttacactcagctctccaaactccagtctcacacgagccagcatcacaaggaacaagccctagaagtgtc

SEQ ID NO: 531582 - DNA, 217 bp, Homo sapiens
agacctactcacaattattatcattctagttcatgtaatattacttatgatatatgtattaggaagaagtacaagagattatttaatgctattgtctgaatgtttgtgaccccccagaatttgtatgttgaaatcctaatccccaatgtactggtattaggaggtatggtcttggggaggtgcagtaattatacatgtctagaagaaagtataggag

SEQ ID NO: 531583 - DNA, 1678 bp, Homo sapiens
tcccgggctcccaaaagcttaatggggcaaatatggctctataaaaaaatggatcaatccggtggcctctaagtcaagggaatgaaaagtctggttgtccagggaacacaccaacgcgggggctgtgaaggagaacgtggtgtggtgggtgcttcaccttcttttattacatagaacccgagttcagtaagccacaaagaacttggttagtctcaaccgagtttcttctcgaggcctttaacaccaatgagggctgtgattttcttattcacagaaacttttatataggtgaaatctccacgtggcacagagaaatgtgagtgtgtctcccgtggcacaaccgtgaaatgtgcgagaagagtctcccccagcgaaaatgtggggtgccggggggcttggaacactccgtggcgtgggcagtgggtctcttccccacaaagaacatttcaactgcgcggcgcgcgtggtcttatacaaccgagcgttgtcacgagaccccctctcccaagagacacgaggggggcccaacaaagcgggggggccccgagaagagttcacgagtgtatacttctcaacgacgagcccgcgagtggatacaaagagaggtgggggcgcggactctttaatctcaagggtgctccacaagtgtgctaaggggggcggagggctatactcgaggggggtgggctccttctacagagagggcgcccgcggggagagggaaaccctttctccaggggggcccagcggaggggggggaaaactctcccaatatcgtgagtccgccgaaaaggcggctgggggagagtgaaatctctcggccccacacccgaggggccgggcgagcagagaaaaccgctcgggatccgggggcaatagagaatgaggcgaagactacgaagggggggggcggcctccccaaagggtggggggccccaatggggctcccgggggaaaaatcgctggggaaggggggggcccaggagagccagagagaggagacagcattaagccgcttgtgggggacaaaaacgccaaaaaagaacgcttggggaaggcgagacaccacaacacaaaaacaggcgtgtagaaggggcccttctttgagtgcctgtggtcaggggagcccctcgggcgtggggagacaacttcggccgaaggagagcatagtacccagggagataaaaatactatcccttcctcgcggggtgagaacaaacactgagaagcccccggggaatgtgtgttccacaacccgggggggaaaagaagagtcccacaggcccttgtggttcccgcgtcggcaacacaagaacaaccaacacacgcacggagagacaaaccccgtggggggaccagagagggcggaggacgacgccgaggaaagtggagtgaccgacgaccagagtaagtgggagacgtgatgagaacacgcctggtgtcacgcccccgagataggagcaggatgagtgctcttgggagaacactgcggtggttccacgcgcacgatagagagagtccacacagtgggaaaggtagagccccactcctccagggagtaccatgacaccacgtgtaggagaaagagacggacacaaaacggacgtacgaaaaaaaacacaacaacaggagttcgagtgagaaaataagcaacatcaacgagctaagacgagcatct

SEQ ID NO: 531584 - DNA, 352 bp, Homo sapiens
cgttaatgatcctcagccaagatgcattggggctgaggtttgttcccacagcagagtttccctttgcagaatgcagctctgagaagcgcgtttggtgccgtttcggagatcggcccttggtgggtccctccctagcttgctctgcctgggttgccagggcctgtcaaaagatggattcttcattccaaatcagccttctctgcgaaggagaagacgtttggtgttggtttcaagctgcggagagcatcagccaagcagcagtgcccacggagccagaggcagcccagaccctccttggccctatggggagcctagggctgggtgagaactaggcaagattgttcggggcctg

SEQ ID NO: 531585 - DNA, 149 bp, Homo sapiens
tcaagaatgttgcgagaccatcaacctgccagtgagccgtgtcaggagcggtcggggagaatcaggctctcgaaggctcataaaattcaacgtgagtgtagcaagttacaaggacgcccgatgcacagtggacggtcatgaaggagcgg

SEQ ID NO: 531586 - DNA, 203 bp, Homo sapiens
  misc_feature (50)..(50): n is a, c, g, or t
aattagaaagcaaggaatgcgaagaaagaaaatgggaagtttcctgcctncaaattatgctgttggttctggcctaaaggaatgttttcaagggaagcctgtctgcctttcattgccatttcaccttgatttaatcattcagcaaagcatttattaatcatcttctgtgtgaaaagtacttaccttagaaccactgcatcctg

SEQ ID NO: 531587 - DNA, 157 bp, Homo sapiens
ctgtgtgctctcctgcgacgttggggttgatttgacgggcgcgctggctgattcagagcacaatctcttgttcggggaattgacagaggacgaatggcttgatatttcagctaggttggactgtttgattccgggaaccatttgtttaggtttggag

SEQ ID NO: 531588 - DNA, 153 bp, Homo sapiens
accgcatctctaatctatctaggtattcgagaataggcctgaatggcctccttatcctttgagccctttttagtactactcgaatataaattgcatttctcctggaatataaccaagctaatttatagttgacgttgaagccacatgaaaatg

SEQ ID NO: 531589 - DNA, 153 bp, Homo sapiens
tggccggtacgattaaacactgaactgacattacagcccaatatctacaatcacaacaagtcattattaccctcgctgtcacccaacacaggcatgctcataaggaaaggttaaaaaaaagtaaaagggatctctgcacgaggtgatcttctg

SEQ ID NO: 531590 - DNA, 135 bp, Homo sapiens
agttggcagaccgggcccccttgaaccgcaccccatcccaccagcccgggccttgttttgtttggcctcaggtgtctcagattttttaagacccaaaaaaaaaaaaggaaaaaaaccccaaacccccaaaaccca

SEQ ID NO: 531591 - DNA, 380 bp, Homo sapiens
caaacccttatcagtcgtgatatgagaaaaaacacgccagtcgtcccacctgggatagtacgccctgccttctagagcgggtccacataccctccagatctccctctgcagagagcccttgtcataactgtagacccctaaggcagtgtctgagaagctgggatggcaatgggaggctctggcaatcaggctcttcctgtaacagcccaactgtaggcagctgggtccccagtcccctgatcctgcaggtctctgctcacaccctgccttcttagaagtgttgccctcctcatctcactcccctttgattcatccttcttgggctcctagccctgccatcccttgttctgagtccctcgagactcccttggactcctagg

SEQ ID NO: 531592 - DNA, 127 bp, Homo sapiens
gctgggctctggaagaatgctttttaaatttaccatgttcactgttttttttaagtatcaggatctcgttctgtcatgcaagctggagtgcagtggccagtcatatcttactgccgcctcaaccacg

SEQ ID NO: 531593 - DNA, 393 bp, Homo sapiens
agggatagttactgaccggaaaactgggtcctccaaagggttgggttttgtagacttaaccagtgaggaggatgccaaagttgccaagggggccatggaagacattccaggacagtttccagccttggggcctccttggaaatccgcctagttaacatttaaggggcaataccgggtgggttttgactggatattcatataaactttttaaagagttgagggatagagctaaccttaatccgaaggtttggaattaatatggtttaatcccatgtccaaaaccattttttcctacaaatagttggggtttggtggtggttcctttttttggtttggtcctggtttttttttttttggcgttcggggggttgtacaatttaaagagaaactctg

SEQ ID NO: 531594 - DNA, 479 bp, Homo sapiens
  misc_feature (458)..(458): n is a, c, g, or t
gacccccgcgccggtacccaacagggatttccccatttctgtttgctgcctgaatgttgtatgaggaaggccaaggagagtccttgcacgggtgagcgtcaggatgaggaaatgacaccaggaagacgtgggtttgggttagtggctgctggcgttttggcccttggtgtttctggagcctccagggatctaggggagcctgggctgcgtgcatgtcgataagcagagctgttcttggggagaaggagggaggtctcgggagtgtagcaccatgccaaccagccctgcgcgaagacagagtgagccacgcccggatggcagggcatgtttctgttttggtgtctcactttcctcccagcgtgacttatttggggattcctcagggcctactggaatgtgactgcccactgcccagctgcctcgggtacaagtcctggccctatgtcccagctgtcagntgctcagggaatcctacccag

SEQ ID NO: 531595 - DNA, 390 bp, Homo sapiens
ctctcctttatcacaccatcagatctcatgagacttactcactatcatgagaacacaattgacagacctgcccccttgactcagttacctcccactggttccctcccatgacacagtggggattacgggagctacagttcaagatgagcatttgggtgaggacacagccaaaccatattatataagccacaatacacacagacacctatgtttgtgcagtcatgttcacagcagtcttcaccacagccaaaaggtggagacaacccagatgttcatcaacagacaaaggggtagtgactgtgttgtgtacatatgatggatattattagctataaagggattaggtctgatacatgctacagtttgcttacctgacaaggtgctaagtaa

SEQ ID NO: 531596 - DNA, 873 bp, Homo sapiens
gagtgttcagaagtgggaatgttgagatttcacatggtcactatcgtggggatcatcagacatgcagagcaaggctccaaccaacattgtttccaaaatagatgacatgacagctgcacccatggacgttcgccagtgggttgacacagatgacaccagcagtgaacatacactgtggttcctccagaaacatatgtgacagtggcaggccacctgagatcttttcagaacaaaaagagcctggtagcctttaagatcatgccccttggaggactatgaatgagttcaccacacatattctggaatgtgatcaatgcgacactatggtactaagcaaagccaacagccagccctcagccagggtagatgcaacctatcagtcaactcccaggacactgagctgcaagcacgcggaacctcttgcgtgcgcgacatacgcttcatgccagcaaactggcctcactgtggcccaaaacccaggtgttgcaactttgacttaacggcttgtccaagacctgcaagggttgaactcttcagcgatctcaagaaccagctgaaacacatgtctgtatcctcaatcaagcaagctgtggatatcctgagcaatgagcgggcacatctattctactgtggatgatgaccattttaaatccacagatgcagaataactggcatctaaactgggtacctgagatattttacagctggacctagtttcacaatctgtagtctccagcttctgcatatgtctggcccagggggccttctaggaagtaggctctcatctatcaaatgtctcctctgacttccttttgaaacttactgctcttctgcttcatctcgcataggttgaagctccgagggagcatgggc

SEQ ID NO: 531597 - DNA, 1026 bp, Homo sapiens
ggagggcgtccccggctcgggcggcgatgggtagtagccgaccccaatccactccgggggccgccgggtggccgcgtgaaggcatggtgttcctggggagaaacgtggaagtggagtgcgcggcctggggccggtggcgctcggctggtgggcctgcagttggctcccctgtggggctctgggctggcggctagctcccgcctgtggggaggagaaggagccggatgggcgggttcatggctgcgctgcggcgggggtcccggggccgccggctcctccccgcgagggtgcctgtccgccgctcgccgcgctgaggcagtgctggtggcgtgtgcgcgcctaggctgccgccatgcgccctcgcctgcggccatgcccgggccctagagcgccttgccgcagctttgcgccccgaagccccgaaggccccgagcccgccgccggctcttcacatggggcaacacttgctcggacggggggtcatgctttccgagagacccaaccaccgtgtaagggacctgcagacatccaccttggcaagacccggaactcgggagcccagatacccggaagaaaccaagggcccggagcaggaggcacatcgaaagggagcccagagggaccaagggaatgtttcaggaagacaagccaccagtgcgagtaaaggacacccccggaggaaagacaaaagccacggcgtgatgggagtggagtaccacggtgcgacaccaatgcccccctagaagccctgtggaatggaaaacggaaccggccacgaagagcgcgtggtcagtgtagaccgcacggataagcctatgggggtatggggatgaaatatccccacgattgaagaagcgccaaacttatgcgcctatataataccaatacaggcatgaaaaagtcttactcaaaattgactgagaacacaggggaaacttttaggactacaaatgttcccgtaacaaaccgcagttagcacaaagcagaaacttctcaacagcaatctcgcggaacatcaacaaacat

SEQ ID NO: 531598 - DNA, 625 bp, Homo sapiens
  misc_feature (295)..(295): n is a, c, g, or t
  misc_feature (519)..(519): n is a, c, g, or t
  misc_feature (525)..(525): n is a, c, g, or t
  misc_feature (530)..(530): n is a, c, g, or t
  misc_feature (555)..(555): n is a, c, g, or t
ggccccagaagccccgagccacacttcacgacacctgcccctatgtcccagggcctggaagaccggtggcctccggggggacccagggacccagcttttcaacgccggagtaagccccggcagctcctggggccccctgagagcccagccaccaacaatttcgggagccctcatagcttgttgcctcgagaggttgtttgaagggttgtcaccgagcccacctttctcacagtttacacacaggcggtttttgggggccacaaagggggtctcgtagaattctcgagagtcattncacggtgacctccctgccacgggagcccttttgccacaccaagcgccctccccagagctctcacggtggaggcaacacgggccatgtgctgccctgttgccgagcccacgctgtgggcggctcctggtgctaacaacaaagttccaacttccacggtctgcctggttccctcccccaggccacacacagggaggctccgtcagcttttccccaagccagtaggnctggcntcatntcagacctgcttaggatgggggatntggcaggggtgctcctgtgctcaccctctcttgggcatttttttggaagaataaaattgcctctttttta

SEQ ID NO: 531599 - DNA, 155 bp, Homo sapiens
  misc_feature (42)..(42): n is a, c, g, or t
ccaccttatgcgtggggtcatttccagatattaggtcacagnagaagcagcaaaatggatccccagtgcactatgggactgagtaacattccctttgtgatggccttcctgctctctggtgctgctcctctgaagattcaagcctatttcaatga

SEQ ID NO: 531600 - DNA, 722 bp, Homo sapiens
taaggttggagggggaatgctggaaatggtaatgggtatggagacatatcatataagtaaggctagggtgaggggtaggaagtttttccataggaggtgtatgagtgggccgtagcggaatcgggggtatgcggtccgaatccataagaacagggaggtcagaagtagggtctgggtgacaaaatatgtggtgtagagtccagccgacgcgcgcacatgcggcgccgccgtgatatataggcgccggcgtgcggcagggacttcaagctgcccccgtggcgccacggccgccacttgccaccgagcgtgcccggagtgtgagggcacgctgagtcccgcagggctgcggaggggcgcgcgggggctctcgaccgggctgcactaacccaggctcctcctcgccccggcctccgggtcgggggaacatcggaggggacggcaggcccggctgccctggaactggggacacaaggaagaatcccctgcggggtcccgggaaacagtgcccaccccactatcattacattccctcggcccgtgttagtgaataaagtattatatcctcaaaaaaaaaaaaaaaaaaaacccgggggcaacataatggcggggccgggacaaaacagttcacgaagggccctgggccaagtgttctctgaacccagtcttctggcaaggtgcaaaccgggcggccccaaagggggcgaaaatcgaaaccggaacga

SEQ ID NO: 531601 - DNA, 526 bp, Homo sapiens
gccatccgtgaatccctcgagagtgagatttaggcgaagaacgagagaggccagaccaacccctcagccctggtagaagaggatgatcccagtgcccgagatccctcgagatcacctttgaagaaacccatgcgctttgcgcgcccttctgtcactgaccatagacattcggaagtatgagaagtttgccccgacccttcagcaacgagtcggggctttggcagcttcagattcccctcagggaaccacgggtggacctggcccccgtcagggccatggaggcggcaaccggtggccgtgtatacaccgaagaccatgatgatgacccgtatggctaaactggctgcgtggccacgcgtgcacgtgatgctggcccgcctggaccttgttccctgggggtgggggcgcttgccccggagagggaaccacggggtgcgcccccagcctgctcccttctcccgtctgaaccgttcagctaccgtctgactctggaaacgggggtttctgttcccaaaatacccaacca

SEQ ID NO: 531602 - DNA, 557 bp, Homo sapiens
tacaggtggcacagtgtgatcccgtcgaccaatgccaggattcagagactgggacgtagtatcaaattggcgattcatgggagaagtatgtgccttgtgtcagaataccagtgctactgccaatggccgtggcataagggagtggcattcccaccctttacagacctatccaagctcaagtggtcctgtcgaagtatttatcactgagactccgagtcagcccaactcccaccccatcgcagtgaaatgcaccacagccatctcacatttccaagtacatactcaggtggagacttggaaattctgtaggccgttggaaggaagctaccataccaggccacttaaactcctacaccatcaaaggcctgaagcctggttgtggtaacccagtgccagctcaatcagcgtccagcagtacggccaccaagaagtgactcgctttgacttcagcaacaccagcatcatgctcacctataaccagcaacaccttcccatggagacacgactcccttttctcctctagtggccacatctgagtctatgaccgagtatcgtga

SEQ ID NO: 531603 - DNA, 302 bp, Homo sapiens
ttgtgtgtgtgttttatgaacaaaagagaaagctatcgaggaatactttgggaaacatgccccttccccatgtgtgtgcagcttctgcttggataatgaatggcttgctcattaatgcgttgtcccagcggaagatgcacactcagtggggagaggggatgtgtaatagtttgtattaaaaataaaaagggcgcggtggctcacgcctataatcccagcacattgggaggtctaggtgggcggatcacaaggtcaggaggtcaaaaccatcctggctaacgtggtgaaatcctgtctctact

SEQ ID NO: 531604 - DNA, 1026 bp, Homo sapiens
tccaagaaagcctgtaaccaaggcccagaaaaaggacggcaagaagcgcaagcgcagccgcaaagagagttactctatctacgtgtacaaggtgctggaacccacgctccaccccgaccaccgcgcatctcatcgcaaggcccatgggcactcactgcaactccttcgtccaatgacatctcttgcagcgcactcgctgcgcgaggccttcccgccatggcgccattacaacacagcgctcgcaccactcacctccagggccagatccagacggccgtgcgcctgcctgctgcccggcgcgacgctggccaagcacgccgatgtccgaggcgcacacacaggccgtccaccaagctacaccagctccaagctgcagcctctcgccagctgccagcaactccaaaggcctctttctcacgcagcccactcaccgccttcccagcagcccaccgcacgccctgttgccactctctccgccctcgctccgctcctcccctgccgctgcgcacctcccggcccgcgcccttccactctcccgcgcgcgaccccaccccgccggcgcccaccgcgctgccacaccctccggcgccctccccttgaccccccacctctcatctcattactcacgccctcctacccccctctccctccccttctccgcaccgcacggcttactctgcacactccaacaattgcctcctccctacgcttcaatcccttactcccgcaactcccacaccgcctcccctcgcgaacaccaacaacaaactccactcccctaatcaacctacactgcccttacccccacctacggacggctaccaacgccccagcatcctctccttgccctgactagcccctttcgtcctactcccatatccccttttccggcctcccctcggctcttcccaaatgtggtcaccccctgagggggaccagtggcactgtgggttttccatcgcttcgctttctcttagtggtgcacatttcacctttgctcacctccatttgccctggcaaagtccc

SEQ ID NO: 531605 - DNA, 417 bp, Homo sapiens
tccaaagactctgcaaaccctacatccatgcgcaaaagccccaaggacctcgcaagggctcttgtgccggaatgccttgccaacaagagctaaagaccctacagacacgacatccacgcacaaaagccccggagacctcagtcagaaagcacctctgtgaggacatctgcccagcacctgcctgtcccaccccacaccggcaccacccttgctatgggcccttgtaggcaaggataattgtctccaaacaacttacgttttctttaaaaattcttgtcttccttgacctccctgaatgtattcactgactcccattgcaatgctcaattcccaaacaaatattcttttcttcagagggtctttctgtctcttatttaggttggcaataataaagtcaaattacaaagaaaaaaaaaa

SEQ ID NO: 531606 - DNA, 537 bp, Homo sapiens
  misc_feature (469)..(469): n is a, c, g, or t
gacgagttaatgggtgcagcacaccaacatggcacatggatacatatgtaacaaacctgcatgttgtgcacatgtaccctagaacttaaaagtataatttaaaaaaaaccgaagtatagaaacctgtaggttctggataagatgggaagagatggacatctccatagcctgacggaggggagctctcaagagcttgcagtggccaccaatggaagtatttcagatgcaagcagatggatgcatggtaccactatgacgtcagaaaaatcgccaggtgcggtggctcatgcctgtaatcccaacaattcaggaggccgaggcaggcggatcacctgaggtcgagagttggagaccatcctggcaaatgggatgaaaccccgtctctattaaaaatacaaaaactagctgggcatggtggtgggtgcctataatcccagctacttgggaggctgaggcgggagaattgctngaacctggagttggaggatgcagtgagccgagattccgcaacacactccagcctgggcgacagaggga

SEQ ID NO: 531607 - DNA, 121 bp, Homo sapiens
gtctgcgatgacgcataaaactcttcaccaaacgagccctataaccgccacatctaccatcaccctctacatcaccgcccgaccttagctctcaccgtcgctcttctactatgaacccccc

SEQ ID NO: 531608 - DNA, 154 bp, Homo sapiens
tcagctcggtaccgtgatgttatcgcccaacactgtaggaggcaaggcgggtggtcgcctgaggtcaggagttcaagaccagcctgacatggtgaaacccagtctctactaaaaaaacaaaaattagttgtgcatggtgttggggataacatca

SEQ ID NO: 531609 - DNA, 221 bp, Homo sapiens
ataagcggatgaggggggaaggggagtgagctgacgctcggaaggtgtcttgagattatcatccgctgagggtggaagcggcccgcggcaaacgcggggcaggtgtcttgatattatcatctgctgagggtggagctgagggtggaaggggagtgagctgaccctcggaaggtgtcttgagattatcatccgctgagggtggaagcggcccctcatccgct

SEQ ID NO: 531610 - DNA, 273 bp, Homo sapiens
gtggctcctggcccctggtagaacagtgccctaagtaacaactcttcatggagtgagtctacattgataataatgatactggagttcccatcgtggctcagtggaaacggatctgactagtatccatgaggacgcaggttccatccctcagtgggttaaggatctggcattgccatgagctgtggtgtaggttgcagacaaggctcagatcccacattgctgtagctgtggtgtaggccagtggctacagctctgattgcctacggacttccg

SEQ ID NO: 531611 - DNA, 976 bp, Homo sapiens
caccgactaataatgatggaatactccgtgacgtcagaggactgtccgccatgagcttgaggaaaatcgaagtgactgtgtgtgaacctctgactccctgaaaccctggtcgactgatgaaaggtgtctattgcgctgcgtggtcgcagctccgatcatcatcgctgctagtcaacaatactgttaaccgtagtgtgcggatatgccagtagtcgcccgtcacaaggctgccgaccattcaaagagcccgatgtataattatagtaggactagacgccaggaagaaatcagtgtgttttgcagccacagcccacaatgcaggagaagtccataggatgaaggcctgcccaggggtaatattgtattcccttatgggaacggtcaaactcaagcgtcgtcgcggatacactaccctagtttatgccctatgtgaggaactacgttttgcctacgtagaactcatgtgttgcaacgtaagcatggatctgggcaacgacgttgtatgcgttctgaagaaagaatcctcgaggaatgagactcagttacattaacaggcaacctggtacaactattgggggagggcacttataccatggggtgttgtaagactcccctgaaaacacagttcgcagtgtggcttggagtccccatagtttggcattgatagtagctcagtaacttaaggaggatggctcttccatcgcactgcatgacgtggatgtgtgacgcgaacatgaggagtggcagtttctccgtgtgcgtggctcagtcagattagaccaaatcatacaatatacaatggtgaggcaatctgtgtaggcaaacatggtccagaggaaaagcacaggtaaggcacgcccaatgcccaccgtgggtacgcatatatctcctggctgtggttttgtcccaaaacgtgaaaactcttaattcttgtttacaaaccgcaagttttaaatttatgaggccgggtaggcac

SEQ ID NO: 531612 - DNA, 1446 bp, Homo sapiens
  misc_feature (400)..(400): n is a, c, g, or t
  misc_feature (569)..(569): n is a, c, g, or t
  misc_feature (805)..(805): n is a, c, g, or t
  misc_feature (978)..(978): n is a, c, g, or t
ggagagccgagggcgcgcacagtctgacgtgaagagccaggcccgtccgggggctctcgcagaacctcggtcttctgcgctctcgtactctccttgcctgtgcatgtctgcgcggaggaggggagggaggacgcggagctgcgagctctccgggcagagcccgcgaccaccgtccgcttcggtgacgtgcggtgtaggcccgcggccgcgtcagggacgccaggttgcacgacggtgttcgcccgggtgctgcgcgctgactagtgacatagtacatgaacactcgagaggtacacgaaggggtcgtccgggctgggaatgcgtgcgcataggatggccgggcttcgagggcgcaaagcaccctggacaatgatacgcgcacgggattgagcgccctganccgggacaataattgtaccaatgtagggggtgactgccagcaaacaatcctctgtgccaaggccctttagagcttggactctactcaaactttcgcagcaggttgagtacccggggctttcgacctatgtgtcccccagaggagttgtcccatacatgagaggcagatnccttgagagggtgggacctaggagagaaccagtagaggggaggtgttaaccttcgataagcgggttgcggcaacgatgcggcaacgagcccttcctaacaaatgggaggcagaacacaatttaaaccgtctaactatacacaaacgtcgtcgacggggagaaacggaaggtaaggagcttgatgtaacgttttagccgccgggtggacaaacgggctcggttgccaataaagcatntttccgggagagtaatattcaccacgggttgggtcgtggttgagacagcgcaggtctgtgtggacaccaacgggaacccgggcgggggaaaaggcctataggtggagaacacaacgggggatctaattggggcaaggttttacttttccacactccgaagaagaggctgtctnggctcttgggggggagcaggggccaagagtcctccgttccgaaaagggacaaggaggtacaatactcggttgaaatacttcgcacccttataattaggacattctcttcccacttagagaagcggatagggaggccttggccaagcaagggcaacacaaatggagagctccattgggcgggtgtggccacttcgcacgggaggaaattccatttgccaagatcagatacccattggagagtatgacttttcatgcaagggaatgtcttgtatggaacggagcacactgcgaggccgttagaaaccgccccggtttttgtgtgtcccccttccaagaccgcacgggagctcgcggggaaactaggcagggaggtcctgagtccatttggggcaacattaagtaaccccagatcacggaagcgaaataaggaagaggatcggcttccggaggaagaacggagcacagtgg

SEQ ID NO: 531613 - DNA, 470 bp, Homo sapiens
ctgagctctctaccccggttacagtctctccgagtgccagcattcttcactgagagcagtgagtacggctgtgtgatggacgatcagactatggcggtggccaccggagggggcaccagctcgccacagcccaaccccttccgctccccattccgccttagagcagctgacaactgtatgccctggtactgcaacgccttcatcttccatttggtctacaagcctccccaaggcggcacagtccgctcggctcccggccctgcacctagacccccaactcccgctgcacctcctgtcccggctcgaaggcgccgaggagaaaagaaagctgcacgcgggccccgccggcgcagatgagagcggacttggcagtcgtccattcccaagcatgcgccctaaaggaaaacattccaaggcccagggaagactgattgtcggaacacaaaaggttaaataaaattacttgtttg

SEQ ID NO: 531614 - DNA, 333 bp, Homo sapiens
accagctttcagaggcgtgcatgggttctgggggccttgtcaccgggaatagccgggtgtctggcaggaatgtgaggcattcataacgagaaggagaccatgtcaaagtctgaactaccgcctgtgctcttaccttgagagagtgaggagcctggagaccgagaaccggaggctggagagcaacacatccgggagcacttggagaacgaagggagccccaggttagagactgtagccattagttctagatcattgagtacctgagggctcagatcttcgcaaatactgtggacgatgcccgcttcgttctgtagattgactatgcccgtcttg

SEQ ID NO: 531615 - DNA, 858 bp, Homo sapiens
ggccgggacgaaattcggtggagtgagagatggctattgatatccatagcccagatgtgcatcataatgttggatagtaacaatcgagagttacttaccacagaatgtgcctaaactggcatagagatctggtacgagtgtgtgaaaacatccgcattgggttgtgtggtcaacaaagtggatatcacggacaggaaagtgaaggcgaaatccattggtgtcccagcgaaggaagagtcttcagctgactagcgacatttactgccaggaagtatactacgactgtcgtaaaactgcccttcctctggcttgcgaggaaagctgcatgggagaacctgaccttggaatcgtgtcgggcatgcctggtctcgcgcccaccagaagttgtcatggacccaggttggcagcacagtatgagcacgagttagaggttgctcagataactgatctcccggatgaggatgatgactgtggagaatgaagctggagcccagggtgaggaagtctagtgtgatagggagctgtgctgtggatgtcagtggtgcagcgtgtgtgccacctcgattgattatctagctaagcggaaatgtgcttcagctgtggggatgcgtgaaaggagatgagtgggtcccggagtgaatgtggccgtcgaggaaagatacgttcctgtgttgtcccttgcatattttctcctggtgatgggacccccgagaatccttgaggtttcctgtataaaaccggcgcgatcccgttccgcacagtcagtgcgcgagtctggtcgtacatgtggtccgccgcccttccggtgacccagagacaagggcgttccaaaaaaaaaaaccccggggaatccacgga

SEQ ID NO: 531616 - DNA, 266 bp, Homo sapiens
ggtcgcgtctgtaaggccaacactttggggaggcatggtgggcagttcacgaagtcatatttcaagagctgactgaccaacatggtgaaaccccttctctactaacaatacaaaaattagctgggcatggtggcacgcgcctgtaatcccaggtactcgggaggctgaggcagaagaatcacttgaacatgggaggcggaggttgcagtgagccgagatcgtgccactacactccagcctgggtgacagagcgagactccatatca

SEQ ID NO: 531617 - DNA, 683 bp, Homo sapiens
cgcaaacgattgtttctccaaatccttaaactcccgagtctatgttgtgatttatgaagcaagcattaaggcccggtaccccaatgcctcttaccttaaacgtggacagagagtgcccttgtaaatccaacccttaatcagtaggtacagcatagccagccatggtgctttaaagataaagatgacagatggcctcccaattcaggaaggggcccgcatccttataaggctctacatacatcccctcccgtgagcagatgcttcttgactcaccatggggttacctcccaataaatgcatcatacagtcaaaaagttgtaatcgtgtctgaatatatgtattggtctgttctcacattgcaataaagaaatacctgagactggataatttataaagaaaaaaggtttaggctgggtgcggtggctcacaccctgaaatcccagcagtttgggagcctgagttgagcggatcgcctcaggttagcagttcaagtccagcctggccaacatggcgaaaccccatctgtactaaaaacacaaaaattaaccgggcatggtggcacggcctgtcatcgcagctactcaggaggctgaggcatgagaattgcttgaatctggaagccggagattgcggctgcagtgagccgagattgcgccactgcattctagcttgggcaccagagt

SEQ ID NO: 531618 - DNA, 1036 bp, Homo sapiens
  misc_feature (175)..(175): n is a, c, g, or t
  misc_feature (199)..(202): n is a, c, g, or t
  misc_feature (204)..(204): n is a, c, g, or t
  misc_feature (228)..(228): n is a, c, g, or t
  misc_feature (230)..(230): n is a, c, g, or t
  misc_feature (239)..(239): n is a, c, g, or t
  misc_feature (241)..(244): n is a, c, g, or t
  misc_feature (253)..(257): n is a, c, g, or t
  misc_feature (260)..(260): n is a, c, g, or t
  misc_feature (284)..(284): n is a, c, g, or t
  misc_feature (292)..(292): n is a, c, g, or t
  misc_feature (296)..(298): n is a, c, g, or t
  misc_feature (300)..(300): n is a, c, g, or t
  misc_feature (321)..(321): n is a, c, g, or t
  misc_feature (326)..(326): n is a, c, g, or t
  misc_feature (330)..(331): n is a, c, g, or t
  misc_feature (334)..(334): n is a, c, g, or t
  misc_feature (341)..(343): n is a, c, g, or t
  misc_feature (345)..(345): n is a, c, g, or t
  misc_feature (354)..(354): n is a, c, g, or t
  misc_feature (356)..(356): n is a, c, g, or t
  misc_feature (358)..(358): n is a, c, g, or t
  misc_feature (365)..(365): n is a, c, g, or t
  misc_feature (367)..(367): n is a, c, g, or t
  misc_feature (369)..(369): n is a, c, g, or t
  misc_feature (380)..(380): n is a, c, g, or t
  misc_feature (405)..(405): n is a, c, g, or t
  misc_feature (411)..(411): n is a, c, g, or t
  misc_feature (417)..(417): n is a, c, g, or t
  misc_feature (426)..(426): n is a, c, g, or t
  misc_feature (433)..(433): n is a, c, g, or t
  misc_feature (437)..(437): n is a, c, g, or t
  misc_feature (445)..(445): n is a, c, g, or t
  misc_feature (455)..(455): n is a, c, g, or t
  misc_feature (459)..(459): n is a, c, g, or t
  misc_feature (463)..(464): n is a, c, g, or t
  misc_feature (488)..(490): n is a, c, g, or t
  misc_feature (502)..(503): n is a, c, g, or t
  misc_feature (507)..(507): n is a, c, g, or t
  misc_feature (523)..(523): n is a, c, g, or t
  misc_feature (540)..(540): n is a, c, g, or t
  misc_feature (546)..(546): n is a, c, g, or t
  misc_feature (550)..(550): n is a, c, g, or t
  misc_feature (592)..(592): n is a, c, g, or t
  misc_feature (596)..(596): n is a, c, g, or t
  misc_feature (610)..(610): n is a, c, g, or t
  misc_feature (621)..(621): n is a, c, g, or t
  misc_feature (623)..(623): n is a, c, g, or t
  misc_feature (645)..(646): n is a, c, g, or t
  misc_feature (649)..(649): n is a, c, g, or t
  misc_feature (651)..(652): n is a, c, g, or t
  misc_feature (657)..(657): n is a, c, g, or t
  misc_feature (662)..(662): n is a, c, g, or t
  misc_feature (700)..(701): n is a, c, g, or t
  misc_feature (716)..(716): n is a, c, g, or t
  misc_feature (730)..(730): n is a, c, g, or t
  misc_feature (770)..(770): n is a, c, g, or t
  misc_feature (883)..(883): n is a, c, g, or t
  misc_feature (951)..(951): n is a, c, g, or t
  misc_feature (1029)..(1029): n is a, c, g, or t
atcaaacaatgtaaggatacccactttcatccctctatttaatagactcctcaccagggaaattaggcaacaaataaataaatgaaatacattgaaattggaaaaataaaactaaaattatttcttttaaaagacatgatcttacacacagaaaatcctaaaaatgtggcaaaanactaatagggctcagttctaattnnnntncagcaatgttgcagaatacaaaancnacacatganannnngcggcatannnnngtncactaataatgaacaatctgacanggcaatanaaannncnatttcatttacttagaaatanatgtnaccnngcnggctaannncntgtacactnananctataanangnagctgacaganattaaagaagacataaataaatggnaaaccnttttcnctgattagnataatgntaanatgtcaanactacataanatgntccnnagatttagtgaaaatccctataannntttccatgatgnntttngcagaaatagaaaaanacatcctaaagtttacntggganctcnagggacctgaatagccaaaacaatcttgagaaaaaacacacntgtnggtcttatgctccntaatttcagangntattacaaagctacagtaatcnnaananngtggnacagncataaatactaattggcagtaataggcagtccagaaannaacccctgaattcanaatccagttatttnttacaggtgtgccaaaattattcgatgggaaaagaacagncttttcaacaattttgcttgggaaaatatatctacatgcaaaagttggatatttatattacaccatgtacaaaatttaactcaaaatgtatcaaagacttaaacataagagcnaaaatataaaactcttaggagaaaatatggataaaagaattcatggcattaagtttggcaatgatttnacaggtatgacaataaaagtacagataacaaaaaggaggaatagataatttggcctgatcaaatcaaaactttcattntcaaaga

SEQ ID NO: 531619 - DNA, 222 bp, Homo sapiens
  misc_feature (178)..(178): n is a, c, g, or t
  misc_feature (193)..(193): n is a, c, g, or t
  misc_feature (207)..(207): n is a, c, g, or t
atggaccagaccgacgcggcgggcatcacgttgcgcgatgccatgcaggctgccggactgccgggcacgatggaggccatccagtccatcaaacgcgacccgtctcgctacctcggctttgtcgaggtccatatcgaacagggcccggtgctggacagcctggacctgccgctgggcntcgtcaccagcatcnacggcagccgccgntacaccggcgaagtg

SEQ ID NO: 531620 - DNA, 622 bp, Homo sapiens
gcacgagtccactctaggctttctttctgcttctttgatatgtatcgtggtatttttactgttttacccacatgtaacctggtgttcatgggtcctgataccaggagctgctttatctctactagtaattcctttgatattctcagcttattcaagaagctcaggctcaagggatgatgacgaaaccgaggaactggaagaaaagggcatgctgctgaatgacccatatctaagttcaaagtccgggagattcgatatcgacgctgatagtgaggccaacctccgtggtgattcaagaacgaatttattgggtgacaattttaagaacggtactaatatcactgttgtcccagatattatttcacacaatcaagatccgaaattatcaaacataaccacttctaccacgtctgatatttctactttcgacaaagaagcaaaggacatggaaaattcaaatggttccggacttaatgaagaagaggacgatggcatggcatatgacaaaaggaggtcaacttcaacgtattctgtcattgaaagtgaaagtggcttgaaaaatgggagtgtttctaataattatgtgagaaacaatggtagtaacaccagcaacaatataaac

SEQ ID NO: 531621 - DNA, 873 bp, Homo sapiens
atatcattctatttataacagtctgtttttagtagtggtatttccatttacaaaatgcagtaattgtcagttgctgaaattgtcaaatcctagaaaatgtagcattcctacaggtgatgttaagatcattctcaaacaggtgttggctgaagattcatttgacgaatctgatttttctgaaatagatgattcttatgattccaatgattctgacgttagttttgtttagaaataactacaagaacagtttttatattttattttcacattgaaaatcagatttgcctcagcctcaaagagcatgtttacgtaaaatggaatgagcactggcagcgagctgcacttttttttttttcctaaccgggaaagggttaaggacactagaagagcaagagcaaacttgagcccaaaattggtccgacaaattattaaagataaaccacgggaatcttctcgattttcacgactctgaagaaaccattcacaaaaatctccttgaaccacaacgtgggtttttggaaaccaaggaactttggccaaaacctttagtcagactaccaagggaagactcaattaaattccagagactgctaacagactttacacctggatactgcagaatttcaaagggattcataggtggctactgtgaccactattttgccaataacttgcggaaatctacagaggaacgtgggcataaattctctaaaacccattaaaacctcccaagtattgacccattgaacactgtgattccaaagcctgaacaaacccagtacacgtcagtgagattctggactgtataagttccccagttaacgctgggaaccacgggttcacgggtggaattctaccacactttaaggacgc

SEQ ID NO: 531622 - DNA, 364 bp, Homo sapiens
cggcggaccggggctctgaagaacgcggcgtctgtgagtttttcgcgagcagctcgctcctacaagaagccctcccacagtttgatccagtagggcgttaatggccgcctttcatccgccgggcaatcaggtagaggcccagccccaccagcgctgtagcagcaccgatgtagccggtactggtccaacccaaccctgccgtaatcgccatccccccaaaccacggtcccagcgcattcgccaggttaaacgccgcatggttggacgctgccgccaagctcggcgcttcgtgggcgatgtccatcaagcgaatctgcaacggcgccgccaatgcgaccatggtgcccaccagccccatgctcag

SEQ ID NO: 531623 - DNA, 109 bp, Homo sapiens
cttaggtaacccttcccgaaagagtaaagcagagcctgaagaggaagaagatgatataaagccctaaaatgtgcactcattggggtcgggagtttgttttaaaacaatt

SEQ ID NO: 531624 - DNA, 105 bp, Homo sapiens
cacctgggcgtatggtgatgttgctcccggggcaagccgggcaggagcggacgaacgggatgcagtcggcttggtccttgatgcgggagtcattgggcgggatct

SEQ ID NO: 531625 - DNA, 461 bp, Homo sapiens
gggcggctgggacctgtacacgtatcctgaaaactggagggccttcaaggctctcatcgctgctcagtacagcggggctcaggtccgcgtgctctccgaaccatcccacattccattgtgggccaaagccaaccgcacccctgaactttctccgcacaatttcctgccggcaaggtcccagcatttgagggtgatgatggacttctgtgtgtttgagatgcaagcgccagttgccgtactatgtgagcaatgaggagctgccggggaagtactccagaggcagcgagcctcaggtggtgcagtgggtgagcttagctgattccgatatagtgcccccaaggcagtacctgggtgttccccaacttgggcatcatgcaaccagaataaacaggccactgacgcaatgcacaaggaggacagtgaggcgaacttctgggcgctgctggatgcttacttgcaag

SEQ ID NO: 531626 - DNA, 1321 bp, Homo sapiens
taacccctataatcgggtataataagggtcttataagaaatcccagcaataattagggtaataagtatatacggtctctgtaattcaaacactccacggaaaggctgggtggggccttgaaatgtccagggtttcctgaaaaagccggcacccccttccgggaccaggcacgcctaaggactggtgctccccaaatggtggggtgtctgggagagcaagaagatctcagagacaggccatctcgcacagggctatgtgagaacccactctctgggggcaccggggcataatcactggcttccgtgtgtgcaggcctcaagaaaaagcccccttcgtgccatacagggtggggcaggcataccctccgaaataggaggctgcaagcaggccaccgtgaagggggtggcctccaggggcatagaaaggcgaggtgtaaccacgtgtgctcagacagtggccaatgggccctccgtgccagcccaaataagaggtgtccaccactctcccctgtgttgtgcccccgtggggcacacaccaggcactcctcacaagtaaagtgcctgggaacacccagactgtgggcccatgagagccagccaaggaaacatagacacacgggggagccaacatccatggggagaagtgggggctattaaaccaaaaccacgggagtaaagcgcaaggagggaggccccccaccaagagcagggggccacaccataatagacaaccatttccacgacgccaacataagtgagaaacaccccggaaacaccacattattaaaaaagccccctccacaacggagccatacgcaagaaaaatctattgcgggagacaaccctcagcgggggtacaccacagtagagagcgacagacgaaaacggatagaggcacacaattccgcccatcgcagagtaagagggaacacaccagagaagctgactcagaggaacaaacatccgacaaccgaaggtcagacaaaaaggagacttgtgagagataaggatccacatagataatagtggccactccaaaaggagtatctgggaaacaacggagggaacgatacaacacacgaacagcggagaagggtcaccgacaagccgttctcggtggcacgcagggtcgacccatcaagcaaagacagacacacgcacccaagcggtagatcaaaaacacccccacaaaagaggtgtagcggcaccacaaaggaggcgcgacgtgtggaggacccatgtgagggcggtagcacacccgggggtgagcccatcatccacaacaaccacaacgatgttgcagattgaagcaacacaagaga

SEQ ID NO: 531627 - DNA, 188 bp, Homo sapiens
ggggaaaaaggcaaccaggaatcggtcaggagtcactgagtccacatctttcaacatttctctcaccttctttggaaacaagtgcttgtgtgtgcatgtcacaacctttcccagtgcccaggggcaccaaacaactgctctgaagtctcaaatgaggcttgaaaacccccaggatgctgctttgtgtg

SEQ ID NO: 531628 - DNA, 165 bp, Homo sapiens
acattctgatcatcctcacgggacgccaggggcacgagggtggttttcctgaagcagcgggctagtggcttattactggtgactggacctcgggtcctcaatcgagttcctctacgaagaacacaccagaaattggtcatggccacttcaaccgcatcacccgtt

SEQ ID NO: 531629 - DNA, 256 bp, Homo sapiens
atcctgactgaacagatctgtagtgatgatgtacgatgacattgcttacgctgaagacaatcccactccagtgaattgtgatcaacagtgcccaatggcacagatgtctatcagggagtcccgacggcctacactggagaggatgtaaccccacaaaataaccattgctgtgctgagaggcgctgccgaagcacagtgaagggcataagatccggcaaagtacatgaaaagagagcccccagtgcatcacgtgttc

SEQ ID NO: 531630 - DNA, 198 bp, Homo sapiens
atgttgcacatgtgactcgatactaacataagttcttctatagggtgatagataggtccaatcgggatgtgaggagtgcagtcatatgttcgggattaatcaggtagtgggtgtgcgagcttgaacgctaccttgataggtgggtgctttaaggcctactatgggtgttaaatttttcactctctctctcatgtgata

SEQ ID NO: 531631 - DNA, 585 bp, Homo sapiens
taatcagctcggtacctacacagataagttgacgggacccgaagggcaggtcagccctaggctacagcggctctcatgatgtgggctcacctgcgccccagaccctgcaggggcccccctgcttggctctgctgggagagtgctcagccgcccagtcctgcctgcaagcccagggcgagtattggaggaggggcagccacgggcagagcaccatgcccatccccgagtctctggtgtgtctgccccctctggcatcctctgggcgtcccatgatcccttctgtgtctgcgtgtccgaatccccgtgtgaccctgtcccagcattttcccgccgaccctgcgtgtccccgtggcgctgtccgctctccctctcctgctgcccacccacctgccagtgttatttatgctcccttcgtgggtgatggccacgccctcaccatgtccctggcagagggcttccctccgggatcccctgcctggtgcccacactgcctcgcaagcgctcgccaccctcacgtggctcacctgctgttgagccttgtgctgtcaataaacggtttgaggattgcaaaaaaaaaaaaatttc

SEQ ID NO: 531632 - DNA, 1174 bp, Homo sapiens
ggctggggaccttggggcaggtggtctccctccagaagagccctgtgttcagccagccctgtcctccagagcaagccccacaggtagcaaagtcagggagggtaatggcttagccccaggctcccaagctgggcagaacagggcagggagctggagagggttggcagtgggcccatgaatccagcctgggcaaggccctgctgtgagggacccctagggacccctgggcctgccagggaggaagggctgcccagaaaaggtactgactgatgcctcctcaccatcttctgccttggctggcacaggtcccaagtgcagagggggagctggtcaggctggtcagtcgggcgggggggcggggggcatgtttctggcctgctgtcaccatggaaatggcagtggctgcagggtgtgtgtgcaagggaggagggtgctgccacagagagcccagccaggaccaccatgaaagccaggagcaccgagggcctctggttggctcacaaacatgcctggtgcaccaggcagagggaacagccgagaaggtgagctccctggggaaggactggcacaagttctgcctcaagtgcgagcgctgcagcaagacgctgacgcccgggggccacgccgagcatgacgggaagccgttctgccacaagccgtgctacgccaccctgttcggacccaaaggcgtgaacatcgggggcgcgggctcctacatctacgagaagcccctggcggaggggccgcaggtcaccggccccatcgaggtccccgcggcccgagcagaggagcggaaggcgagcggccccccgaaggggcccagcagagcctccagtgtcaccactttcaccggggagcccaacacgtgcccgcgctgcagcaagaaggtgtacttcgctgagaaggtgacgtctctgggcaaggattggcaccggccctgcctgcgctgcgagcgctgcgggaagacactgacccccggcgggcacgcggagcacgacggccagccctactgccacaagccctgctatggaatcctcttcggacccaagggagtgaacaccggtgcggtgggcagctacatctatgaccgggaccccgaaggcaaggtccagccctaggctacagcggctctcatgatgtgggctcagcggttggtgcgggtacgcgagctcga

SEQ ID NO: 531633 - DNA, 491 bp, Homo sapiens
  misc_feature (8)..(8): n is a, c, g, or t
  misc_feature (11)..(11): n is a, c, g, or t
  misc_feature (53)..(53): n is a, c, g, or t
  misc_feature (377)..(377): n is a, c, g, or t
  misc_feature (456)..(456): n is a, c, g, or t
  misc_feature (480)..(480): n is a, c, g, or t
  misc_feature (488)..(488): n is a, c, g, or t
gcagaagntgngaacactggtaaggatgggacgagcacacactcactgaactnagaaaaagcagaaggcagtgggatgccgaggtgcagacaaggccaaagctggttctaccactccaggttacatgaacaaggacaaggcaggcaaccctccggaccacagtttcctcatctgtcaaataaatacagtgataatagcacctcatgagatgtgagagattcaacagagccagttcagggcaagagatcaccagtgaatggatgagcaagcatgggttagctgtagatgtaggagatcaggactgagaccaagccatccgatcaagggaagggaaggggtggatgtgctgggatgcctgctctaagaaggaaaaagtngggagcccagagcactgtgtgtctttgggtttggggtccacagattgagtgttgcagaatttggtttaagttagggcantgcccctttttaggaaacttcccnttttcttnatt

SEQ ID NO: 531634 - DNA, 554 bp, Homo sapiens
tctagaggatcccgtagaagacgacaggaaggggagaaacggacagaagggagtaacaccggtgcggtgggcagctacatctatgaccgggaccccgaaggcaaggtccagccctaggctacagcggctctcatgatgtgggctcacctgcgccccagaccctgcaggggcccccctgcttggctctgctgggagagtgctcagccgcccagtcctgcctgcaagcccagggcgagtattggaggaggggcagccacgggcagagcaccatgcccatccccgagtctctggtgtgtctgccccctctggcatcctctgggcgtcccatgatcccttctgtgtctgcgtgcacccacctgccagtgttatttatgctcccttcgtgggtgatggccacgccctcaccatgtccctggcagagggcttccctccgggatcccctgcctggtgcccacactgcctcgcaagcgctcgccaccctcacgtggctcacctgctgttgagccttgtgctgtcaataaacggtttgaggattgcaaaaaaaaaaaaatttc

SEQ ID NO: 531635 - DNA, 284 bp, Homo sapiens
tcgagactcggtaccccgacggtctgttaccgggatcaaaccggctgagccttctttacgtgcgttgtttgaacctcgattgattgagcaagtatattgggtcaatgagtgcgcatttgacacctcgcaactttccatttgggcttcgcgagaacttaaagagagtggtgtgcaggttcactatcaaacccgcgtcgtggctatttcaaaggggcggctggcaccactggaggtggtagtcgacctggcgcagggggtaaagcctcgagaggatcctgtagtac

SEQ ID NO: 531636 - DNA, 1254 bp, Homo sapiens
aagcttggcacgagggacagacgggcaggcggggctgggcgcgggcggcggcggcccggaggagaacgggcggagggcgcgggccgaccgggcgcaccgaccatggcctccaaatgccccaagtgcgacaagaccgtgtacttcgccgagaaggtgagctccctggggaaggactggcacaagttctgcctcaagtgcgagcgctgcagcaagacgctgacgcccgggggccacgccgagcatgacgggaagccgttctgccacaagccgtgctacgccaccctgttcggacccaaaggcgtgaacatcgggggcgcgggctcctacatctacgagaagcccctggcggaggggccgcaggtcaccggccccatcgaggtccccgcggcccgagcagaggagcggaaggcgagcggccccccgaaggggcccagcagagcctccagtgtcaccactttcaccggggagcccaacacgtgcccgcgctgcagcaagaaggtgtacttcgctgagaaggtgacgtctctgggcaaggattggcaccggccctgcctgcgctgcgagcgctgcgggaagacactgacccccggcgggcacgcggagcacgacggccagccctactgccacaagccctgctatggaatcctcttcggacccaagggagtgaacaccggtgcggtgggcagctacatctatgaccgggaccccgaaggcaaggtccagccctaggctacagcggctctcatgatgtgggctcacctgcgccccagaccctgcaggggcccccctgcttggctctgctgggagagtgctcagccgcccagtcctgcctgcaagcccagggcgagtattggaggaggggcagccacgggcagagcaccatgcccatccccgagtctctggtgtgtctgccccctctggcatcctctgggcgtcccatgatcccttctgtgtctgcgtgtccgaatccccgtgtgaccctgtcccagcattttcccgccgaccctgcgtgtccccgtggcgctgtccgctctccctctcctgctgcccacccacctgccagtgttatttatgctcccttcgtgggtgatggccacgccctcaccatgtccctggcagagggcttccctccgggatcccctgcctggtgcccacactgcctcgcaagcgctcgccaccctcacgtggctcacctgctgttgagccttgtgctgtcaataaacggtttgaggattgcaaaaaaaaaaaaatttc

SEQ ID NO: 531637 - DNA, 1189 bp, Homo sapiens
tggcacgaggcctcgtgccaagcttgcacgagggaccatggcctccaaatgccccaagtgcgacaagaccgtgtacttcgccgagaaggtgagctccctggggaaggactggcacaagttctgcctcaagtgcgagcgctgcagcaagacgctgacgcccgggggccacgccgagcatgacgggaagccgttctgccacaagccgtgctacgccaccctgttcggacccaaaggcgtgaacatcgggggcgcgggctcctacatctacgagaagcccctggcggaggggccgcaggtcaccggccccatcgaggtccccgcggcccgagcagaggagcggaaggcgagcggccccccgaaggggcccagcagagcctccagtgtcaccactttcaccggggagcccaacacgtgcccgcgctgcagcaagaaggtgtacttcgctgagaaggtgacgtctctgggcaaggattggcaccggccctgcctgcgctgcgagcgctgcgggaagacactgacccccggcgggcacgcggagcacgacggccagccctactgccacaagccctgctatggaatcctcttcggacccaagggagtgaacaccggtgcggtgggcagctacatctatgaccgggaccccgaaggcaaggtccagccctaggctacagcggctctcatgatgtgggctcacctgcgccccagaccctgcaggggcccccctgcttggctctgctgggagagtgctcagccgcccagtcctgcctgcaagcccagggcgagtattggaggaggggcagccacgggcagagcaccatgcccatccccgagtctctggtgtgtctgccccctctggcatcctctgggcgtcccatgatcccttctgtgtctgcgtgtccgaatccccgtgtgaccctgtcccagcattttcccgccgaccctgcgtgtccccgtggcgctgtccgctctccctctcctgctgcccacccacctgccagtgttatttatgctcccttcgtgggtgatggccacgccctcaccatgtccctggcagagggcttccctccgggatcccctgcctggtgcccacactgcctcgcaagcgctcgccaccctcacgtggctcacctgctgttgagccttgtgctgtcaataaacggtttgaggattgcaaaaaaaaaaaaatttc

SEQ ID NO: 531638 - DNA, 1643 bp, Homo sapiens
ggctggggaccttggggcaggtggtctccctccagaagagccctgtgttcagccagccctgtcctccagagcaagccccacaggtagcaaagtcagggagggtaatggcttagccccaggctcccaagctgggcagaacagggcagggagctggagagggttggcagtgggcccatgaatccagcctgggcaaggccctgctgtgagggacccctagggacccctgggcctgccagggaggaagggctgcccagaaaaggtactgactgatgcctcctcaccatcttctgccttggctggcacaggtcccaagtgcagagggggagctggtcaggctggtcagtcgggcgggggggcggggggcatgtttctggcctgctgtcaccatggaaatggcagtggctgcagggtgtgtgtgcaagggaggagggtgctgccacagagagcccagccaggaccaccatgaaagccaggagcaccgagggcctctggttggctcacaaacatgcctggtgcaccaggcagagggaacagccgagaaggtgagctccctggggaaggactggcacaagttctgcctcaagtgcgagcgctgcagcaagacgctgacgcccgggggccacgccgagcatgacgggaagccgttctgccacaagccgtgctacgccaccctgttcggacccaaaggcgtgaacatcgggggcgcgggctcctacatctacgagaagcccctggcggaggggccgcaggtcaccggccccatcgaggtccccgcggcccgagcagaggagcggaaggcgagcggccccccgaaggggcccagcagagcctccagtgtcaccactttcaccggggagcccaacacgtgcccgcgctgcagcaagaaggtgtacttcgctgagaaggtgacgtctctgggcaaggattggcaccggccctgcctgcgctgcgagcgctgcgggaagacactgacccccggcgggcacgcggagcacgacggccagccctactgccacaagccctgctatggaatcctcttcggacccaagggagtgaacaccggtgcggtgggcagctacatctatgaccgggaccccgaaggcaaggtccagccctaggctacagcggctctcatgatgtgggctcacctgcgccccagaccctgcaggggcccccctgcttggctctgctgggagagtgctcagccgcccagtcctgcctgcaagcccagggcgagtattggaggaggggcagccacgggcagagcaccatgcccatccccgagtctctggtgtgtctgccccctctggcatcctctgggcgtcccatgatcccttctgtgtctgcgtgtccgaatccccgtgtgaccctgtcccagcattttcccgccgaccctgcgtgtccccgtggcgctgtccgctctccctctcctgctgcccacccacctgccagtgttatttatgctcccttcgtgggtgatggccacgccctcaccatgtccctggcagagggcttccctccgggatcccctgcctggtgcccacactgcctcgcaagcgctcgccaccctcacgtggctcacctgctgttgagccttgtgctgtcaataaacggtttgaggattgcaaaaaaaaaaaaatttc

SEQ ID NO: 531639 - DNA, 253 bp, Homo sapiens
ctgaccccccccattagaatgtgattttggccccctctcatttctcggcgggcctttggtgccgcttctggtctggaggatcctccccctgcataagccccggagcgagccttgatgtttaggcggaggaaagggtcttcaggccgtttccttgccccgagcaattgggtggggggattaaaatccggtgctgataagagccagtttaaagggcatgggattgcttcaattaaaattacaaaagagaaaaaaa

SEQ ID NO: 531640 - DNA, 394 bp, Homo sapiens
ccgagtgatgcatgtgaatgtttactgataccgactagtgatgcacagctactgaagcgaaaaagaaagaaacagtatggagatttgctcattgatgctggagactggacgttcttcttatttcacgcctgtccccagtgatgatggaattcttattctactttgtcatagatccgcagtaccggtgacattgtcgcgatgagacactccaccactaaatttcccactacttgccaagtagctgggtgatggtgcttgccttcccatcccactcctggatgctgaaccaatgcacaatctgtaaaggtgccgacagtctgagttgtgctgccagcagctggggttgcttcaaactgctctcccagggtacaagaagactgtgttgttaccaaag

SEQ ID NO: 531641 - DNA, 1487 bp, Homo sapiens
  misc_feature (30)..(31): n is a, c, g, or t
cgggaggcaggtgttggagcgcgggcaggnnttggagcgcgggcaggctcgagcacaggccccttcaccgcaggcactgaggggactaacagtgacaagcccctggtgccccttctcaaatggcttggctctagcggggttccagtgctgggtggcgctgagacccagagggagaacagggcctggggcgacgtggctcctccgggtctcagaaggaggggcatgggcccgccaggtggaatggaaggcgcctgtggagacctcctgaaagtggtggacccccggagctgcgtgggggtggtggctgccagtgtgggggcggagggggtgcggggctgcgccccgtgcctgacccccctgccgcccctcccgctcaggccgagaaggtgagctccctggggaaggactggcacaagttctgcctcaagtgcgagcgctgcagcaagacgctgacgcccgggggccacgccgagcatgacgggaagccgttctgccacaagccgtgctacgccaccctgttcggacccaaaggcgtgaacatcgggggcgcgggctcctacatctacgagaagcccctggcggaggggccgcaggtcaccggccccatcgaggtccccgcggcccgagcagaggagcggaaggcgagcggccccccgaaggggcccagcagagcctccagtgtcaccactttcaccggggagcccaacacgtgcccgcgctgcagcaagaaggtgtacttcgctgagaaggtgacgtctctgggcaaggattggcaccggccctgcctgcgctgcgagcgctgcgggaagacactgacccccggcgggcacgcggagcacgacggccagccctactgccacaagccctgctatggaatcctcttcggacccaagggagtgaacaccggtgcggtgggcagctacatctatgaccgggaccccgaaggcaaggtccagccctaggctacagcggctctcatgatgtgggctcacctgcgccccagaccctgcaggggcccccctgcttggctctgctgggagagtgctcagccgcccagtcctgcctgcaagcccagggcgagtattggaggaggggcagccacgggcagagcaccatgcccatccccgagtctctggtgtgtctgccccctctggcatcctctgggcgtcccatgatcccttctgtgtctgcgtgtccgaatccccgtgtgaccctgtcccagcattttcccgccgaccctgcgtgtccccgtggcgctgtccgctctccctctcctgctgcccacccacctgccagtgttatttatgctcccttcgtgggtgatggccacgccctcaccatgtccctggcagagggcttccctccgggatcccctgcctggtgcccacactgcctcgcaagcgctcgccaccctcacgtggctcacctgctgttgagccttgtgctgtcaataaacggtttgaggattgcaaaaaaaaaaaaatttc

SEQ ID NO: 531642 - DNA, 1182 bp, Homo sapiens
  misc_feature (30)..(31): n is a, c, g, or t
cgggaggcaggtgttggagcgcgggcaggnnttggagcgcgggcaggctcgagcacaggccccttcaccgcagccgagaaggtgagctccctggggaaggactggcacaagttctgcctcaagtgcgagcgctgcagcaagacgctgacgcccgggggccacgccgagcatgacgggaagccgttctgccacaagccgtgctacgccaccctgttcggacccaaaggcgtgaacatcgggggcgcgggctcctacatctacgagaagcccctggcggaggggccgcaggtcaccggccccatcgaggtccccgcggcccgagcagaggagcggaaggcgagcggccccccgaaggggcccagcagagcctccagtgtcaccactttcaccggggagcccaacacgtgcccgcgctgcagcaagaaggtgtacttcgctgagaaggtgacgtctctgggcaaggattggcaccggccctgcctgcgctgcgagcgctgcgggaagacactgacccccggcgggcacgcggagcacgacggccagccctactgccacaagccctgctatggaatcctcttcggacccaagggagtgaacaccggtgcggtgggcagctacatctatgaccgggaccccgaaggcaaggtccagccctaggctacagcggctctcatgatgtgggctcacctgcgccccagaccctgcaggggcccccctgcttggctctgctgggagagtgctcagccgcccagtcctgcctgcaagcccagggcgagtattggaggaggggcagccacgggcagagcaccatgcccatccccgagtctctggtgtgtctgccccctctggcatcctctgggcgtcccatgatcccttctgtgtctgcgtgtccgaatccccgtgtgaccctgtcccagcattttcccgccgaccctgcgtgtccccgtggcgctgtccgctctccctctcctgctgcccacccacctgccagtgttatttatgctcccttcgtgggtgatggccacgccctcaccatgtccctggcagagggcttccctccgggatcccctgcctggtgcccacactgcctcgcaagcgctcgccaccctcacgtggctcacctgctgttgagccttgtgctgtcaataaacggtttgaggattgcaaaaaaaaaaaaatttc

SEQ ID NO: 531643 - DNA, 952 bp, Homo sapiens
  misc_feature (736)..(736): n is a, c, g, or t
  misc_feature (767)..(767): n is a, c, g, or t
  misc_feature (934)..(934): n is a, c, g, or t
gggaggccggtcggggctgggctcaggggccgagacctagctgggcttggggcggggccgagacggagcgaggggtccagggtgtgggaaacggggaggggtttgaggaggggatcggaatgtggctcaagttcgggaggcgttacctgcggagggtttgaggcaggcccaggagcgagcccatggtcttccgacgcggggccaggggcgggccccaggatccggagcttcgtgcggggccgagtccaggtttggggcccgggaggcggggccagttagggcgagggtccctgggatcgtcgggtcaggccttgggctaacgtaggcactctcgcagttcctccgccttcaggaaggtcttttcagcaggggccttacgggtgcatgcttcggtcctggaggccttatcctagcctcctctccatcagcgccacccgtctggggcccgaaaggagggagctttccctctgtcccccagcctttggactgtcagcaaacaagccattcgttcatcaaatactttttaagcgcctaccatgtgcctgacaagggagatgtaacggtgagaaaaactaggtgtggtccaggcccttcaggggctcaggtgctcgtggaagaagtggacattgaagtacttatcacacaaatgaggataaaagtacgatagcgatatctaccacgaagctgttgttccccaccagaaccaaatgagcgcaagatctgacaaagaaaaaanaaggttcatcttttattcctccaaacacttncatttaaatcaagaggatgggatgtggttattgctgtgttttagacagaatcaacggtttctgggtctgagatgtgcatacacttctcagtcctgtatcctgagatggagtacctgagaatcacagcagtctaaccagggatgggtctgggtgatttaggaaggttngcttcagaactgaggcca

SEQ ID NO: 531644 - DNA, 1343 bp, Homo sapiens
aagcttggcacgagggacagacgggcaggcggggctgggcgcgggcggcggcggcccggaggagaacgggcggagggcgcgggccgaccgggcgcaccgaccatggcctccaaatgccccaagtgcgacaagaccgtgtacttcgccgagaaggtgagctccctggggaaggactggcacaagttctgcctcaagtgcgagcgctgcagcaagacgctgacgcccgggggccacgccgaggtgagccccactgcgcggcgcgggcgggggcgggggtcgcgactcccgccaccctcaggcagggtcctgacccgcgcccctctgcgcagcatgacgggaagccgttctgccacaagccgtgctacgccaccctgttcggacccaaaggcgtgaacatcgggggcgcgggctcctacatctacgagaagcccctggcggaggggccgcaggtcaccggccccatcgaggtccccgcggcccgagcagaggagcggaaggcgagcggccccccgaaggggcccagcagagcctccagtgtcaccactttcaccggggagcccaacacgtgcccgcgctgcagcaagaaggtgtacttcgctgagaaggtgacgtctctgggcaaggattggcaccggccctgcctgcgctgcgagcgctgcgggaagacactgacccccggcgggcacgcggagcacgacggccagccctactgccacaagccctgctatggaatcctcttcggacccaagggagtgaacaccggtgcggtgggcagctacatctatgaccgggaccccgaaggcaaggtccagccctaggctacagcggctctcatgatgtgggctcacctgcgccccagaccctgcaggggcccccctgcttggctctgctgggagagtgctcagccgcccagtcctgcctgcaagcccagggcgagtattggaggaggggcagccacgggcagagcaccatgcccatccccgagtctctggtgtgtctgccccctctggcatcctctgggcgtcccatgatcccttctgtgtctgcgtgtccgaatccccgtgtgaccctgtcccagcattttcccgccgaccctgcgtgtccccgtggcgctgtccgctctccctctcctgctgcccacccacctgccagtgttatttatgctcccttcgtgggtgatggccacgccctcaccatgtccctggcagagggcttccctccgggatcccctgcctggtgcccacactgcctcgcaagcgctcgccaccctcacgtggctcacctgctgttgagccttgtgctgtcaataaacggtttgaggattgcaaaaaaaaaaaaatttc

SEQ ID NO: 531645 - DNA, 460 bp, Homo sapiens
tcgagcacgaaaatagggtacatataggctgaggaatcaccctagagagggcttagcagcatcacattgagcctttaaaatttaacatttttaactataaaaaaagaaaggggagtaatatggcaaaggcatctgacatttgagactgtggctccttggttctggtctaagctcttttcattaggtcatacagactatgggttaactcttttactctatgtgtctggttattggtctgaatatagagtcaacaataacagtctgggtcatgttggagagtcaatatataaggctacaattaattcaatctgatgctatcatgaacatttagacataaatataattcaaagagagcaaggctggataggcagtgaattaaaatacagagcacttaaagcaataaaaaattattagattcatttactcatttactcttagtagaccttggcaaacaatacta

SEQ ID NO: 531646 - DNA, 1200 bp, Homo sapiens
aagcttggcacgagggacagacgggcaggcggggctgggcgcgggcggcggcggcccggaggagaacgggcggagggcgcgggccgaccgggcgcaccgaccatggcctccaaatgccccaagtgcgacaagaccgtgtacttcgccgagaaggtgagctccctggggaaggactggcacaagttctgcctcaagtgcgagcgctgcagcaagacgctgacgcccgggggccacgccgagcatgacgggaagccgttctgccacaagccgtgctacgccaccctgttcggacccaaaggcgtgaacatcgggggcgcgggctcctacatctacgagaagcccctggcggaggggccgcaggtcaccggccccatcgaggtccccgcggcccgagcagaggagcggaaggcgagcggccccccgaaggggcccagcagagcctccagtgtcaccactttcaccggggagcccaacacgtgcccgcgctgcagcaagaaggtgtacttcgctgagaaggtgacgtctctgggcaaggattggcaccggccctgcctgcgctgcgagcgctgcgggaagacactgacccccggcgggcacgcggagcacgacggccagccctactgccacaagccctgctatggaatcctcttcggacccaagggagtgaacaccggtgcggtgggcagctacatctatgaccgggaccccgaaggcaaggtccagccctaggctacagcggctctcatgatgtgggctcacctgcgccccagaccctgcaggggcccccctgcttggctctgctgggagagtgctcagccgcccagtcctgcctgcaagcccagggcgagtattggaggaggggcagccacgggcagagcaccatgcccatccccgagtctctggtgtgtctgccccctctggcatcctctgggcgtcccatgatcccttctgtgtctgcgtgtccgaatccccgtgtgaccctgtcccagcattttcacccacctgccagtgttatttatgctcccttcgtgggtgatggccacgccctcaccatgtccctggcagagggcttccctccgggatcccctgcctggtgcccacactgcctcgcaagcgctcgccaccctcacgtggctcacctgctgttgagccttgtgctgtcaataaacggtttgaggattgcaaaaaaaaaaaaatttc

SEQ ID NO: 531647 - DNA, 593 bp, Homo sapiens
tggggttggatggtcatttatttctttaaaataaactccctctaaaggcaggaagtaagtattaagtgagaaaccacagaatgtggtggctctcctccaaattttcctcagtagccctacctagtgtatttttaaatttatcattagaaaaacaaacaaaacgacagcacaagttagcaggtgcagccagtgacgtggtcactcatttataatattatagttctcccgtgacttatacatatatacattccctgggaataataatatggagtgcatttgtggtgagatgtgttctccattatagtggtgtgtgacaacgtatacgtgaataagtgtggtcacaacacaccctgtgacccccttggcgcataagatggtgtggcgaacaacgtgtgctcccatatattgtgggcaacaagaaatgtgaaactctatcttggtgccggtgccaaaatattaatattattatctctatagaccatataacattcctattctccaccaacagagcgctccacaacaatacccctataaaaatctagagtgtcatcacatactatagagctttctacaagaaagcatcacctagaggg

SEQ ID NO: 531648 - DNA, 218 bp, Homo sapiens
ggccattatacttggctcacgatacgtgacacttcttcgacagtggggaaatggaaaaagattaacgtgtactcagtaggtactggatatctgatagtacatttacctccaggactccaaatagagtgatcaaatgaaggtttacaccactgatctccaggtaggatacctgtgatcttgtcctattactgccacggatcccctctgaccttgtggtg

SEQ ID NO: 531649 - DNA, 206 bp, Homo sapiens
tcatgtatctagaggatcagactctgcatgtcctaagtgtgattctcttcaggaagtcagaccttccctggtttaccttttgtctggaaaaagcccaactgaactccagtcagtaggaaagtgccacaattgtcacattgaaccggtactggaaaaaaatcttccattcaaaattaaccaatggattggaccttctggtacttttc

SEQ ID NO: 531650 - DNA, 403 bp, Homo sapiens
  misc_feature (9)..(9): n is a, c, g, or t
  misc_feature (22)..(22): n is a, c, g, or t
  misc_feature (54)..(54): n is a, c, g, or t
  misc_feature (56)..(56): n is a, c, g, or t
  misc_feature (95)..(95): n is a, c, g, or t
  misc_feature (162)..(162): n is a, c, g, or t
  misc_feature (169)..(169): n is a, c, g, or t
  misc_feature (192)..(192): n is a, c, g, or t
  misc_feature (217)..(217): n is a, c, g, or t
  misc_feature (224)..(224): n is a, c, g, or t
  misc_feature (267)..(267): n is a, c, g, or t
  misc_feature (310)..(310): n is a, c, g, or t
  misc_feature (389)..(389): n is a, c, g, or t
gcaggacgncacattgaaatgnggcgggtggacgacggcggtgatggcactctngnaattatgaccagtatacccagcgtgtggtgcacaacgtnccacatttatcgcccaccgcgaacgagtcattgtcggtcatgtaataactgcgtggatactcttgancaccatngtatatttctcaacgcatgcatngggcgccgtaactatacgacttttnacgcgtntcttatccatacagcgctcctgcttttgatcggtatggtgggntgcatactcaagttatactatattgcatcgcccaagacgtcgnaacaaggccgcccacaagcgcacccatcccgtggatttgtgcatgcgctaaaaacactcccgaaagtgctgtctttttntcttagcttcgtcg

SEQ ID NO: 531651 - DNA, 246 bp, Homo sapiens
cctgcctggacacagagtgagatccgtctagaaaactaaaaaaaaaacaaaaaaaaacaactcataaaatagggggaaatgtgtctgggctttagcacactggggataatttgggaggcaaaggcagagaagggatactggcctagcagcctcggtgtagatgcttattaaaaaagtattggcctggccaggtgcgtgggctcatgcctataatcccagcactatgggaggctgggcgtgcacggg

SEQ ID NO: 531652 - DNA, 321 bp, Homo sapiens
  misc_feature (47)..(47): n is a, c, g, or t
  misc_feature (281)..(281): n is a, c, g, or t
cgaccactagactcctagaaatttcgctgaagtgaaaggcccttgantttttataggatttattttccaccctctgacatgcaaatgtcttagtagtaagtctagaatagttgctacttcttactgcttccagtcagcattatgtcatcaatgtaatggaccagtgcgattgatatagaagggaaaggcaattaagatcccttcagattaaattatgacatagggctggagagttggcatacacctgaggtaggacaacgaaggtgtaattgcgagcttgncacctgaaaccaaacttgtttctggtggtctcttacttaa

SEQ ID NO: 531653 - DNA, 755 bp, Homo sapiens
  misc_feature (13)..(13): n is a, c, g, or t
  misc_feature (16)..(17): n is a, c, g, or t
  misc_feature (19)..(19): n is a, c, g, or t
  misc_feature (26)..(26): n is a, c, g, or t
  misc_feature (38)..(38): n is a, c, g, or t
  misc_feature (41)..(41): n is a, c, g, or t
  misc_feature (50)..(51): n is a, c, g, or t
  misc_feature (222)..(225): n is a, c, g, or t
  misc_feature (229)..(230): n is a, c, g, or t
  misc_feature (236)..(236): n is a, c, g, or t
  misc_feature (238)..(240): n is a, c, g, or t
  misc_feature (243)..(244): n is a, c, g, or t
  misc_feature (256)..(256): n is a, c, g, or t
  misc_feature (260)..(260): n is a, c, g, or t
  misc_feature (277)..(277): n is a, c, g, or t
  misc_feature (293)..(293): n is a, c, g, or t
  misc_feature (312)..(312): n is a, c, g, or t
  misc_feature (323)..(323): n is a, c, g, or t
  misc_feature (326)..(326): n is a, c, g, or t
  misc_feature (340)..(340): n is a, c, g, or t
  misc_feature (362)..(362): n is a, c, g, or t
  misc_feature (370)..(370): n is a, c, g, or t
  misc_feature (378)..(378): n is a, c, g, or t
  misc_feature (381)..(381): n is a, c, g, or t
  misc_feature (383)..(385): n is a, c, g, or t
  misc_feature (414)..(415): n is a, c, g, or t
  misc_feature (431)..(431): n is a, c, g, or t
  misc_feature (439)..(439): n is a, c, g, or t
  misc_feature (464)..(464): n is a, c, g, or t
  misc_feature (486)..(486): n is a, c, g, or t
  misc_feature (534)..(534): n is a, c, g, or t
  misc_feature (543)..(543): n is a, c, g, or t
  misc_feature (548)..(548): n is a, c, g, or t
  misc_feature (562)..(562): n is a, c, g, or t
  misc_feature (570)..(570): n is a, c, g, or t
  misc_feature (606)..(606): n is a, c, g, or t
  misc_feature (615)..(615): n is a, c, g, or t
  misc_feature (641)..(641): n is a, c, g, or t
  misc_feature (643)..(643): n is a, c, g, or t
  misc_feature (747)..(747): n is a, c, g, or t
acgaccttatttntcnngngctttcncacagggagganttngaagtaganngaaaccgacctggattactccggtctgaactcaaatcacgtaggactttaatcgttgaacaaacgaacctttaatagcggctgcaccatcgggatgtcctgatccaacatcgaggtcgtaaaccctattgttgatatggactctagaataggattgcgctgttatccccannnnaacnngttccncnnnccnncccactggatcnattnaacatacgtaattcgcnttgcactggagaagtnttagcatgtactgcccggncccccgcctcnccnccgacgtccccccncccgaaattcttaatgcaggtntggcagtntaggaccngtngnnntcccaggtactgtttgccttaataaatcnnccctccataggccccncccgcccnccccgccgctcctcgcccgcctctncacgggcaggtcaatttcaccncgtgtaaaagtaagacacagctgaaccctcgtggagccattccccccngtccccccnccccncacaagtgattacnccaccccngcacggctagggtaccgcggccgttaaacatgtgtnactgggcangcggtgcctctaatactggtgatgcnanacgtgatgtttttggtaaacaggcggggtaagatttgccgggttccttttactttttttaacctttccttatgagcatgcctgtgttgggttgacagtgaaggnaataatga

SEQ ID NO: 531654 - DNA, 342 bp, Homo sapiens
  misc_feature (13)..(13): n is a, c, g, or t
  misc_feature (16)..(17): n is a, c, g, or t
  misc_feature (19)..(19): n is a, c, g, or t
  misc_feature (26)..(26): n is a, c, g, or t
  misc_feature (38)..(38): n is a, c, g, or t
  misc_feature (41)..(41): n is a, c, g, or t
  misc_feature (50)..(51): n is a, c, g, or t
acgaccttatttntcnngngctttcncacagggagganttngaagtaganngaaaccgacctggattactccggtctgaactcaaatcacgtaggactttaatcgttgaacaaacgaacctttaatagcggctgcaccatcgggatgtcctgatccaacatcgaggtcgtaaaccctattgttgatatggactctagaataggattgcgctgttatccttagggtaatcttgttacgatggtcaagttcacttggatcaattgagtatagtagttctgctaagaatggtgcagtgatagcatgtacagatcggagattgggttctgttccgcggttgtctac

SEQ ID NO: 531655 - DNA, 292 bp, Homo sapiens
gagctcgtacccgttctcctcctgctgctgattgaggagggagtgatgctgcagagacttagggcggagacagtggtgatcagtatgagtggtgcgctcagcatggccatgagacgatgatattggagaaatattagacctcctgggttttttaactggatgtcaagtgaaagcgagggtgataacgacccctccccgtttccagtttgggtgagtgagggggtagtgctgctcactgggaatgggtcctcatgcgtgggcatgtttgggagggaaaatgctgagctccaca

SEQ ID NO: 531656 - DNA, 219 bp, Homo sapiens
tactgccggtgctctacttactgccgttcctcttcctcatgtggttgtgcaggcagagcttgatgcatccagatttcaaatattcaaaaattaaatgactatctcagtttaatatatctgtaattataatcaccttttagtctatgactgcgtgtagtgagcacccagttatctttcactcatattccattcatcccccaatcatatccacagatagag

SEQ ID NO: 531657 - DNA, 161 bp, Homo sapiens
cacacgattggaatggttaaaaggaaaaatactgacaacaccaatattgtaaagacaggaggtacagaactctcattcattatattcataaatggacaaatatgaaaactgctatagtagggcagtcttccttagaaagggattgtggacagtggcgtgag

SEQ ID NO: 531658 - DNA, 949 bp, Homo sapiens
tggggggggttgtctttctgtccccattgtgcgcgccctctctttgtcgtggggtctccccctcctctttcagcgggagtgtttttgtctctgcccacacagcttgtggttgatctgttggtgtgtgtggcgcaccctctctttctttggtgtgtccgcccgcgcgcgttttgttgtgttttgtgttgtggtgtgttctgtgttgttgccaatatgtgttacccacgcgactgtgtttatattgtttctatttttgttggagagtcagcacgcgcgcagcccacacacccctcctcttgtggaaggggagactcggcgcgttatatatgatggtcctacacgcgctttttgactacatatatttattctcactatatgtgcgagcaaagtcattctgatttgtcttcccctctcgcgatgaagataatctacactctctggggtgtttgttgtgtttctctcccggtcaccacagagtcatctcttctctctcacacacgaagagactatttgtgtgcgcacacagaggaggcgcgcgcacgctctcttgtgcgcgctgatatagttttcgcacgacttatttttgttccccctcttcccacctctttctctctctctctcgggggtgtgttcccgcgctgctttctgggtgtgtttctctcttgtcgctctgctggtgtgtcgcacactcgtgttgttctcctctctctcgcgaggctatgcccctctgctgtgtggtgtttgtgtggggcctccgcccccgtgtgcgagatggttttttctctccctggtggggggcgcgccccccccccattttttttctctctcccgcacgccgggtggggggggcgcccccgtctgtgtttgcccccccccgcgcggggggggttccttttgttttttctctctttgtgtatatatataaaaacccccctttttccctctccca

SEQ ID NO: 531659 - DNA, 533 bp, Homo sapiens
  misc_feature (44)..(44): n is a, c, g, or t
  misc_feature (61)..(61): n is a, c, g, or t
  misc_feature (63)..(63): n is a, c, g, or t
  misc_feature (66)..(67): n is a, c, g, or t
  misc_feature (144)..(144): n is a, c, g, or t
  misc_feature (195)..(195): n is a, c, g, or t
  misc_feature (314)..(314): n is a, c, g, or t
  misc_feature (330)..(330): n is a, c, g, or t
  misc_feature (370)..(370): n is a, c, g, or t
  misc_feature (408)..(408): n is a, c, g, or t
  misc_feature (453)..(453): n is a, c, g, or t
  misc_feature (488)..(488): n is a, c, g, or t
ccccaccccctcgatttcctcctccgctttccttaaaccgtttnggggggggatctacgantngtnntcgctctctttctcctcgaattctccttgttcgttggctgtggggttttggtattgttggtattcggacaccaggtngtttatgttgctcttggctttggtgaactctattttgttaatgctctcgcncgtgtacaagtggaggaaggctttgggctggaacatgggcgtgaaatgatcggagatgggcttgaaaagtttttggatgggtgtgatgttggtgatgaaggtgggggaaatttttaggngggggggtgggatgtngcacacgggggtttttaagttgttggggatttaataaaanaagtagttgctgttcttgttctgtacgttgaggatctnctcgttcactttttttatggacatgggggtccggaagatgggagntaacgttagtagcggccgtggcgcgggtcgcaggnggccatcatgttcttggagtcgaacatctgctgggtgagctcggg

SEQ ID NO: 531660 - DNA, 187 bp, Homo sapiens
gcgagacatactcaatacaggatacgccgtgagcgcgtatctattactctcatcgcgtagcctccctaacaagcgcctatagcactcgaataattcttctcaccctaacaggtcaacctcgcttcccgagccttactaacattgacgaaaatcaccccactgtactaaaccctattagaactggctt

SEQ ID NO: 531661 - DNA, 1356 bp, Homo sapiens
ggcaagtgcctctggtaccagcgtggatgcccgcatgtatcatggaccagccagctgtgtctacgtacacggaagccactggtggactcaggcacactgggcacctaaaggcaagtgtgcagggtggtgatccgccttcctgacagaagtctgtacagttccgagcacgagggacaccaagctgagacagtccgatcccacatgcatgtacccgtgaagaatttcccataagtgccatccgaggcacacccgtgcattgggctcgcgaaatgaggttttagaagggccctcgtgtccaaacatggcgcagcgagaacaatggtacaacccagggtaccatcactatgaagcgccaatagtttgatggatgcgatagcaacgtgcgtggcgtggtcagaggcacttcaagtcacatgtcgcagtggcatggcgtgggagagacatgctgacagtaagcaaaaccatgggaggcttgacacgctgatcgcgacatggaccttgtggtcgtgattagacagttgaaccatggggcgcttgccacatccaactggagtcaacatccccagtaactgcagaaacaaactatccgggcagccttgcttgccaaccaaaactttcccactaccttgaacacaaggactttcgaacaagaaggcgttcaaggggaagggccggccccggtttccttgggatccgtgggaggccccgaaagaacgagccctgattcaccaaacaacatctcggacatacaaacccttttggaatggttccaaacaaagttcgcccctggacacattcatggggacactaatggctgaactgggcgtggcgatggcgcaaacccgtggttattgacgcccaaagaaccccttaaccagggggcgcttgaacccaagtggcgttcctacacaggtggaaccccaagaaaggccttggctttcgatagggacacaaacaatatatccccgtggcaaacgtatccctgtgtatgggacaggggggatcaccccccggaaaattttttcatagccacccacaaaaacgtacttgggggccgggttccaaaaagacatcccccaagtggtatttcagttggcagccccaagagggaagcacttggagcaaggaaaggcggccccaaattgcgaccgtacattggtcgggaatcgagaaccaaggtcaggagtcacttaaggacaggggaacgcctcacaacacatggcgccaactttcccttggcccccaatgcgccacaagtgacagcagacggcattcccccctgggggacattttccaaacggaagtggtcacccccccaatttggaccctttcggaagacaaaggacttagaatgga

SEQ ID NO: 531662 - DNA, 230 bp, Homo sapiens
gccaggttttgagttttgtgaccaaagccaggggggttccctttccttcccccccctggggcccaagttttggagtgggagggttggttgcccctcccctcagagttcccccaaaggccagtaatggatccccggcctcagtccctattttgttttgggatagtgtgagtttctttttggacaggggtgattttgtccagttccaaccccaataaactttgtagggggga

SEQ ID NO: 531663 - DNA, 251 bp, Homo sapiens
ttcattgtgccctatgtacacttgacgaaacatgttaatgaaagatttcaggatagaaaaaaattaagatgttgttctcatgtgcattggcgtcacttcagagaattggactactgctcttatgtcccggattgcagattatgtgcctggtgtgaagaaagttaatctacaggttctctcctttttcttcattgttctgatgtccattatttattcctttttgtaaaatctatgaggccctcattgctgtg

SEQ ID NO: 531664 - DNA, 290 bp, Homo sapiens
  misc_feature (62)..(62): n is a, c, g, or t
  misc_feature (65)..(65): n is a, c, g, or t
  misc_feature (80)..(80): n is a, c, g, or t
  misc_feature (84)..(84): n is a, c, g, or t
  misc_feature (88)..(88): n is a, c, g, or t
  misc_feature (254)..(254): n is a, c, g, or t
  misc_feature (271)..(271): n is a, c, g, or t
gtccgacttattcgagagcagcatccaaccaaaatcccggtgataatagaacgatacaaggngtngaggaaagcagcctntccntgtntctggataaaacaaagttcacttggtacctgaccatggtcaacatgagtcgagctcatcaagataattagaaggcgcttacagctcaatgctaatcaggccttcttcctgttggtgaacggacacacgcatggtcagcgtctccacaccaatctcagaggttgtantgagagtgagaaagatngaagatggattcctgtaca

SEQ ID NO: 531665 - DNA, 913 bp, Homo sapiens
tggcgaccaggcgccttggggtcggggagacgctgggggccctcaacgcggcctggggccaggcggtccggtgtgtgatcaatggatgacgcgcaccctgtcacctgcgttcccgagactttctggcacctgcaccgcgctgctgcaggcgcgcttcgatgacggccaggttcctggagcatttgctccatgccctcgcctgcctgcatgggccccggtgtggcccctggtgctgctgctgtcgcgcctgacccccggcggggtctgtctctccaactgcagctggtccgccgtcttcggagcgcgtcctcaggcgccgtggccgcctattgccatgcccgcctcgcctgcctcgctgggccagcgcgtcttactacactgcccagcactgcgcagtccccctgcgcactccgcttgagccagcttgcgtacggtgctcgtggccgatcaccttggcgcgagcccttgagcgctcacggggtgtgcagtgcgcctagtgccagcttgtgcgggatccgcacattgcttgaccctatcctgcagcaaacttgcgcggtgaacttggccccgcatgccatcggaaagagaagcttacctcccaaaacccttgaggagccaaggcccttgcaagaactttacctcatgctaattgaccgggcagcgcacactgtaccccatggcaatcctaaggccagacctggtgtcatgacaggaacagatgatctgaacataaccaagtgtgaccgccaccaagccttggcctaagtgaacccccaaagcgctggcaacacaccttgtcctagtctgaccctcgcagggatataaccctacatcaaggtgactagggccttgacgacttgccaacgaaggcctccaaattgcgcactggggccagagggacacgacgcaccaa

SEQ ID NO: 531666 - DNA, 201 bp, Homo sapiens
attacatacatgagcgattctgtctaaccttatttttttttaaaaaaaaaagagagaaagaaagaaaagaaaagaaatggggtcttactctgttggccccgctggagatgaacggcgtgatcacaacttactgcaacctccacctcctgggtccaagagaatcttctgcctcagcctcctgagtagcttggattacaagtg

SEQ ID NO: 531667 - DNA, 296 bp, Homo sapiens
tgagacatatagttatgcaatgcaatcaggattcttatcatcttagtatgactttaatatgatgtcggtacctctgtggttatagtagaaccaccatgaaaccctcacttccactatgtcctatccctaggaggctgtatttgccatcataggaggcttcattcacggatttcccctatcctcaggctacaccctaaaccaaaacgtacgccaaaatccatttcactatctatattcatcggcgtacatctgactttcttcccacaacactttctctggccgttcccggatatgca

SEQ ID NO: 531668 - DNA, 538 bp, Homo sapiens
gctgctctagagtatccccgatgcgtacaacttggtggcagcgcgcagggcttctgctgagggggcaggcggcgcttgaggaccccgcagataagtattttctctttgaaagatagagataatacacctacttaaaatatatagtcaataggtcactaagatattgcttagcgtaacgttttaaacgtaattttcatagcttaagatttcacgcagcaaaatatgaagcattagcaagcagtagcatgaggaaggcacaagcataacatggtttctaaaacatgacggaggtggagatgcaagcttcttcatggagtacaaacatgtctttccaagcaaattgagagcaaaggactcacagagccccgaattaataccaatagaagggcaatgtttttagattaaaatgaaggtgacttaaacagcttaaagttacgtttaacagtggtaggtgattaaaataattggagggccgatcttttacaaaaagagattaaaccgagagtggttaaaagaccttgaaatccatgacgcaggg

SEQ ID NO: 531669 - DNA, 758 bp, Homo sapiens
ctagcgccgtggctcatgcctgtaatcccagcacttgtgaagccaaggtgggcaggtagcttgagcccagaagtttgagaccagcctgggcaacatggcaataccccatctctattaagaaaaaaatttaaggaaaaaaaaaaaaagataaaatggtttgggaaaggcaaagtgtctttctcatatctaatcaattcctgtattttgttttttttatgagttgttctgcaccaatccaaatcaagcgctttaattggtaaagggtattatcctttaagttcaagtaataaaaatattttataaaaacacaatttatcactaaaaccaagttatatattggtctacaaagttattattattggcgccggcgccggggcatatgggttggcgctcaatggcctgtaaaatccccaagggcttggaaagcgctgaggtgagtgggactcactaaaaggtcggggatgtttggaggaccagccttggaccaatcttgggaaaaccccactggtgctcctactaaaggttatacgtttcggcaagggggctacatttggccaacacaaaagaaccttttctacttgaacacgtcaggggcgggggtataaactccaagttccaagttggatgtaacctctggaaatatctccaggggtggagggtccagacgctacccataccatatctggcctgggcggcacaccaggttcgtctcgcttccaaaaaggaacctttctggccacgttcggtatccgaaaatg

SEQ ID NO: 531670 - DNA, 285 bp, Homo sapiens
gcgcaggactcagcagcactccagaactcgggggaccagagtggcccaaccagacagggatcacgcgcacgctcatccagactcataacggcactcgggagggccgctgtacaggcccaggcacccgctcaaacaagtctgcacacaactcctcaaattccccacgagtccctttagccttgaaggccagatcatccatcaggacttcagtctgtgccatgtggtcagtgtcagggaccgaggacggttacgagccgattagccgtcacgcagcagttgggccat

SEQ ID NO: 531671 - DNA, 101 bp, Homo sapiens
ccccccccccccggggtttttttgaaagggtttttttttggggttggccccttttccttttttttaaacaaccccccccccttaaggggtttggggtttca

SEQ ID NO: 531672 - DNA, 381 bp, Homo sapiens
tactactcgccagtggtagagcgtgggtctggtattaaaagatgcaacagaggtagctgtgtctcgccaggtgcccagccactcttgaatacccccaaaaaggagaaaagaaaaccaaaattaaaccaacaaataaaaccaaaaggaggaaaaaattcagatcattttcttcaagcctggcaggaacccacaacagtttgtgtgtaacaggcgttacagtggggagaagccaggctccagaaggccagcccgccagctcctgcagatggcgccagcgctactgctgcatgtctcttctgcaggaagggcaccactgtccctcactccctcccctcccccagtgcactggggctgttcctttacaacatggaagatgggcag

SEQ ID NO: 531673 - DNA, 360 bp, Homo sapiens
  misc_feature (37)..(37): n is a, c, g, or t
  misc_feature (148)..(148): n is a, c, g, or t
  misc_feature (186)..(186): n is a, c, g, or t
  misc_feature (225)..(225): n is a, c, g, or t
  misc_feature (249)..(249): n is a, c, g, or t
ccccccagggttgcactgtggctctggcttctgatcnctgctccatccacctgcagcttcaggggctggtgaaccctgcacgggagctgggcaagctgcaagccaagcgagttaaggcccaacggcaggcccagcgtctgcgggaacnccgtgctgcctcgggctatcctgtcaaggtgccgctcnaagtccaggaggcagataaagccaagctccaacagacanaagcagagctccccaaaatgaatnaggccatcacaaaaataaagaagatgctgtgatccaccacccagcttcacccctcacccccagcggctcaccatggggatggcagcaatataatattttcccacaaaaaaa

SEQ ID NO: 531674 - DNA, 570 bp, Homo sapiens
ggctgccaagaggacccgtagccgatcaaacatttaatttctggacacactctcaatctgggccgacaaaaataacatagatcttcaaaacattaaggctacgtgaaagaacatggacacaaaagaccacatatcgtatgattctattcataggaaagtccagaatagggaaatctatagaggcagaaaggttagtagttgcttaaggctaggggaggagggggaataaggatggtagctaaagggcgaagtgttactttttcgtgtgtgtgtgtgtgtgtgtgtgtgtgtgtgtgtgtgtgttacggtggtgtagtcgggtcagagggagttactacttgaggtgatgaaagtgttgtaaaagagagtgtgatgatgggtgcactcttgtgtgagtacagcaaaacaacagtgaggggtacattttaagggggagaaggggcgcgtgaattatatgtgaataagagtgtgtatatagagaacatagggccatcacagaaaacgtacgtggagacatttgagagcgtgtggagagtgagtcactctgtagtgtcggggaggatgaagtct

SEQ ID NO: 531675 - DNA, 196 bp, Homo sapiens
ctgtcagccagtctggtcccctcgccctctagcagttgcggtacgaggcgatctcgtatgtccatggccagcttcacgctcatgagttcctggtactctacgcagctgcctgtgccatatcctgcttgcccctgccgaagtggcgggcttcctagctcctccgtgcttgtgctggagctgtgacagtggggatcct

SEQ ID NO: 531676 - DNA, 565 bp, Homo sapiens
  misc_feature (19)..(19): n is a, c, g, or t
  misc_feature (25)..(25): n is a, c, g, or t
  misc_feature (28)..(28): n is a, c, g, or t
  misc_feature (30)..(32): n is a, c, g, or t
  misc_feature (36)..(36): n is a, c, g, or t
  misc_feature (46)..(46): n is a, c, g, or t
  misc_feature (48)..(48): n is a, c, g, or t
  misc_feature (50)..(50): n is a, c, g, or t
  misc_feature (54)..(54): n is a, c, g, or t
  misc_feature (56)..(56): n is a, c, g, or t
  misc_feature (75)..(75): n is a, c, g, or t
  misc_feature (109)..(109): n is a, c, g, or t
  misc_feature (151)..(152): n is a, c, g, or t
  misc_feature (192)..(192): n is a, c, g, or t
  misc_feature (241)..(241): n is a, c, g, or t
  misc_feature (440)..(440): n is a, c, g, or t
  misc_feature (490)..(490): n is a, c, g, or t
  misc_feature (525)..(525): n is a, c, g, or t
  misc_feature (546)..(546): n is a, c, g, or t
agttatgaccttttggtcnatgacngantnnntatntgacagaggncncncganantaaaatggagctgaaatanttctgttgcctagtagtgatgtctaatgacatcntagccattgtaatgtagtagcacaaagcattaatcatgtgtnnatagtgatgctagtgtaaacacacatactgcactgctagntgtataaaaatataacacattattatgtatggtatataatacttgatangcataataaacaactgtgtaactggtttatgtatttactataccataccattcattattctagaatatattctagagtttactcctactttttaaaaaaacgttgactatattccagaagaaggcattgttagcattgtagatccatatgtgctagtacccgtgaagacctttcaatgggacaagatgtggaggtgganggtggtgatattgatgatcctgaccatgtgtaggcctaggccattgtctnagtttttaacaaaacagtattgagctgggattacnggtgtgcgccaacatgcgtgnccgaaggagggtccgagct

SEQ ID NO: 531677 - DNA, 188 bp, Homo sapiens
cacgagggttaatccctcccagctgacctcagactatgcatatttcaggctttatattattctactttccagactgaattctcctgtaatgccaggtatcagaggcgtccttaaatacttgtagggatgacgttaggaatattcagttccaaaacaagacatcttctgtccgccttacatgtagcagt

SEQ ID NO: 531678 - DNA, 538 bp, Homo sapiens
  misc_feature (1)..(1): n is a, c, g, or t
ntcaggccagcatcgggttttattgctgatcaaagtggatttcagagggaaggtgagctgaaaagaggggggtgggacaggccggtatgtagtcttcccttgaagtccagctatctccagccagattcgtctcagaagttacgccttaagctgtccctctgaagacaagctgcttctctctgacatccagccatggtcgtcccctcatccagctgcttctcctctctgccagatgagtctggggtctttctaggcacaggatgaggcagggcagagccatgggtggcttaggaaaaggcaacattcaactggaaaaacatggatagaagttctcactttgggccatggtttcaggctttttggcttgagggtggggtttcaccagggacccgctcttttctacctagcatttatctgcctcctgtccctatgcactgcctttgtggcaaaaaaaggagagtgagagctggtcctctctttctctgaaattctgagcctactttgtgagccgcttacgtattcagggatgaattctctc

SEQ ID NO: 531679 - DNA, 343 bp, Homo sapiens
actctagagtatcccgctcgccactgcagtgcagtggcgccatcttggctcagcgcaacctctgcctccctggctcaagcagttctcctgcttcagcctcctttgctagctcgctattgcaagcctggcactactgcccgaatgattttcgtatttttagtaacgactggggtttcaccatttaggccaggtcggtcttaaactcctgacctcttcgtgatctgcctgccactgcccttcccttcagtgctgggacatacaggccaccatgcccagcatcgtgctccttttttgtcgagaacaggtctcatcacgttgcccgcgcgcagtctcgtgatcgggg

SEQ ID NO: 531680 - DNA, 968 bp, Homo sapiens
gcgggtctggctggcggcgagcggcgggagggagcctgagagacccgagtgcacgtgtggagaagcggcggcacgaagcgcggtgtgcagggagactacttcccagccctcgaccagactcaatgccctctactcgagtcttcgctggccgttcggttggcttctgcactagtcgtcacctggcccaggactaggcatggccggcattgcagtgggttgatgtggccgcgacgctaatggagtgccggcagaccttgaagggccggcagaatctacggactggcgattgagtaatcgagtgcgtacacgaacggaccatcgagtcacggacgggcgaacgactgcaaaggcccggctcgacgctgggagcatgtgacacacacacagatattaagacagttgaacagcattgaaagtcaggtcatcttttccgagtctagactacaagtgtacatagttctgacaaggcatgtgactggacggttggcagagcgtagcgaacaacttgcctactttcaatgtatcatggctgtaggtgcagtatgcttgtagggcggatcattcaccagaatcagaagagactttacactcatgacgctaggatgtctggcaccattaccgaaggctagggaactaggagagctaaatgtgttaacatcatgtgttaaacagtctgtgaaaaagatggtactttgtgacaacattgatctgcatgtccaagatcagaatgagtcgggaattgattctacaggaagtgtgggtgtgagattagtgagacaaaggaagaactactattagaggatagagcccgagatgctcatgtgctggagaaaaagcttaaggtacctactgggtcagaaggcgatggtgaaagacggcaaggaccattagcatgaagctattgggaacctggctggtggccaagaaaaggcagggggccgtgaacgagcaggcacaaaacacaggcg

SEQ ID NO: 531681 - DNA, 95 bp, Homo sapiens
tcaggggacacagcactgtatttctgtgccagcagggctcgggactcttatacgtcggggagctgttttttggagaaggctctaggctgaccgta

SEQ ID NO: 531682 - DNA, 634 bp, Homo sapiens
ctagttcatcgcgagcggcgcacaactttgtacaagaaagttggctggtgcatgcctgtcatcccagctactggggatgctgaggtgggaggatcgcttgggcccaggaggtggaggctgcagtgagccgggatcgcgccactgtactccagcctgggcagcagaacgatgaccctgtctttaaaaaaaaaaaaaaaaaaaaaaaaaaaagggggggccgcttcttaaattttcccttcgggggggcccaagtttaccgcgtcaccccagttttctttgtgtcaccaagagtgggcccctatataagtgcggagtcgttatttataaaggctaaggcactgggccggccggtttaaccaacggtctgtcgactggcggaaaaactggctaaacctgggggaatacttgggcgagaagggacaccttacacttcctggggggtggtgacccattatttttggggaccaaatttaccgctaccagaaaaggattttaaaagcgctcataagggggtgacaattatttaacaagtttttaacaggtgtgtattaatgtggtgtgttaacaccttaacgctggcaatattgcgcttgagcgtggcttgagaaaagttacgggcgttatcgggagggtc

SEQ ID NO: 531683 - DNA, 109 bp, Homo sapiens
caacatccagcagataagcttcagtatagaagagccctgagccagttcaagccctagacagctgagtagacctcagagctctgttctaaaccagcagatgcatttggca

SEQ ID NO: 531684 - DNA, 650 bp, Homo sapiens
  misc_feature (6)..(6): n is a, c, g, or t
  misc_feature (105)..(105): n is a, c, g, or t
  misc_feature (116)..(116): n is a, c, g, or t
  misc_feature (124)..(125): n is a, c, g, or t
  misc_feature (148)..(148): n is a, c, g, or t
  misc_feature (155)..(155): n is a, c, g, or t
  misc_feature (162)..(162): n is a, c, g, or t
  misc_feature (640)..(640): n is a, c, g, or t
cagggncggaaaaaaagaggtcctcatggtccccttaaggaagggggccagggtgggagacttgattcaaaaaggaaaaacgtcggggcccctttggcccttatnatggggatggnacagattnntcggcctcatacccctccccctncccgtcnttccctnttttttctttccttccatcaaaaagatgtatttgaattcatactagaattcaggtgctttgctagatgctgtgacaggtatgcccccaaccctgctcacagcctttttgaggacaccagtgaaagaagccacagctttttttgggggatttatactccctgagttttaacttttccccaggggtgctcacctctgcccctattgggagaggtcataaaatgtctcgagtcctaaggccttaggggtcatgtatgatgagcatacccacagggtattattaacccccctttcttcccctttcccacataagaaaattgaggtttggaagagggaagggttttttttttttttttttttttttgagacggagtttttccctgtcgcccagggtggagggcagtgagctgagattgggccattgtgatatgaatatgccttatatggtgatatgaatatgccttaaaataaaagtgttccnccccccctga

SEQ ID NO: 531685 - DNA, 138 bp, Homo sapiens
gtctcacagacaacaagcattcatacgtccttgggcacatgtacaactgaatactgggacaatagacttccctgatcttctgacgttgcagacatcccttcattctgctagcactccaagcagtccagaccccaaaag

SEQ ID NO: 531686 - DNA, 600 bp, Homo sapiens
gtatgtgttcctattgatcataggatattaggtgtgggtaagtaagagagtcttatcccaagaaagaaagttaatgcaaggtcacggcccagttatttgaataggagatgttgaacagactggaataatgactcaatacaatttcagaaagatgtagtgtatctggtctgtttgccaagataacaaagaataatataatacagagaaaacatttaaaaacactcttctatacatcaaatataacaattccacttaaaaaaatcaggtataataaacatctcaatctaatttttcttatgcactaaccaacttctaattctctgagttagtacttttagatttaagaggtaaaaatatataaaagaaactgtaacttatcagaagaaacagcacaggctgggcgcagtggctcatgcctgtaatcccagcactttgggaggccaaggtgggcggatcacgaggtcaggagatggagaccatcccggccaacatggtaaaactctgtctctactaaaatacaaaaattagctggatgtggtggcgtgtgcctgtaatcccagctagtcaggaggctgaggcaggatagttggttgaactcgg

SEQ ID NO: 531687 - DNA, 186 bp, Homo sapiens
  misc_feature (158)..(158): n is a, c, g, or t
  misc_feature (184)..(184): n is a, c, g, or t
gatccacgggaaagagacatgcgaatgggtggcggaggagcaatgaacacgggaaagtgacatgcgtactgagcgctttgggcagggaggtgcgggcctgtgggtggacagggtctagaggaatggggcctggaactccagcaggatatggtagaggnagagaagagtacgaaggcccaaacanaa

SEQ ID NO: 531688 - DNA, 3802 bp, Homo sapiens
ctgtgctcgcatctctggcagcctggattggggtcctgctggagtgaagggtttcctgaggcagggagtactcatagccgtctgtgcctcctgctctgctggactctgatagaggcagtgggcagcagggcaaagaaggaagcagccgccgaggaagcgaaggtggggtgggggtgcccagccctgcggccggaggtgccattgaccctgagagcaagagccatcagtctgatggcttcctctggccggaagctgtggctgagatatccttccttcctcccagcagcctggatttgcctcctcccaggctgggaaaggctagggaggcccaggtggggctgtcagggccaaaggctgtttcaaaagtgtcctttattgccaatcagggggtttggctggcatctgcttgtggcatggggtgctggctctcgtggagcaagactgagggctgtcgagccccaggggtcctgcccatcagcagccatgcttacccctgcagagctggccacggtagtacggcggttctcccagaccggcatccaggacttcctgacactgacgctgacggagcccactgggcttctgtacgtgggcgcccgagaggccctgtttgccttcagcatggaggccctggagctgcaaggagcgatctcctgggaggcccccgtggagaagaagactgagtgtatccagaaagggaagaacaaccagaccgagtgcttcaacttcatccgcttcctgcagccctacaatgcctcccacctgtacgtctgtggcacctacgccttccagcccaagtgcacctacgtcaacatgctcaccttcactttggagcatggagagtttgaagatgggaagggcaagtgtccctatgacccagctaagggccatgctggccttcttgtggatggtgagctgtactcggccacactcaacaacttcctgggcacggaacccattatcctgcgtaacatggggccccaccactccatgaagacagagtacctggccttttggctcaacgaacctcactttgtaggctctgcctatgtacctgagagtgtgggcagcttcacgggggacgacgacaaggtctacttcttcttcagggagcgggcagtggagtccgactgctatgccgagcaggtggtggctcgtgtggcccgtgtctgcaagggcgatatggggggcgcacggaccctgcagaggaagtggaccacgttcctgaaggcgcggctggcatgctctgccccgaactggcagctctacttcaaccagctgcaggcgatgcacaccctgcaggacacctcctggcacaacaccaccttctttggggtttttcaagcacagtggggtgacatgtacctgtcggccatctgtgagtaccagttggaagagatccagcgggtgtttgagggcccctataaggagtaccatgaggaagcccagaagtgggaccgctacactgaccctgtacccagccctcggcctggctcgtgcattaacaactggcatcggcgccacggctacaccagctccctggagctacccgacaacatcctcaacttcgtcaagaagcacccgctgatggaggagcaggtggggcctcggtggagccgccccctgctcgtgaagaagggcaccaacttcacccacctggtggccgaccgggttacaggacttgatggagccacctatacagtgctgttcattggcacaggagacggctggctgctcaaggctgtgagcctggggccctgggttcacctgattgaggagctgcagctgtttgaccaggagcccatgagaagcctggtgctatctcagagcaagaagctgctctttgccggctcccgctctcagctggtgcagctgcccgtggccgactgcatgaagtatcgctcctgtgcagactgtgtcctcgcccgggacccctattgcgcctggagcgtcaacaccagccgctgtgtggccgtgggtggccactctggatctctactgatccagcatgtgatgacctcggacacttcaggcatctgcaacctccgtggcagtaagaaagtcaggcccactcccaaaaacatcacggtggtggcgggcacagacctggtgctgccctgccacctctcctccaacttggcccatgcccgctggacctttgggggccgggacctgcctgcggaacagcccgggtccttcctctacgatgcccggctccaggccctggttgtgatggctgcccagccccgccatgccggggcctaccactgcttttcagaggagcagggggcgcggctggctgctgaaggctaccttgtggctgtcgtggcaggcccgtcggtgaccttggaggcccgggcccccctggaaaacctggggctggtgtggctggcggtggtggccctgggggctgtgtgcctggtgctgctgctgctggtgctgtcattgcgccggcggctgcgggaagagctggagaaaggggccaaggctactgagaggaccttggtgtaccccctggagctgcccaaggagcccaccagtccccccttccggccctgtcctgaaccagatgagaaactttgggatcctgtcggttactactattcagatggctcccttaagatagtacctgggcatgcccggtgccagcccggtggggggcccccttcgccacctccaggcatcccaggccagcctctgccttctccaactcggcttcacctggggggtgggcggaactcaaatgccaatggttacgtgcgcttacaactaggaggggaggaccggggagggctcgggcaccccctgcctgagctcgcggatgaactgagacgcaaactgcagcaacgccagccactgcccgactccaaccccgaggagtcatcagtatgaggggaacccccaccgcgtcggcgggaagcgtgggaggtgtagctcctacttttgcacaggcaccagctacctcagggacatggcacgggcacctgctctgtctgggacagatactgcccagcacccacccggccatgaggacctgctctgctcagcacgggcactgccacttggtgtggctcaccagggcaccagcctcgcagaaggcatcttcctcctctctgtgaatcacagacacgcgggaccccagccgccaaaacttttcaaggcagaagtttcaagatgtgtgtttgtctgtatttgcacatgtgtttgtgtgtgtgtgtatgtgtgtgtgcacgcgcgtgcgcgcttgtggcatagccttcctgtttctgtcaagtcttcccttggcctgggtcctcctggtgagtcattggagctatgaaggggaaggggtcgtatcactttgtctctcctacccccactgccccgagtgtcgggcagcgatgtacatatggaggtggggtggacagggtgctgtgccccttcagagggagtgcagggcttggggtgggcctagtcctgctcctagggctgtgaatgttttcagggtggggggagggagatggagcctcctgtgtgtttggggggaagggtgggtggggcctcccacttggccccggggttcagtggtattttatacttgccttcttcctgtacagggctgggaaaggctgtgtgaggggagagaagggagagggtgggcctgctgtggacaatggcatactctcttccagccctaggaggagggctcctaacagtgtaacttattgtgtccccgcgtatttatttgttgtaaatatttgagtatttttatattgacaaataaaatggagaaaatgaaacgattgctctgatggggctaaga

SEQ ID NO: 531689 - DNA, 397 bp, Homo sapiens
catggatgcagctagaccaatacttcagacatctcacaaaccctactagcagagagatgcagagggccagagtcccctttctcagaagatacagacccgatccacagagaaatgcctgacctagattcaggagatcttatgacagggatccagacacactactttatttacttcaacaaaagagtgagccagcagagccatgtattggaagcaaagcccccaaaagatgatcaaaccattatagaggagcaggcaaccaaaattgcagatttgaagaggcatgtggaattccttgtggctgagaatgaacgattaaggaaagaaaataaacaactataggctgaacaggccagacttctaaaaggcccaatagaaaaggagctggatgtagatgctg

SEQ ID NO: 531690 - DNA, 3573 bp, Homo sapiens
ggcagagaggccgcggagggctggcgggcgagcgcgggcaggcggcgacgcgggggcaggggtggacggcggtcagagccgaacgcgagggcggcgcccggggactggagctgcgcgcaataggacagctggcctgaagctcagagccggggctgtgcgccatggccccacactgggctgtctggctgctggcagcaaggctgtggggcctgggcattggggctgaggtgtggtggaaccttgtgccgcgtaagacagtgtcttctggggagctggccacggtagtacggcggttctcccagaccggcatccaggacttcctgacactgacgctgacggagcccactgggcttctgtacgtgggcgcccgagaggccctgtttgccttcagcatggaggccctggagctgcaaggagcgatctcctgggaggcccccgtggagaagaagactgagtgtatccagaaagggaagaacaaccagaccgagtgcttcaacttcatccgcttcctgcagccctacaatgcctcccacctgtacgtctgtggcacctacgccttccagcccaagtgcacctacgtcaacatgctcaccttcactttggagcatggagagtttgaagatgggaagggcaagtgtccctatgacccagctaagggccatgctggccttcttgtggatggtgagctgtactcggccacactcaacaacttcctgggcacggaacccattatcctgcgtaacatggggccccaccactccatgaagacagagtacctggccttttggctcaacgaacctcactttgtaggctctgcctatgtacctgagagtgtgggcagcttcacgggggacgacgacaaggtctacttcttcttcagggagcgggcagtggagtccgactgctatgccgagcaggtggtggctcgtgtggcccgtgtctgcaagggcgatatggggggcgcacggaccctgcagaggaagtggaccacgttcctgaaggcgcggctggcatgctctgccccgaactggcagctctacttcaaccagctgcaggcgatgcacaccctgcaggacacctcctggcacaacaccaccttctttggggtttttcaagcacagtggggtgacatgtacctgtcggccatctgtgagtaccagttggaagagatccagcgggtgtttgagggcccctataaggagtaccatgaggaagcccagaagtgggaccgctacactgaccctgtacccagccctcggcctggctcgtgcattaacaactggcatcggcgccacggctacaccagctccctggagctacccgacaacatcctcaacttcgtcaagaagcacccgctgatggaggagcaggtggggcctcggtggagccgccccctgctcgtgaagaagggcaccaacttcacccacctggtggccgaccgggttacaggacttgatggagccacctatacagtgctgttcattggcacaggagacggctggctgctcaaggctgtgagcctggggccctgggttcacctgattgaggagctgcagctgtttgaccaggagcccatgagaagcctggtgctatctcagagcaagaagctgctctttgccggctcccgctctcagctggtgcagctgcccgtggccgactgcatgaagtatcgctcctgtgcagactgtgtcctcgcccgggacccctattgcgcctggagcgtcaacaccagccgctgtgtggccgtgggtggccactctggatctctactgatccagcatgtgatgacctcggacacttcaggcatctgcaacctccgtggcagtaagaaagtcaggcccactcccaaaaacatcacggtggtggcgggcacagacctggtgctgccctgccacctctcctccaacttggcccatgcccgctggacctttgggggccgggacctgcctgcggaacagcccgggtccttcctctacgatgcccggctccaggccctggttgtgatggctgcccagccccgccatgccggggcctaccactgcttttcagaggagcagggggcgcggctggctgctgaaggctaccttgtggctgtcgtggcaggcccgtcggtgaccttggaggcccgggcccccctggaaaacctggggctggtgtggctggcggtggtggccctgggggctgtgtgcctggtgctgctgctgctggtgctgtcattgcgccggcggctgcgggaagagctggagaaaggggccaaggctactgagaggaccttggtgtaccccctggagctgcccaaggagcccaccagtccccccttccggccctgtcctgaaccagatgagaaactttgggatcctgtcggttactactattcagatggctcccttaagatagtacctgggcatgcccggtgccagcccggtggggggcccccttcgccacctccaggcatcccaggccagcctctgccttctccaactcggcttcacctggggggtgggcggaactcaaatgccaatggttacgtgcgcttacaactaggaggggaggaccggggagggctcgggcaccccctgcctgagctcgcggatgaactgagacgcaaactgcagcaacgccagccactgcccgactccaaccccgaggagtcatcagtatgaggggaacccccaccgcgtcggcgggaagcgtgggaggtgtagctcctacttttgcacaggcaccagctacctcagggacatggcacgggcacctgctctgtctgggacagatactgcccagcacccacccggccatgaggacctgctctgctcagcacgggcactgccacttggtgtggctcaccagggcaccagcctcgcagaaggcatcttcctcctctctgtgaatcacagacacgcgggaccccagccgccaaaacttttcaaggcagaagtttcaagatgtgtgtttgtctgtatttgcacatgtgtttgtgtgtgtgtgtatgtgtgtgtgcacgcgcgtgcgcgcttgtggcatagccttcctgtttctgtcaagtcttcccttggcctgggtcctcctggtgagtcattggagctatgaaggggaaggggtcgtatcactttgtctctcctacccccactgccccgagtgtcgggcagcgatgtacatatggaggtggggtggacagggtgctgtgccccttcagagggagtgcagggcttggggtgggcctagtcctgctcctagggctgtgaatgttttcagggtggggggagggagatggagcctcctgtgtgtttggggggaagggtgggtggggcctcccacttggccccggggttcagtggtattttatacttgccttcttcctgtacagggctgggaaaggctgtgtgaggggagagaagggagagggtgggcctgctgtggacaatggcatactctcttccagccctaggaggagggctcctaacagtgtaacttattgtgtccccgcgtatttatttgttgtaaatatttgagtatttttatattgacaaataaaatggagaaaatgaaacgattgctctgatggggctaaga

SEQ ID NO: 531691 - DNA, 3668 bp, Homo sapiens
ctgtgctcgcatctctggcagcctggattggggtcctgctggagtgaagggtttcctgaggcagggagtactcatagccgtctgtgcctcctgctctgctggactctgatagaggcagtgggcagcagggcaaagaaggaagcagccgccgaggaagcgaaggtggggtgggggtgcccagccctgcggccggaggtgccattgaccctgagagcaagagccatcagtctgatggcttcctctggccggaagctgtggctgagatatccttccttcctcccagcagcctggatttgcctcctcccaggctgggaaaggctagggaggcccaggtggggctgtcagggccaaaggctgtttcaaaagtgtcctttattgccaatcagggggtttggctggcatctgcttgtggcatggggtgctggctctcgtggagcaagactgagggctgtcgagccccaggggtcctgcccatcagcagccatgcttacccctgcagagctggccacggtagtacggcggttctcccagaccggcatccaggacttcctgacactgacgctgacggagcccactgggcttctgtacgtgggcgcccgagaggccctgtttgccttcagcatggaggccctggagctgcaaggagcgatctcctgggaggcccccgtggagaagaagactgagtgtatccagaaagggaagaacaaccagaccgagtgcttcaacttcatccgcttcctgcagccctacaatgcctcccacctgtacgtctgtggcacctacgccttccagcccaagtgcacctacgtcaacatgctcaccttcactttggagcatggagagtttgaagatgggaagggcaagtgtccctatgacccagctaagggccatgctggccttcttgtggatggtgagctgtactcggccacactcaacaacttcctgggcacggaacccattatcctgcgtaacatggggccccaccactccatgaagacagagtacctggccttttggctcaacgaacctcactttgtaggctctgcctatgtacctgagagtgtgggcagcttcacagtggaccacgttcctgaaggcgcggctggcatgctctgccccgaactggcagctctacttcaaccagctgcaggcgatgcacaccctgcaggacacctcctggcacaacaccaccttctttggggtttttcaagcacagtggggtgacatgtacctgtcggccatctgtgagtaccagttggaagagatccagcgggtgtttgagggcccctataaggagtaccatgaggaagcccagaagtgggaccgctacactgaccctgtacccagccctcggcctggctcgtgcattaacaactggcatcggcgccacggctacaccagctccctggagctacccgacaacatcctcaacttcgtcaagaagcacccgctgatggaggagcaggtggggcctcggtggagccgccccctgctcgtgaagaagggcaccaacttcacccacctggtggccgaccgggttacaggacttgatggagccacctatacagtgctgttcattggcacaggagacggctggctgctcaaggctgtgagcctggggccctgggttcacctgattgaggagctgcagctgtttgaccaggagcccatgagaagcctggtgctatctcagagcaagaagctgctctttgccggctcccgctctcagctggtgcagctgcccgtggccgactgcatgaagtatcgctcctgtgcagactgtgtcctcgcccgggacccctattgcgcctggagcgtcaacaccagccgctgtgtggccgtgggtggccactctggatctctactgatccagcatgtgatgacctcggacacttcaggcatctgcaacctccgtggcagtaagaaagtcaggcccactcccaaaaacatcacggtggtggcgggcacagacctggtgctgccctgccacctctcctccaacttggcccatgcccgctggacctttgggggccgggacctgcctgcggaacagcccgggtccttcctctacgatgcccggctccaggccctggttgtgatggctgcccagccccgccatgccggggcctaccactgcttttcagaggagcagggggcgcggctggctgctgaaggctaccttgtggctgtcgtggcaggcccgtcggtgaccttggaggcccgggcccccctggaaaacctggggctggtgtggctggcggtggtggccctgggggctgtgtgcctggtgctgctgctgctggtgctgtcattgcgccggcggctgcgggaagagctggagaaaggggccaaggctactgagaggaccttggtgtaccccctggagctgcccaaggagcccaccagtccccccttccggccctgtcctgaaccagatgagaaactttgggatcctgtcggttactactattcagatggctcccttaagatagtacctgggcatgcccggtgccagcccggtggggggcccccttcgccacctccaggcatcccaggccagcctctgccttctccaactcggcttcacctggggggtgggcggaactcaaatgccaatggttacgtgcgcttacaactaggaggggaggaccggggagggctcgggcaccccctgcctgagctcgcggatgaactgagacgcaaactgcagcaacgccagccactgcccgactccaaccccgaggagtcatcagtatgaggggaacccccaccgcgtcggcgggaagcgtgggaggtgtagctcctacttttgcacaggcaccagctacctcagggacatggcacgggcacctgctctgtctgggacagatactgcccagcacccacccggccatgaggacctgctctgctcagcacgggcactgccacttggtgtggctcaccagggcaccagcctcgcagaaggcatcttcctcctctctgtgaatcacagacacgcgggaccccagccgccaaaacttttcaaggcagaagtttcaagatgtgtgtttgtctgtatttgcacatgtgtttgtgtgtgtgtgtatgtgtgtgtgcacgcgcgtgcgcgcttgtggcatagccttcctgtttctgtcaagtcttcccttggcctgggtcctcctggtgagtcattggagctatgaaggggaaggggtcgtatcactttgtctctcctacccccactgccccgagtgtcgggcagcgatgtacatatggaggtggggtggacagggtgctgtgccccttcagagggagtgcagggcttggggtgggcctagtcctgctcctagggctgtgaatgttttcagggtggggggagggagatggagcctcctgtgtgtttggggggaagggtgggtggggcctcccacttggccccggggttcagtggtattttatacttgccttcttcctgtacagggctgggaaaggctgtgtgaggggagagaagggagagggtgggcctgctgtggacaatggcatactctcttccagccctaggaggagggctcctaacagtgtaacttattgtgtccccgcgtatttatttgttgtaaatatttgagtatttttatattgacaaataaaatggagaaaatgaaacgattgctctgatggggctaaga

SEQ ID NO: 531692 - DNA, 152 bp, Homo sapiens
aacgcagctgatcattaagttaacgggtcaccttgaccgagcgccagccttgtgtagcgtagccaaagccgcgttgcttgtaagtgcaccttgacagtacctgaagaagctgtacacagtgtgcaagacttggcacggtcgcactataaact

SEQ ID NO: 531693 - DNA, 2859 bp, Homo sapiens
ggcagagaggccgcggagggctggcgggcgagcgcgggcaggcggcgacgcgggggcaggggtggacggcggtcagagccgaacgcgagggcggcgcccggggactggagctgcgcgcaataggacagctggcctgaagctcagagccggggctgtgcgccatggccccacactgggctgtctggctgctggcagcaaggctgtggggcctgggcattggggctgaggtgtggtggaaccttgtgccgcgtaagacagtgtcttctggggagctggccacggtagtacggcggttctcccagaccggcatccaggacttcctgacactgacgctgacggagcccactgggcttctgtacgtgggcgcccgagaggccctgtttgccttcagcatggaggccctggagctgcaaggagcgatctcctgggaggcccccgtggagaagaagactgagtgtatccagaaagggaagaacaaccagaccgagtgcttcaacttcatccgcttcctgcagccctacaatgcctcccacctgtacgtctgtggcacctacgccttccagcccaagtgcacctacgtcaacatgctcaccttcactttggagcatggagagtttgaagatgggaagggcaagtgtccctatgacccagctaagggccatgctggccttcttgtggatggtgagctgtactcggccacactcaacaacttcctgggcacggaacccattatcctgcgtaacatggggccccaccactccatgaagacagagtacctggccttttggctcaacgaacctcactttgtaggctctgcctatgtacctgagagtgtgggcagcttcacgggggacgacgacaaggtctacttcttcttcagggagcgggcagtggagtccgactgctatgccgagcaggtggtggctcgtgtggcccgtgtctgcaagggcgatatggggggcgcacggaccctgcagaggaagtggaccacgttcctgaaggcgcggctggcatgctctgccccgaactggcagctctacttcaaccagctgcaggcgatgcacaccctgcaggacacctcctggcacaacaccaccttctttggggtttttcaagcacagtggggtgacatgtacctgtcggccatctgtgagtaccagttggaagagatccagcgggtgtttgagggcccctataaggagtaccatgaggaagcccagaagtgggaccgctacactgaccctgtacccagccctcggcctggctcgtgcattaacaactggcatcggcgccacggctacaccagctccctggagctacccgacaacatcctcaacttcgtcaagaagcacccgctgatggaggagcaggtggggcctcggtggagccgccccctgctcgtgaagaagggcaccaacttcacccacctggtggccgaccgggttacaggacttgatggagccacctatacagtgctgttcattggcacaggagacggctggctgctcaaggctgtgagcctggggccctgggttcacctgattgaggagctgcagctgtttgaccaggagcccatgagaagcctggtgctatctcagagcaagaagctgctctttgccggctcccgctctcagctggtgcagctgcccgtggccgactgcatgaagtatcgctcctgtgcagactgtgtcctcgcccgggacccctattgcgcctggagcgtcaacaccagccgctgtgtggccgtgggtggccactctggatctctactgatccagcatgtgatgacctcggacacttcaggcatctgcaacctccgtggcagtaagaaagtcaggcccactcccaaaaacatcacggtggtggcgggcacagacctggtgctgccctgccacctctcctccaacttggccctgcccgactccaaccccgaggagtcatcagtatgaggggaacccccaccgcgtcggcgggaagcgtgggaggtgtagctcctacttttgcacaggcaccagctacctcagggacatggcacgggcacctgctctgtctgggacagatactgcccagcacccacccggccatgaggacctgctctgctcagcacgggcactgccacttggtgtggctcaccagggcaccagcctcgcagaaggcatcttcctcctctctgtgaatcacagacacgcgggaccccagccgccaaaacttttcaaggcagaagtttcaagatgtgtgtttgtctgtatttgcacatgtgtttgtgtgtgtgtgtatgtgtgtgtgcacgcgcgtgcgcgcttgtggcatagccttcctgtttctgtcaagtcttcccttggcctgggtcctcctggtgagtcattggagctatgaaggggaaggggtcgtatcactttgtctctcctacccccactgccccgagtgtcgggcagcgatgtacatatggaggtggggtggacagggtgctgtgccccttcagagggagtgcagggcttggggtgggcctagtcctgctcctagggctgtgaatgttttcagggtggggggagggagatggagcctcctgtgtgtttggggggaagggtgggtggggcctcccacttggccccggggttcagtggtattttatacttgccttcttcctgtacagggctgggaaaggctgtgtgaggggagagaagggagagggtgggcctgctgtggacaatggcatactctcttccagccctaggaggagggctcctaacagtgtaacttattgtgtccccgcgtatttatttgttgtaaatatttgagtatttttatattgacaaataaaatggagaaaatgaaacgattgctctgatggggctaaga

SEQ ID NO: 531694 - DNA, 710 bp, Homo sapiens
ggacgcgtgggtccggacgcgtgggtccttgggcccaggaggtcaagcctgcagcgagctgagatcacaccactgcactccagcctggggtgatagaacaagaccctgtctcaaaaaaaaaaaaaacaacaaaaacttacaattggaggagttgtaacctccattgggtttcctcactccaaaatagggagctagatccttcctatacctaataccttaggccacctataaggggtagtaggtgtacaccatgcctgttaagccaagtagcttggggcataggctgcccaatctgagcaaacaccaggtgaaggcctctatgtgagccacgaccaagctccctcaaagcaccctgaaccacgtggggcccttctcgagccttacagccactgatggtcctcttacattgtgccaccaaacgggcgaccacaccaggtgaccaaacaggactcggcaactgttcacccaacgggcacacacatgcagtgactccccaaattccgacgtgaccagacatattaacaactacggcttaccaagagcgacacaatctttgccctacgtgggtacaggcggtacagacatcccatggccacgcctctggcaatttcccaaagcgtccacccagtccccatacgaagcttcgcaaagctttacaaaaatgtaacacccgtataggtcaacctcaaccactctctataaaggaaacc

SEQ ID NO: 531695 - DNA, 3096 bp, Homo sapiens
ggcagagaggccgcggagggctggcgggcgagcgcgggcaggcggcgacgcgggggcaggggtggacggcggtcagagccgaacgcgagggcggcgcccggggactggagctgcgcgcaataggacagctggcctgaagctcagagccggggctgtgcgccatggccccacactgggctgtctggctgctggcagcaaggctgtggggcctgggcattggggctgaggtgtggtggaaccttgtgccgcgtaagacagtgtcttctggggagctggccacggtagtacggcggttctcccagaccggcatccaggacttcctgacactgacgctgacggagcccactgggcttctgtacgtgggcgcccgagaggccctgtttgccttcagcatggaggccctggagctgcaaggagcgatctcctgggaggcccccgtggagaagaagactgagtgtatccagaaagggaagaacaaccagaccgagtgcttcaacttcatccgcttcctgcagccctacaatgcctcccacctgtacgtctgtggcacctacgccttccagcccaagtgcacctacgtcaacatgctcaccttcactttggagcatggagagtttgaagatgggaagggcaagtgtccctatgacccagctaagggccatgctggccttcttgtggatggtgagctgtactcggccacactcaacaacttcctgggcacggaacccattatcctgcgtaacatggggccccaccactccatgaagacagagtacctggccttttggctcaacgaacctcactttgtaggctctgcctatgtacctgagagtgtgggcagcttcacgggggacgacgacaaggtctacttcttcttcagggagcgggcagtggagtccgactgctatgccgagcaggtggtggctcgtgtggcccgtgtctgcaagggcgatatggggggcgcacggaccctgcagaggaagtggaccacgttcctgaaggcgcggctggcatgctctgccccgaactggcagctctacttcaaccagctgcaggcgatgcacaccctgcaggacacctcctggcacaacaccaccttctttggggtttttcaagcacagtggggtgacatgtacctgtcggccatctgtgagtaccagttggaagagatccagcgggtgtttgagggcccctataaggagtaccatgaggaagcccagaagtgggaccgctacactgaccctgtacccagccctcggcctggctcgtgcattaacaactggcatcggcgccacggctacaccagctccctggagctacccgacaacatcctcaacttcgtcaagaagcacccgctgatggaggagcaggtggggcctcggtggagccgccccctgctcgtgaagaagggcaccaacttcacccacctggtggccgaccgggttacaggacttgatggagccacctatacagtgctgttcattggcacaggagacggctggctgctcaaggctgtgagcctggggccctgggttcacctgattgaggagctgcagctgtttgaccaggagcccatgagaagcctggtgctatctcagagcaagaagctgctctttgccggctcccgctctcagctggtgcagctgcccgtggccgactgcatgaagtatcgctcctgtgcagactgtgtcctcgcccgggacccctattgcgcctggagcgtcaacaccagccgctgtgtggccgtgggtggccactctggatctctactgatccagcatgtgatgacctcggacacttcaggcatctgcaacctccgtggcagtaagaaagtcaggcccactcccaaaaacatcacggtggtggcgggcacagacctggtgctgccctgccacctctcctccaacttggcccatgcccgctggacctttgggggccgggacctgcctgcggaacagcccgggtccttcctctacgatgcccggctccaggccctggttgtgatggctgcccagccccgccatgccggggcctaccactgcttttcagaggagcagggggcgcggctggctgctgaaggctaccttgtggctgtcgtggcaggcccgtcggtgaccttggaggcccgggcccccctggaaaacctggggctggtgtggctggcggtggtggccctgggggctgtgtgcctggtgctgctgctgctggtgctgtcattgcgccggcggctgcgggaagagctggagaaaggggccaaggctactgagaggaccttggtgtaccccctggagctgcccaaggagcccaccagtccccccttccggccctgtcctgaaccagatgagaaactttgggatcctgtcggttactactattcagatggctcccttaagatagtacctgggcatgcccggtgccagcccggtggggggcccccttcgccacctccaggcatcccaggccagcctctgccttctccaactcggcttcacctggggggtgggcggaactcaaatgccaatggttacgtgcgcttacaactaggaggggaggaccggggagggctcgggcaccccctgcctgagctcgcggatgaactgagacgcaaactgcagcaacgccagccactgcccgactccaaccccgaggagtcatcagtatgaggggaacccccaccgcgtcggcgggaagcgtgggaggtgtagctcctacttttgcacaggcaccagctacctcagggacatggcacgggcacctgctctgtctgggacagatactgcccagcacccacccggccatgaggacctgctctgctcagcacgggcactgccacttggccacttggccccggggttcagtggtattttatacttgccttcttcctgtacagggctgggaaaggctgtgtgaggggagagaagggagagggtgggcctgctgtggacaatggcatactctcttccagccctaggaggagggctcctaacagtgtaacttattgtgtccccgcgtatttatttgttgtaaatatttgagtatttttatattgacaaataaaatggagaaaatgaaacgattgctctgatggggctaaga

SEQ ID NO: 531696 - DNA, 107 bp, Homo sapiens
tactatttccagagggtagatggtagatggttacacaatattgtactattcatatctcttcgcttttttttcttttcttttgggaaacaggctctccttattgtcgc

SEQ ID NO: 531697 - DNA, 2871 bp, Homo sapiens
ggcagagaggccgcggagggctggcgggcgagcgcgggcaggcggcgacgcgggggcaggggtggacggcggtcagagccgaacgcgagggcggcgcccggggactggagctgcgcgcaataggacagctggcctgaagctcagagccggggctgtgcgccatggccccacactgggctgtctggctgctggcagcaaggctgtggggcctgggcattggggctgaggtgtggtggaaccttgtgccgcgtaagacagtgtcttctggggagctggccacggtagtacggcggttctcccagaccggcatccaggacttcctgacactgacgctgacggagcccactgggcttctgtacgtgggcgcccgagaggccctgtttgccttcagcatggaggccctggagctgcaaggagcgatctcctgggaggcccccgtggagaagaagactgagtgtatccagaaagggaagaacaaccagaccgagtgcttcaacttcatccgcttcctgcagccctacaatgcctcccacctgtacgtctgtggcacctacgccttccagcccaagtgcacctacgtcaacatgctcaccttcactttggagcatggagagtttgaagatgggaagggcaagtgtccctatgacccagctaagggccatgctggccttcttgtggatggtgagctgtactcggccacactcaacaacttcctgggcacggaacccattatcctgcgtaacatggggccccaccactccatgaagacagagtacctggccttttggctcaacgaacctcactttgtaggctctgcctatgtacctgagagtgtgggcagcttcacgggggacgacgacaaggtctacttcttcttcagggagcgggcagtggagtccgactgctatgccgagcaggtggtggctcgtgtggcccgtgtctgcaagggcgatatggggggcgcacggaccctgcagaggaagtggaccacgttcctgaaggcgcggctggcatgctctgccccgaactggcagctctacttcaaccagctgcaggcgatgcacaccctgcaggacacctcctggcacaacaccaccttctttggggtttttcaagcacagtggggtgacatgtacctgtcggccatctgtgagtaccagttggaagagatccagcgggtgtttgagggcccctataaggagtaccatgaggaagcccagaagtgggaccgctacactgaccctgtacccagccctcggcctggctcgtgcattaacaactggcatcggcgccacggctacaccagctccctggagctacccgacaacatcctcaacttcgtcaagaagcacccgctgatggaggagcaggtggggcctcggtggagccgccccctgctcgtgaagaagggcaccaacttcacccacctggtggccgaccgggttacaggacttgatggagccacctatacagtgctgttcattggcacaggagacggctggctgctcaaggctgtgagcctggggccctgggttcacctgattgaggagctgcagctgtttgaccaggagcccatgagaagcctggtgctatctcagagcaagaagctgctctttgccggctcccgctctcagctggtgcagctgcccgtggccgactgcatgaagtatcgctcctgtgcagactgtgtcctcgcccgggacccctattgcgcctggagcgtcaacaccagccgctgtgtggccgtgggtggccactctggatctctactgatccagcatgtgatgacctcggacacttcaggcatctgcaacctccgtggcagtaagaaagtcaggcccactcccaaaaacatcacggtggtggcgggcacagacctggtgctgccctgccacctctcctccaacttggcccatgcccgctggacctttgggggccgggacctgcctgcggaacagcccgggtccttcctctacgatgcccggctccaggccctggttgtgatggctgcccagccccgccatgccggggcctaccactgcttttcagaggagcagggggcgcggctggctgctgaaggctaccttgtggctgtcgtggcaggcccgtcggtgaccttggaggcccgggcccccctggaaaacctggggctggtgtggctggcggtggtggccctgggggctgtgtgcctggtgctgctgctgctggtgctgtcattgcgccggcggctgcgggaagagctggagaaaggggccaaggctactgagaggaccttggtgtaccccctggagctgcccaaggagcccaccagtccccccttccggccctgtcctgaaccagatgagaaactttgggatcctgtcggttactactattcagatggctcccttaagatagtacctgggcatgcccggtgccagcccggtggggggcccccttcgccacctccaggcatcccaggccagcctctgccttctccaactcggcttcacctggggggtgggcggaactcaaatgccaatggttacgtgcgcttacaactaggaggggaggaccggggagggctcgggcaccccctgcctgagctcgcggatgaactgagacgcaaactgcagcaacgccagccactgcccgactccaaccccgaggagtcatcagtatgaggggaacccccaccgcgtcggcgggaagcgtgggaggtgtagctcctacttttgcacaggcaccagctacctcagggacatggcacgggcacctgctctgtctgggacagatcttgccgcaccaccggctgaggactgtctgtcaccggcactgacttgggtggtcccgggccccctcgaagggttcccctcggattcaaccgggccc

SEQ ID NO: 531698 - DNA, 941 bp, Homo sapiens
  misc_feature (9)..(9): n is a, c, g, or t
  misc_feature (12)..(13): n is a, c, g, or t
agcgggtcnggnnccgccgtctcgctgaggcggagtaggatgaggcccgcggccgtggctccggcgtcggcgggggcagcagcagctgaggcagcagctgaggcagccgcgacggccgcgcccccccccgcgacctgatagccccatcctggccgccgccgccccgcggggggcgcggcggctggggaagctgcttcggtctcccccgcccgcccgcccctctccgctccctcgcacccgcccgtcccacctcttcttacctccctccccgtctgacccctcctccctctcgctccaaacctcgccccccctgccccccccccctccgcgcccgcgctctccgcctcgcctgaccacccctcctcgcgagcctccacaacattcaccgccccactcttcaacacacatgcctacactctcgcgcacgaaccaccctcgctggactcagtctgcacgagatagccccaacccatcctttgctgccactttacgagtcccacgtcctcacgcctaccaactcgtcatgccgaagccgcgcagatcagctccattccacctcatcagcggcttacacaaccagacgcatacagctcccccgcccactgatgtcaacgactgcttagtgtcgtaactcgaatcttcgcaccacccgaccacgcacgaccgaatccgatccacgtccaccacaccaccccctgccatgcctccaccactacccctctctgctcccacctcgcaccccaccccctcactacctaccacgacccgtcaccaacaatcaccccgccacgcccccaacaccactctctatcgaactatctgtccacaccatgcaccacctcatgacctcgcaccccatcatcaccccacatcgctccgctcatcccacgcccgccctccacacgtcgcacgccacagattctcctccccgctctacttcc

SEQ ID NO: 531699 - DNA, 2173 bp, Homo sapiens
ggcagagaggccgcggagggctggcgggcgagcgcgggcaggcggcgacgcgggggcaggggtggacggcggtcagagccgaacgcgagggcggcgcccggggactggagctgcgcgcaataggacagctggcctgaagctcagagccggggctgtgcgccatggccccacactgggctgtctggctgctggcagcaaggctgtggggcctgggcattggggctgaggtgtggtggaaccttgtgccgcgtaagacagtgtcttctggggagctggccacggtagtacggcggttctcccagaccggcatccaggacttcctgacactgacgctgacggagcccactgggcttctgtacgtgggcgcccgagaggccctgtttgccttcagcatggaggccctggagctgcaaggagcgatctcctgggaggcccccgtggagaagaagactgagtgtatccagaaagggaagaacaaccagaccgagtgcttcaacttcatccgcttcctgcagccctacaatgcctcccacctgtacgtctgtggcacctacgccttccagcccaagtgcacctacgtcaacatgctcaccttcactttggagcatggagagtttgaagatgggaagggcaagtgtccctatgacccagctaagggccatgctggccttcttgtggatggtgagctgtactcggccacactcaacaacttcctgggcacggaacccattatcctgcgtaacatggggccccaccactccatgaagacagagtacctggccttttggctcaacgaacctcactttgtaggctctgcctatgtacctgagagtgtgggcagcttcacgggggacgacgacaaggtctacttcttcttcagggagcgggcagtggagtccgactgctatgccgagcaggtggtggctcgtgtggcccgtgtctgcaagggcgatatggggggcgcacggaccctgcagaggaagtggaccacgttcctgaaggcgcggctggcatgctctgccccgaactggcagctctacttcaaccagctgcaggcgatgcacaccctgcaggacacctcctggcacaacaccaccttctttggggtttttcaagcacagtggggtgacatgtacctgtcggccatctgtgagtaccagttggaagagatccagcgggtgtttgagggcccctataaggagtaccatgaggaagcccagaagtgggaccgctacactgaccctgtacccagccctcggcctggctcgtgcattaacaactggcatcggcgccacggctacaccagctccctggagctacccgacaacatcctcaacttcgtcaagaagcacccgctgatggaggagcaggtggggcctcggtggagccgccccctgctcgtgaagaagggcaccaacttcacccacctggtggccgaccgggttacaggacttgatggagccacctatacagtgctgttcattggcacaggagacggctggctgctcaaggctgtgagcctggggccctgggttcacctgattgaggagctgcagctgtttgaccaggagcccatgagaagcctggtgctatctcagagcaagaagctgctctttgccggctcccgctctcagctggtgcagctgcccgtggccgactgcatgaagtatcgctcctgtgcagactgtgtcctcgcccgggacccctattgcgcctggagcgtcaacaccagccgctgtgtggccgtgggtggccactctggatctctactgatccagcatgtgatgacctcggacacttcaggcatctgcaacctccgtggcagtaagaaagtcaggcccactcccaaaaacatcacggtggtggcgggcacagacctggtgctgccctgccacctctcctccaacttggcccccacttggccccggggttcagtggtattttatacttgccttcttcctgtacagggctgggaaaggctgtgtgaggggagagaagggagagggtgggcctgctgtggacaatggcatactctcttccagccctaggaggagggctcctaacagtgtaacttattgtgtccccgcgtatttatttgttgtaaatatttgagtatttttatattgacaaataaaatggagaaaatgaaacgattgctctgatggggctaaga

SEQ ID NO: 531700 - DNA, 223 bp, Homo sapiens
  misc_feature (9)..(9): n is a, c, g, or t
  misc_feature (12)..(13): n is a, c, g, or t
agcgggtcnggnnccgccgtctcgctgaggcggagtaggatgaggcccgcggccgtggctccggcgtcggcgggggcagcagcagctgaggcagcagctgaggcagccgcgacggccgcgcccccccccgatgagatgagattaggcccaggagcgtccggggccgacgccgacccgcgagggggcggggtggggaagtgcttcgtctccagacctacgatag

SEQ ID NO: 531701 - DNA, 158 bp, Homo sapiens
cccgactagcccgacaggtagttctgggaggtgtgaggtctgtggaggaagtgaatggtaggctggggttcatgagggcgctgggatggttgtgcggagacgtgtgcttgaggagtctgctccgggggccgcttatgctgtgagggtaccctggttcc

SEQ ID NO: 531702 - DNA, 464 bp, Homo sapiens
tgggccccgtttgctccagcgtgcttgcccgcggcctgctcggcgtcggacgatctggtcacctagcagcagctagcaacacaggcacacagccgcgacaagggacccacccaacccgccagccacaccagccccaggtttttcatgttggccccgggcctccaaggtcagccgactgggcctgccactacacgtcggatgcctcccacttggccccggggttcagtggtattttatacttgccttcttcctgtacagggctgggaaaggctgtgtgaggggagagaagggagagggtgggcctgctgtggacaatggcatactctcttccagccctaggaggagggctcctaacagtgtaacttattgtgtccccgcgtatttatttgttgtaaatatttgagtatttttatattgacaaataaaatggagaaaatgaaacgattgctctgatggggctaaga

SEQ ID NO: 531703 - DNA, 291 bp, Homo sapiens
  misc_feature (139)..(139): n is a, c, g, or t
tctgctggaccagggtgtgcgccatcaggcgtttttgatggcctacagtgatgcgttctttctggcctgtgtggcgttggcggcctgtgcggtggcggcgttgatgttgcggcgtacctagggtcaatgttgtggttgnctcaagtgagtgcaatgtttcgggtgtgtttttatggtttgggggggctgagtacatatccgttatttgggtaacggctgatatgggttccgctcttacagcggctcacttttgaacagcgcaaaagtaagcaaaacgctcttgccccacca

SEQ ID NO: 531704 - DNA, 383 bp, Homo sapiens
  misc_feature (33)..(33): n is a, c, g, or t
  misc_feature (37)..(37): n is a, c, g, or t
cgcctcagaatgagaaagcctgagaagaaagancccncccccagccccccggaaggaaagcgccggaggtgaaaatgcttttttggcccgggtagtaagaattaaaggttaaagcaggggctgtaaaacccccctttttgcttcaaaatctaaatcccggggagctttgttccctgcccttattaaacaaatgttggtaaacccaaactaaatggacccctgagcttccctgagttaagttatgaaaccttccaatccttcctcatgtcagttcccatgagggggggatggaaaaaaccattgttgcttattaaaaaaagccttaaccgtttctgttttgtaagccttaagcgccaccttttttggttcccataaagcctttt

SEQ ID NO: 531705 - DNA, 131 bp, Homo sapiens
acagagagagaaacagtgagagaccaagagagcaaaccagagagatatggagggggaatgcaaggggtccctgggggcatcaaggagtccagtggagaatgagaggcaggccccccagtggtggcggggcc

SEQ ID NO: 531706 - DNA, 176 bp, Homo sapiens
tagtgatatgataagtatacttggtgactaagtaagcagctgaagaagatgctgacgactaccgaagaggtaacccgattgggcgaaaaagaagtgaaataccgtaagatattggcgagtgagaagagataaattattgaactaaatgagataatgataaataatacggcgctgct

SEQ ID NO: 531707 - DNA, 517 bp, Homo sapiens
aggataaaactacgtcaagcgagcccaccctcttgatcttagctactcctgagagaaaaaaatacataaatcagatccctggatttgatagacagcattcagagagctacaagagagccccacagaccttggaaagaaggtgacccctgtcattcagagttctaagaattgactcttattattatttttccttttatgagacaagggcaagctctgtcaccgaggctagaatacagcggcgtgatcatagctcactgcagccttgaactcctgggctcaagcaatcctccgcactcagtgtcctcagcatcctgagtggctgggtcaatggtcacatgccaccacacctagctaatgtaaaattttttattagagatggggtctctctatgttgccaaggctgttctcaaacttttgagctcaagcaatcctcccccgttcagtctcccaaagtgctgggattacaggtgtgaaccaccatgtttggccttttaaagtcttagttttttgtaatgtt

SEQ ID NO: 531708 - DNA, 882 bp, Homo sapiens
  misc_feature (542)..(542): n is a, c, g, or t
gggaaagagcgcagggactcgcttatgattgttccgctaagtgactaggagctcaccgtgagtcggatcgagatatactggcaacgaagagctgagacggcagtactagctgaaaggcgatctgccagtagctcaccacaggcgagatgacgagtggcaatcactcgtatgatgcaacgttagaatggcagttctcctagtctagagagccgacacttggggagaaagcgcccaacgcaacacgaacgcaagttattgcactacgacacgtctagtgcgagcaggcattcagtccatgaaagggcagcaggaagacatccagtggtcgctgggcaagtctgcatcccgccatgtaagcgtatgctcagccttttctctgtcggataatactgcctcgcacagcataaaggtagaatagtctagtgagtctgcacgcagataagaggactattggccctgatcttgtgagtgtcaggatactccaactccgagattagaggcctagtacttcttagggatacccttgctgtgcgattctcttnaataattaattgccctcgctcaatgacatggtttatattgttctactctatgtttatggggactaagccacattggcagtcgcttgggaacccactacacaccaaatccagtggaccgtgtgttgggcttggcgggttctttctgccccaccaatgggaaccccttggtgtgcaccaaggcttccccagagctccggagcgccctctcctcacttccaggttttggagcaagagcttgcaggaagcccgcacccagcttccctttctgacctttccagttcacttttgtcgcccttggagaaagctgtttttctttaacttaaaataacccaaaatgctt

SEQ ID NO: 531709 - DNA, 484 bp, Homo sapiens
caaaggttaagccaatgagatataattacattagacattatggactcatacactcactattaatagagaaatagtgcaggggggataataaataaataagcaagagtaaataatcatgggctgtttaaagatgacatatttttagcagaaggtaatgaatagttgaaagtataaggatagcagaataaataccatacaaacattcgatgaaagagcacatggagacgccatttagaaaaattacaggatctgagtctcctgagacatagagtacacgtggagagctcacatggtcgctttccctatattcagacacagggtctgttgcccaggttgaaatgcagtggtgatatctagtaccttactgtacacctcaaaactcctgggctgcagcgaatctcctgcctcagccttcacgagtagttatgacccattaggccttgtagtctgcacacgtggctatcatgtctcattgtctcatatg

SEQ ID NO: 531710 - DNA, 1092 bp, Homo sapiens
  misc_feature (370)..(370): n is a, c, g, or t
  misc_feature (378)..(378): n is a, c, g, or t
  misc_feature (380)..(380): n is a, c, g, or t
  misc_feature (388)..(388): n is a, c, g, or t
  misc_feature (395)..(395): n is a, c, g, or t
  misc_feature (518)..(518): n is a, c, g, or t
  misc_feature (534)..(534): n is a, c, g, or t
  misc_feature (566)..(566): n is a, c, g, or t
  misc_feature (573)..(573): n is a, c, g, or t
  misc_feature (580)..(580): n is a, c, g, or t
  misc_feature (582)..(582): n is a, c, g, or t
  misc_feature (585)..(585): n is a, c, g, or t
  misc_feature (591)..(591): n is a, c, g, or t
  misc_feature (841)..(841): n is a, c, g, or t
  misc_feature (856)..(856): n is a, c, g, or t
  misc_feature (922)..(922): n is a, c, g, or t
  misc_feature (929)..(929): n is a, c, g, or t
  misc_feature (933)..(933): n is a, c, g, or t
cctaatgtttgtcaagacggtcgacgcactgacccactcctggactttcccatgggtcccctgtctccactaacgtagcatcggacgttctttccattggtaccatcgggacgtactcggtggacctcctatctgtgctcccgcatgatcgcgtacataccattttgtctcgtgcaacctccgtatggtgagtgtttgcgttgtcctctaactgatgtctggctttccccatgcaccttgcgtgcctgtctctggctttggtggtcgtctggggtggctgttctccggtttccaggcaccttgtgtcaggcactgtccctgtcatcctcggggtccgtgctacacgctcccccttgagtcgttcgctgtntagctttncnagcacccntctgccngtctctgtccttatggctgtcccggcctcgccagccctctggggcatttgggagatgcctccccggaatgagccagctctgttgctcgggagcctcttgtcaccttcttggacttattccccncctgataccttatagngaaaagtgtgaattcaggtggagagtaggccncaggccnccatgangncanccagtnggaagtcactggctacctaatgttcatgacatggtgactctcttagtacgaggataacaagccatgtacatggcaatactgcactttacctcgtggacgatttgagaaccctgacaaacaacatggtggcatctcggtgctgcctgttcttgagttttcgtttaggacttagttgagttccacgtctgggttttgcggagcaaacggaccgattgcctaccaagtcttggactgttacgggtcgagaccnctgcaagttgagtantagagagcttgtctttcaaggcaggttcctggggcttcagggctaggagggaggagcctgcccttntaacagnaccncagtcacatgcggctcaagtcactcagaggctgttgcatttcagggctatgttggtcctttgtttacctcctaaaccacagctgtttgtgtttcacatatgttgtgaattttccttggttctttttaaaggaatgataataaagttacttgctttagga

SEQ ID NO: 531711 - DNA, 1072 bp, Homo sapiens
  misc_feature (370)..(370): n is a, c, g, or t
  misc_feature (378)..(378): n is a, c, g, or t
  misc_feature (380)..(380): n is a, c, g, or t
  misc_feature (388)..(388): n is a, c, g, or t
  misc_feature (395)..(395): n is a, c, g, or t
  misc_feature (518)..(518): n is a, c, g, or t
  misc_feature (534)..(534): n is a, c, g, or t
  misc_feature (566)..(566): n is a, c, g, or t
  misc_feature (573)..(573): n is a, c, g, or t
  misc_feature (580)..(580): n is a, c, g, or t
  misc_feature (582)..(582): n is a, c, g, or t
  misc_feature (585)..(585): n is a, c, g, or t
  misc_feature (591)..(591): n is a, c, g, or t
  misc_feature (821)..(821): n is a, c, g, or t
  misc_feature (836)..(836): n is a, c, g, or t
  misc_feature (902)..(902): n is a, c, g, or t
  misc_feature (909)..(909): n is a, c, g, or t
  misc_feature (913)..(913): n is a, c, g, or t
cctaatgtttgtcaagacggtcgacgcactgacccactcctggactttcccatgggtcccctgtctccactaacgtagcatcggacgttctttccattggtaccatcgggacgtactcggtggacctcctatctgtgctcccgcatgatcgcgtacataccattttgtctcgtgcaacctccgtatggtgagtgtttgcgttgtcctctaactgatgtctggctttccccatgcaccttgcgtgcctgtctctggctttggtggtcgtctggggtggctgttctccggtttccaggcaccttgtgtcaggcactgtccctgtcatcctcggggtccgtgctacacgctcccccttgagtcgttcgctgtntagctttncnagcacccntctgccngtctctgtccttatggctgtcccggcctcgccagccctctggggcatttgggagatgcctccccggaatgagccagctctgttgctcgggagcctcttgtcaccttcttggacttattccccncctgataccttatagngaaaagtgtgaattcaggtggagagtaggccncaggccnccatgangncanccagtnggagcaccagctcccagtgtcaagaccaggtgcccctagagagggacaacccatgaccaggccaaagccatattcctctgggagatttgagaccccggccgaaaccaaccaggtggccattctggtgtgctgtttttggagttttcgctttaggattatttgagactccacgctgtggtttttggagagaaagagaaggttcccaattctttgaattttaggcgagaccnctgcaagttgagtantagagagcttgtctttcaaggcaggttcctggggcttcagggctaggagggaggagcctgcccttntaacagnaccncagtcacatgcggctcaagtcactcagaggctgttgcatttcagggctatgttggtcctttgtttacctcctaaaccacagctgtttgtgtttcacatatgttgtgaattttccttggttctttttaaaggaatgataataaagttacttgctttagga

SEQ ID NO: 531712 - DNA, 1038 bp, Homo sapiens
tggaatattgtttttgtatcggtggtgcggatgttatagttttgtgtagagttttgtttttattgatgtagaaattgttagatgttaccgtgggtgcaagtattaagggttatctcgaaggtagtgagctggaatggtagaagtggaggtggtcaaaggaattttcgtggtgggatttagaggctgttgtgtaaacggtgcgcagtggtagagttggtgtagggtcccgtcttaatagtctgcgagttctggtttggaaaccgtctcattgtgtggactttgtcaagggagtgctgattaatctccacgaatgttgggtgcatgttctctggcccaatgccgtgccaggttaattttctgcttagccatggtagtattacttgtgggaaatctgaatcgttaatcgtccgtgtttctgattcaactagatcagtggaggaagtctcttgtggaagacgtctctgcgattcttctcacccacgtggtgcgcctctcccctgttcgaggttgcgctcttgctgttcgtccttaaattgttctctcgtaacaccgtttggatgtgtgacattaatgaacattcgcgatatgctgcaacggataaagttgccgttacttatcgaacaatttattacttcctcaatttatcttctcttttgtcgttatcacccctcgtgctctcagcagcgttctgtacaagctcgccgttaggactcagcagttctacgtagcaagagtgcaagaggagaaatccctaacgagatctgtccgtagtgagttttacctttggtgctagaaggcgcgtccttttcagggttgtggtattctataggattagcggagcatgtctttcctctgtttccccacccatctccccaatattgcccatggtattaattaacctctttctttgggttggaaccctggcagttcgtgctcccttcctacggatcctgccagtgcagttgtagcttgcttgaaccggagcacttctccgtttttcccaaaggtctacatatactacgggtggtgggctagatg

SEQ ID NO: 531713 - DNA, 1997 bp, Homo sapiens
ctcggtcttgttttttttctcttgtgtctttgtcttccgtctgtcgctcatgtgtctgttgctccgcgtcgcttgccttccgccgcgtgtctttgtgtgttcttctgtggccgcctgtgtggatcgatcgttgtgctcgcgtcgttgtcgttgtcttgtcttccttgcgctgtcttcgtacgcgcctcgttttgtgctgtgctgctcttgctctgtctgtcggtggtgccgtcgcgctgctcattggcgtgtcttccttctgctcctgcggtctgtcttactgccttgttctctctgtgtcctgtcgctctggcgttgagtctgtgctgtctcggtctttctagtgtgttgtatatgtgttttgttgtgttgtttgctgttgataatgatgtggtgtgagtgttttggtacttgtgtcgtttgttatgttagttattgttgatgtgtgatatactttaaatgtagttgtgattttgttgtgttgatttgtgtttgtgtgtcggtatgtatgtgtgtgattatctgttgtgtgttcgtgatgttagtgttgtgtaggttagtgtgatgttgttctcagtgtttgtaagcaggcaagcgaagagagtaagatcaagagatcaaggaagcaggatgtatagacagatcgtgttgtcggtgtttgatggctactagaatgtatttttagtcgtgcccgctttggggctcgcgcagtcgtggttgcttgctatacagtcctcgtgccgtgctcgtttttttgtcgggagattcttcttctgtttcgctcgtaaacgaagaggggtgttttcgtccccacactccgcttggtctacgccgagctttagtgttcacatgcgggcgacattataaaccctccaaaggcacctgtgtttgcgacggttttggaatgttcagcgtctaataaaacaccctgagggtttaaaaattgttgttgatttgaaacgcaattatttgagggcgcatttaatggtgaacaccggaataatttacaagggggacacaagtgagcattctcttgcggactgtgataaaatgggggcgagatgaccacccaacggcggagcccccagacacaggggtttcacccgcggcgccaattgtcgcttggttctgcgttaaaaattaagaccacgtttgtttgccgcgccaccctttggctggtcgcatatactgtgttgccgaacagcacggactggtgggatttagaagaggggatctctaagaatatagtgcattgtgtggtgctcatagggggcgttctcaattctcacactgcgccgaaaatctcgccacgagtgtcgcaagaggtgcacccttgggcggtcttcccccccggggagaggggagaccaccagaagaatatcttccttagagctttccgcgagagagcacaccgcgagagggcctctttttaggagcccgctctgaaaggaaccccctcttgggatatggggactcgtgccaaatttctcagggactgtatatcctcgcgatatatattagagaaagaggaaagaggaccactgttggggttaaatatctctgtctgtcccccccccactatagagctctctctgctggcgctgtagagtgttacacatatttatcatctcaggcatctcacttaccaccatatctcctggtaagattcgttctctctccccagagtctccaggagacgctcacatgtggacaccaatagcgctctttatatgggaacacttaataacacatataataacaacccaccacataggagggaatagtgaggacctcataatatagggagagtccggcattagagctcatacctcatatcatatcccgtttccctggcccggtggaggcgagagtccatagggtggggacccccattcatacccaacccccagactttacattccggcatttcaagaaattgataggttatattttttgggattttaccgagttaattaataaaaggtttggagagtggg

SEQ ID NO: 531714 - DNA, 196 bp, Homo sapiens
  misc_feature (74)..(74): n is a, c, g, or t
atgacatgttagattttcacaatgtcatctcatcgatgttagacatgttccatagacagtagtttaagtcgagnttttttaattttttgtagtatggttagcacagcaaacttgtaggaattagtatcacatagtaaattttgggttatttagtgattgtttgcatttcagatgtatttttataatagaactttgt

SEQ ID NO: 531715 - DNA, 800 bp, Homo sapiens
  misc_feature (112)..(112): n is a, c, g, or t
aagggagttaaccggagttctcccgcctccaaagaggggcggtccctagtaaacgggagggacgagattaatgtgatgtcgtgtggcccaccgcccacactgcggtttgtgntgcaagtggctgcatatacaggtggtgacacccgcgccttggcgttaccagagaaggaactcgctgtggagaatacaaaccagagtctcttaatgtttgtgtgtcataaaatgtggcctccgctgggtgtgtagaaagattcatgtgtcgtctctcgcggcttgctacaagagccctcctctccttgtgtgatataatctctcctccctcgctcgccacggtgtacacccgtttagatagatagttccccctgcacagcggtgcaatacgccccgcgcgttttcatacactgtgcgtgaaaacctattaaatacaccaacccgcacctgtgggcgcgcgaaagacacccccccgttgtttcttcttgtgcgaagcaccctcgtggtcctacgtccatgtgtaccagtacaccatgtatcacgcttgatgtcgatacccccgcagtggcctccaccattgaaaggggcatgacccccgcgcccaaattcccctgccagaggggtctaacaaaagacgatggaggagcacacaccctccagaccccacacaggagactctaataggaaagaacatacggaccccacgcacatagacggaacaaaggggtggagggagagaccctgtggcgacccccttatttcacagccggcgaacccacgagaacacgagaattcttccacaaaacaca

SEQ ID NO: 531716 - DNA, 819 bp, Homo sapiens
  misc_feature (248)..(248): n is a, c, g, or t
actccagcacagccacgtggatggaaggattcgtaagaccagaaaaaggtaaatgatgtacagaacattgaaaagtaggaggtacaaacaccagaactggaagtaggattctcaggattgagtgtctatggccggtatttgaaacacgagtttgtgaaacgtcctcagacgagatatagtgaaatagattgagagctgcagaacctctgggagatcgtgccaaagacgacagtgcatatgcttgacanttaggcagtaactcccttgttagaggtatttgtcaaatcgtagtcatatccgtgattaacggctagtggcttgacagtatatacattcacaatcgaaggtagcgtgcaaaatactagaagaatactgcaaggtcctttacttcagggtaccagtaatcatagctatgtgacttcagagcaaaaactagcgccatactaatttgggtacatattaatcttcaaattggtggaggaaggattgaactcaaaaaaagcattttaagaaatagtaatgggtcaggtaatcgaaccgataaagtgaagaattggtaacgttaatctatggacttcctttggaaaaatcacaggttcgggggaaagagccgaagtacgaaaacatactggagatttttccatacacgggttaggtgaaccaaaaagaactgtgaagataagaaggggtaacgctccatatttattgcgtggggaaacgattcgctatgattatacaatgggaaggaaaaagaacccttggggtcctggcttcttaaggcgaattttaataattggtaattcccttttaggttgttga

SEQ ID NO: 531717 - DNA, 519 bp, Homo sapiens
acacctcacatgtatacatataccatgatcacataaagtcgagtacttcaaatccaattctaacgtgaaacatgcatgattttgaattgtacactgcatgattaatagtatcagtgaaataagaatcaattcacttacattacaaaatcaccaaatatacaaagcaattttgcatattagttacaacttaaccccccagtctccatattaactgcaagtaacatttcatgaatgaagccacagagcattggttaaaaagtcataatatagttccagtttcaaatctttcatgtcttcactagttaatgtcagcacacagcacaaaatctccatgggcagcaagcagtcaacaccaacacttgctcaaaaataaagggttgctttctcaccaattggtgtgtttacagtctttcaaacatacacatctgaatgctcaacaggttgtttccagcagcccaccattaataatttcattttcagggcccgggcaggtggctcacgccctgttaatcccagcac

SEQ ID NO: 531718 - DNA, 617 bp, Homo sapiens
tacttaaacacctacctttttgtggggaaggcaccgcccaaaaatgccgtgggcacgtccttagctgttcaacgccgaaactttatattgttccttgaaagagagtggaaacgtcccttctttggtaatggtaacaatcgcaactcccaggtgacatcgggaacccttctttcaggacttttgctaacaggttcgaccagctattagccagcgatcctggtggacataacacctcagcgttccttctctcaaaaaaattaagggcggcggtacaggaaagaagcctttggccactttcgacttatcaaactacgtctgaacggccaaccttcgacaatactcccctacctaccaacgctggcctcccccgcgccgagccctctttagactcgtggacgctattctatgcgggcaaatttggctcgctctgggcacctcagtctatttggcccactaaaatccatcggcgggagttctcaccgcctggacgggggaaccctgcgggacagcaccctaacaccccctgacgctatgctcttttctcggctggcgtatcacgctaggacacgtaccgcgccacatcttttccaaaccacggcgcgtttcggtcacaacgc

SEQ ID NO: 531719 - DNA, 221 bp, Homo sapiens
tggctgtagtggtctacttgtataagggtttcgatgaccacgtctgccctatcaactttcgatggtagtcgccgcgcctaccatggagaccagataggacagacaatcaggtaaggcacggcgactaccatcgaaaggtgatagagcagacgttgagatggaaactcttacacagcaagaccactacagcgaggagatcgattgactgtaagccctgaaga

SEQ ID NO: 531720 - DNA, 1162 bp, Homo sapiens
atgacctttggtggacagtctaatctataaagatgtgaagttgacagcaagcaatgatgattattatttgtatttgaagattatttatatcaggtattacttgtttttcccgggatacatctgtgttgagtcacttgcattcaacagtgcctcgccacaaaatcatacataagaggaaaactaggactggaagaatatgctgtcttttacccaccaaatgataaagaaactgaggcatagagtgttaacctgcccaacaggtgttatcccttttcatggattttcaatgtatgttgcaccacttgttttctataccatgaaccttccaaattgtatcagatattccgtgagatgtatgtgcgttttttcttcagactccattccatctcttctcatccttctggtattgtgtcactctgtctgctgtttgaaactcttcttcaaacttatcttccccaactcttttatcatctacgagaaattggggctcaacccacttcgcatatcatttaagtggatggttcgagctttctctggatacttagcctacagatcagctcttgcttttatgggatagaatcctaggatacaactctctggaaattcttgctgtgctggcagctgccgtgtttgctttccgagcagtgaacctgatggaggtgacatcactggctgcagctgaagcagttcttgctgacctttctactttaaaagttatgcctcttcttcagatttttctgtttgctactgtcacctgatcttcttcacagtcactggcaacacatctagtttttcattagaaacaaatcatgaactatgcaaactctgcataaaaccaaaatgaaactttgcatataagccaataaagatcatgttccctcttcagttaaacctaagtagtttctcactttttgaaacaataactctgcaccaaatattgcatcgcatgctgctgattttcaagagagaagcaataaacacaacttctgctaaattgagcattatatatataatattataatatatatataatcctgacttgtcaatggcatgtaataatatatgcaataagaactaaagatactgtaataaacttcaagaggtaatgtagcttcttggataattcttttatgtcagtttataaatttatctctagataatg

SEQ ID NO: 531721 - DNA, 274 bp, Homo sapiens
ctcttggtgacggactcgacctgagatcccaaggggtgagtatcagggcgttttccacatgcgccgtggagacagcgaagctcggtgcctctggccttttacaaggtgcctcgttcccagctgttatccggctcatcccccacaccgtgctcacttttgtgtttctggaacagctacgcaaaaactttggcatcaaagtgccatcctgaccagccgtgggaatggctgggctgccaggccagacacgctaggttcttccaaagagtcccaagcc

SEQ ID NO: 531722 - DNA, 1122 bp, Homo sapiens
atgacctttggtggacagtctaatctataaagatgtgaagttgacagcaagcaatgatgattattatttgtatttgaagattatttatatcaggtattacttgtttttcccgggatacatctgtgttgagtcacttgcattcaacagtgcctcgccacaaaatcatacataagaggaaaactaggactggaagaatatgctgtcttttacccaccaaatggtgttatcccttttcatggattttcaatgtatgttgcaccacttgttttctataccatgaaccttccaaattgtatcagatattccgtgagatgtatgtgcgttttttcttcagactccattccatctcttctcatccttctggtattgtgtcactctgtctgctgtttgaaactcttcttcaaacttatcttccccaactcttttatcatctacgagaaattggggctcaacccacttcgcatatcatttaagtggatggttcgagctttctctggatacttagcctacagatcagctcttgcttttatgggatagaatcctaggatacaactctctggaaattcttgctgtgctggcagctgccgtgtttgctttccgagcagtgaacctgatggaggtgacatcactggctgcagctgaagcagttcttgctgacctttctactttaaaagttatgcctcttcttcagatttttctgtttgctactgtcacctgatcttcttcacagtcactggcaacacatctagtttttcattagaaacaaatcatgaactatgcaaactctgcataaaaccaaaatgaaactttgcatataagccaataaagatcatgttccctcttcagttaaacctaagtagtttctcactttttgaaacaataactctgcaccaaatattgcatcgcatgctgctgattttcaagagagaagcaataaacacaacttctgctaaattgagcattatatatataatattataatatatatataatcctgacttgtcaatggcatgtaataatatatgcaataagaactaaagatactgtaataaacttcaagaggtaatgtagcttcttggataattcttttatgtcagtttataaatttatctctagataatg

SEQ ID NO: 531723 - DNA, 579 bp, Homo sapiens
  misc_feature (16)..(16): n is a, c, g, or t
  misc_feature (22)..(22): n is a, c, g, or t
  misc_feature (64)..(64): n is a, c, g, or t
  misc_feature (116)..(116): n is a, c, g, or t
  misc_feature (122)..(122): n is a, c, g, or t
tgtgtcataggatacngcatcnggtatatgtgagatgatactaactatccggcagaaactaccntgtggaagccaagtttgggctttacacctctgtaatcccagcacttgggagncagagncaggccaaatctttgaagttagcctgggctacataggaacagccagggctgcatattgagaccctgtgttccagttttctgaggtgggagtggggctctagagagatggcttaggagtccagagcgcctgctgttggcaggattgggttcttcacattcatgcccagtgtctcacagttgcttgtactctgcctccaggggtctgacactctcttctggcctctgtgggcacctagcctcatgtgcacttacccacacacagacacacatacctatgcataaattaaaactaaaaataaatttaaaagtaggctagtgtcaagcgtggtggcacatgcctttagtcccagcactctgaaagggagaagcaggcaggtctctttggaggccagcctggtctacatagtgtgctccaggacagtcaaggctatggagagaccctgtctcaaaaaaaaaa

SEQ ID NO: 531724 - DNA, 337 bp, Homo sapiens
ccgaggatttatggcatggtggaaatcaggtcatagtgggcaagacagttgtgggagggagaagaaaggaggcctggctagcagagtaggtcttgtaaatagagataaaacttcacaggtagcagccctacagagagaattgatggtaaatgtttctttcagacctttaaaggtgtcagacactcggttcatctttcctatatcttgatattggagggcctcagagcaaaccaggctgcattaatgcagattttctctacagatgcaaatctacccccaaaaagacagcttttcagtaattcttgcatttccagccttcctgatttccaccttgcca

SEQ ID NO: 531725 - DNA, 417 bp, Homo sapiens
  misc_feature (184)..(184): n is a, c, g, or t
  misc_feature (199)..(199): n is a, c, g, or t
  misc_feature (211)..(211): n is a, c, g, or t
  misc_feature (273)..(273): n is a, c, g, or t
  misc_feature (287)..(287): n is a, c, g, or t
  misc_feature (301)..(301): n is a, c, g, or t
taaaataagtgcatacaaatacagctagaagcatttctgatttgccaagtgctctaaaaaagcagcgcaagtcacagcctacatagaacggtaactgtcaccaggataataaagcacaaagatatgctaataacgttaacaaaagaaaaaaatgtctttataagtacataccttttgtcgtcanaaaaaatatagatanacactcgtatgnattccaaaatcaatccaaatttataccagccatgttttatggaaggtctacattttcccctngtcctgggatatantatattatatgggngatatatataccaattccaaggcagtttttaaattaaaggggtaatcatttgggggttttttcctggaaaccgggaaaagtcacgagtctctctcttttttcactttccacatatc

SEQ ID NO: 531726 - DNA, 384 bp, Homo sapiens
  misc_feature (383)..(383): n is a, c, g, or t
gggaaaacatttttattcccagcctgtgtcccatgggcacaagcaaatcccaaattctcctcctgaaccctcccaatttgtctctacagactctcttctccttgtttttctgttttcttatggctgaccttgtgtctggcctgaaaaaggtagggagggggctttatcagccctgagccctatgtggtagaagaggcttcagagagggacaagaaggagagtcctcaagatcaagttgcttctcgctgtcaccgacacatccccttctgccacgtcttttttttcttgtacctattccatgagctacaaggggacagctgaggctttggaaacaagctcacacttttcccccaggatgaggagggagggaagccccttgggtng

SEQ ID NO: 531727 - DNA, 886 bp, Homo sapiens
gaaggaagacgctaaacccaaagaaaagacagaggtggccaatacaggagcacccagattcataaagcaagttctcagagacctacagagagacttagactcccacacaataataatgagagactttaacaccccactgtcaatattagacagatcaatgagacagaaggttaacaaggatatccaggacttgaactcagctctgcaacaagcagacctaatagacatctacagaactctccaccccaaatcaacagaatatacattcttctcagcaccacatcgcacttattccaaaattgaccacatagttggaagtaaagcactcctcagcaaatgtaaaagaacagaaatcacaacaaactgtctctcagaccacagtgcaatcaaattagaactcaggattcagaaactcactcaaaactgcacaactacatggaaactgaacaacctgctcctgaatgactgctgggtaaataactaaatgaaggtagaaataaagatgttctttgaaaccaatgagaacaaagacacaacataccagaatctctgggacacgtttaaagcagtgtgtagaggaaaatttatagcactaaatgcccaccaagagaaagcagggagagatctaaattgacaccctaacatcaccattaaaagactttgagaagcaagagcaaacaatcaaagctagaagaggcaagacatactagatcgagcagagtgagggatatggcacgaaaaccttaaaataatgatccggagcggttttgaaaaaaccaatgtgacgtgcagcttagggaaagggggggactggggaaaaaaaaaaaattggggcgcccaaattaactgggggcgagaaaaggtgtgaagggggggttacaaaggg

SEQ ID NO: 531728 - DNA, 248 bp, Homo sapiens
ttgcggattatatataggtaaagatctaagactcctgagccaacttttatgtacctggcttcctagtgctggggcttgcaactaagtaacgaagccaaggcgtacagatctagatagcagagaagtaagtctcattctaaaacatatgcacctactgttagagtccaccccatgaagctgtctcagatatgtgtatcttctgactagaattctagtaagtatatataggtacagcactacaaacaaat

SEQ ID NO: 531729 - DNA, 403 bp, Homo sapiens
ccgccgcctgattctaggctggtcactactccgagcctgtgactgtttgcgcgcacccaggccgtcgacgatgcccagtgaaactctctgggaaattgcaaacgctgatgtggaaaaagaggggaataaagtggaagtgaaggtgatggagcgtgaatattgcagaaaaatgtgttctctactatgtggcagtaaaataggggggagagactacatatatatctctaggggtgtcttgacgagagatgaaccaccaaaaccaaccttagtttgggatatatacttattggcaagaagagcacaggggcacaacacaccaaaagagatctcgcacactttgtggagaacctcgggggggaggaacctctttatatggggactaaatcagatataccccatcaca

SEQ ID NO: 531730 - DNA, 134 bp, Homo sapiens
tgatttttcataattttattaaatcatcactgggaaactaatggttgcgtatcacacaattacctacaatctgataggagtggttttccagccaatcgatcaggaaagacaaacgcacttatgctgctgattcc

SEQ ID NO: 531731 - DNA, 323 bp, Homo sapiens
  misc_feature (21)..(21): n is a, c, g, or t
cagcctttgttaccagaagantcctcaggatgaaaggcaggggcctgaggccctcctgcctacctggcctgcccccctttcccatcccagtggcctgctgtttccccaagacgggctaagcgtttccttatcctgaaatgccttgggacaggagtgttacagattttggattttttcagactttggaatatttgcatatatacataatgaggtatcttggtaggtctcatgtctaaacatgaaattcattcatgttttatatataccttatacatgtagcctgaaggtaactctatacagtattttaaataattttgtacatg

SEQ ID NO: 531732 - DNA, 237 bp, Homo sapiens
  misc_feature (83)..(83): n is a, c, g, or t
gctaagtgtactgtgataaaacattagcttactattagcggaatacgcagtccagttacgagctaatttgagatcaactgccntacagcattcagcttctccacaaataaagacttttctttgatggcttcatgttttcctcaaaagttccccctcggcctcccaaagtgtgggattacagatgtgagccaccacacccgggctcatacagggctttcaaccacagaccccacccct

SEQ ID NO: 531733 - DNA, 246 bp, Homo sapiens
cttgaaaccggggagcataggttgagtgagccaatatcacaccattacactccagcgtggcacaagagggaaactccatctcaaaaaaaaaagtagttgggtatggtggcgtgcgcttatagtcccagctactcaggatcagagaattcttctggcctttcgttaaaatgttggatgcagtgttgtgctaagaggaagaagcatctccagagactcaaaactgtaactgttgtctttccagggtac

SEQ ID NO: 531734 - DNA, 503 bp, Homo sapiens
  misc_feature (137)..(137): n is a, c, g, or t
  misc_feature (226)..(226): n is a, c, g, or t
  misc_feature (256)..(256): n is a, c, g, or t
  misc_feature (260)..(260): n is a, c, g, or t
  misc_feature (280)..(280): n is a, c, g, or t
  misc_feature (294)..(295): n is a, c, g, or t
  misc_feature (299)..(299): n is a, c, g, or t
  misc_feature (303)..(303): n is a, c, g, or t
  misc_feature (358)..(358): n is a, c, g, or t
  misc_feature (381)..(381): n is a, c, g, or t
  misc_feature (402)..(402): n is a, c, g, or t
  misc_feature (428)..(428): n is a, c, g, or t
  misc_feature (450)..(450): n is a, c, g, or t
atggttaataaaaagacacattataaatatatatatgtaacctgctatatttatatatatatatatatttgcttatttaatttctaattggtgtatccaagtcactgtgaacaccccatttaattactctgtaactnagcttccaggagctggtggtcttgcaataaatcaggcaaagctattacaatataacgtgcatccaaatgttatccaataggcactatgnacaaattatttatagtatatgggattaacnagtngaaacatccaaagggagtcnaaccccgaaagttnnaacncaanccactaaatctttctaggacttacacttcatcctaatttttaaaacttttctagnattcccattcatcctattttttnaaaaagaatttgctttggttnttcaaaaattggcttcttaccaatanccaaaattaaattatatctatnaaaatcctaatggcctgggcttaccctggagctcgggccgaattcggacgagg

SEQ ID NO: 531735 - DNA, 463 bp, Homo sapiens
  misc_feature (28)..(28): n is a, c, g, or t
tgagagaccgtgttgcaatggttatcancacaccctgaggagagatgtacttgtgttcacatcaaatcaatgttttctgccaaagccattggggcagtgatagcctctgaacagagggaaagcccctcccctcacacacacctggctctggccccaatccctccatcttcagctccacctcctaaaaaggtgatggttatcagcacaccctgaggagagatgttacttgtgttcacatcaaatcaatgttttctgccaaagccattgggcattgcaacacggtctccatgagagaccgtgtggtaatggtgaaaacctgtctctactaaaaatacaaaaaaattagccaggcgtggtggcgggctcctgtagtcccagttactcagggggctgaggcaggagaatggtgtgaacccaggaggcggagcttgccaagagccgatatcgtgccactgcacttcag

SEQ ID NO: 531736 - DNA, 125 bp, Homo sapiens
ggaccggcgacagcttcatgaagcagatctcctccttcactgtcagaaatctcggatgaattcaggctggctttgagtataagcgcgctatcgtggactgcatcatcagcatcattgaagagaac

SEQ ID NO: 531737 - DNA, 576 bp, Homo sapiens
  misc_feature (82)..(83): n is a, c, g, or t
  misc_feature (145)..(145): n is a, c, g, or t
  misc_feature (260)..(260): n is a, c, g, or t
  misc_feature (301)..(301): n is a, c, g, or t
  misc_feature (433)..(433): n is a, c, g, or t
  misc_feature (543)..(543): n is a, c, g, or t
  misc_feature (562)..(562): n is a, c, g, or t
  misc_feature (565)..(565): n is a, c, g, or t
aatggatatgttctgatggtttaattcttgagccagggccagcaggcattaaaattttcggccaattgccttgagagaaaanncttaggaaaggctgacagggaacgggtgagagaagacaccgggattctatcgggccacactnaacaaatattaaaggtcaaagcaagatctgggcacggctttccttgggcccctccagacaagtgaggctgttggcaaagtcctcatcaccctcggcaggaagcgtcacccgagancagacttttgtctcgtgggtcccagatggcacaggagcacngcatgcttgttttctagagcccagccagtcatgggtgctagccgagtctccacacaccagcaagtagaacccaagtgtattgtataaatatttcctgaggaccagtaagagaatgcattctctctcccaaanaggccaggaatgttgaaaatgctcagccttacatagaaactcctagattttcacaaacgcatttcacaaaagtaaataagtatttcacacaattcagaggatgtttaaanggccagcattttaataaanacntgcaccagaaa

SEQ ID NO: 531738 - DNA, 932 bp, Homo sapiens
  misc_feature (610)..(610): n is a, c, g, or t
  misc_feature (625)..(625): n is a, c, g, or t
  misc_feature (747)..(747): n is a, c, g, or t
  misc_feature (769)..(769): n is a, c, g, or t
  misc_feature (772)..(772): n is a, c, g, or t
  misc_feature (807)..(807): n is a, c, g, or t
  misc_feature (815)..(815): n is a, c, g, or t
  misc_feature (828)..(829): n is a, c, g, or t
  misc_feature (840)..(840): n is a, c, g, or t
cgtggttgttccttagaaagggtaggcatggcaacattccagcaggctccattctccagtatctcattaactcattgaaagattccagttgtatttgtcacctggggtgacaagaccagacaggctttcccaggcctgggtatccaggaggctctgcagccctgtgtgaagggccctaactagagttctagagtttctgattctgtttctcagtcagtcgcttgtcttcagcagagcatatgccttactactagtgggtctgtctctctgaaggttacgagtcgtaccatgtcgttagatgtactgcacagcaatcgggtagttgcgattctgatctgcaagcacgcacagagtacaggatgtcagtgggctgctctggcccctggttgtgcgacgcgctgtgagcagactgtcgatgccagatgtccgtcgtaagctcatgctggtccttgtgattaggacaccgtctatctcccttgggaataagcacatacaggcttaagctcttaacgatacgataggtgtttgtccttgttaccatctgagctacttgcccataataaccactttgtcatccaacactcttcacccacctcccatacgcaatgtnatgtggatacttggnccaaagtaactggtggtaggaatcttagaaacaagaccacttatactgtctgtctgaggcagaagataacagcagcatctcgaccagcctctgccttaaaggaaatctttattaatcacgtntggttcacagataattcttttnttnaaaaaacccaacctcctagagaagcacaactgtcnagagtctngtacacacaactnnacatgcatcangagtctaaaaatcaaagaaaatcaaagaaaaaaaaattgtttgattacaaaaagataatttctaaataaacaatatattaattaaaaaaaaa

SEQ ID NO: 531739 - DNA, 362 bp, Homo sapiens
ggcgcgtggggagttggagagtttgcgtggcgtggaacgcagtgcggcggtgagagcgagtcggttgcctggtcccttgcgtccggtgcggctgatgcttgaccccggcgttcgaccatcagtccaggatccggacttcctgactatcgcggcatccgcgtgccctacgcccgggtctccgagttcgactgtctacttcgaggggtctgactttcaagttctacgccaagccatactttctcagtattaaccccttcctgtgaagaacttgtaccaaaatggaagtgatgcatggggtcctactgatgcagagttaaggggaggtttttaagcacttctggctgtgcctcaatgagaaaccc

SEQ ID NO: 531740 - DNA, 947 bp, Homo sapiens
  misc_feature (610)..(610): n is a, c, g, or t
  misc_feature (625)..(625): n is a, c, g, or t
  misc_feature (747)..(747): n is a, c, g, or t
  misc_feature (769)..(769): n is a, c, g, or t
  misc_feature (772)..(772): n is a, c, g, or t
  misc_feature (807)..(807): n is a, c, g, or t
  misc_feature (815)..(815): n is a, c, g, or t
  misc_feature (828)..(829): n is a, c, g, or t
  misc_feature (840)..(840): n is a, c, g, or t
  misc_feature (854)..(854): n is a, c, g, or t
cgtggttgttccttagaaagggtaggcatggcaacattccagcaggctccattctccagtatctcattaactcattgaaagattccagttgtatttgtcacctggggtgacaagaccagacaggctttcccaggcctgggtatccaggaggctctgcagccctgtgtgaagggccctaactagagttctagagtttctgattctgtttctcagtcagtcgcttgtcttcagcagagcatatgccttactactagtgggtctgtctctctgaaggttacgagtcgtaccatgtcgttagatgtactgcacagcaatcgggtagttgcgattctgatctgcaagcacgcacagagtacaggatgtcagtgggctgctctggcccctggttgtgcgacgcgctgtgagcagactgtcgatgccagatgtccgtcgtaagctcatgctggtccttgtgattaggacaccgtctatctcccttgggaataagcacatacaggcttaagctcttaacgatacgataggtgtttgtccttgttaccatctgagctacttgcccataataaccactttgtcatccaacactcttcacccacctcccatacgcaatgtnatgtggatacttggnccaaagtaactggtggtaggaatcttagaaacaagaccacttatactgtctgtctgaggcagaagataacagcagcatctcgaccagcctctgccttaaaggaaatctttattaatcacgtntggttcacagataattcttttnttnaaaaaacccaacctcctagagaagcacaactgtcnagagtctngtacacacaactnnacatgcatcangagtcttgtctccncagcaaaatcaaagtggcacaacttctttgtctacactatcgctactttctaactaaactctctcttctacaaaacaaaaaaaacacaacaac

SEQ ID NO: 531741 - DNA, 361 bp, Homo sapiens
ctgtgcgagacggcacgcggggaattgtgacacatcactctatacactctttggggacacattatgcgcacaggcgactctctgcgagacctctgtggagaaagggtggctggtgtgcgcaacacggacctgtgagaaatggaaggttcttggaacacaaaggtggccacccaaaccttccccgatatggtgagacaccgaaggtgaggggaagggcactcggttttaaggccatggagaggcatttttggatcctttctttggttaaaggtgttaaggtggttttacaggaaggtggccagctgttgagataaggtgtctggctgttggccaaggtctggggaccttgggtggggggttt

SEQ ID NO: 531742 - DNA, 110 bp, Homo sapiens
ccaccttggtctcccaaagtgctgggatgccaggtgtgcaccgccatcctcggccttatcttctcttctctctcagccctctgctcaatatcctcttctgaacctgccta

SEQ ID NO: 531743 - DNA, 212 bp, Homo sapiens
gcgaacgcgcggagccgtgacgttaaggccgcgagcgagcgcgggtggctgcggcggctgcgaccggcggggcggggcgggaccacctggcagtgactgcctttagggcggaaccggctcccgctatcctcagtctgcggtgggatagcggacggtccggcttccggcggccgtttctgtctcatgctggctgtctcgatgagtcgcggccg

SEQ ID NO: 531744 - DNA, 175 bp, Homo sapiens
cacaggctgaccgtttgaggctgttagtgaagtgatttgtggggcttgttctcagctgacccttatgaggtgatagtgtttctgtggatgggattgtgttatgctcttatgcccttggtccttaattatcattgtgacatcatagatatcttctcagacacaggattttctgttg

SEQ ID NO: 531745 - DNA, 100 bp, Homo sapiens
ctacagaaaaggaactgatgtcaatgccctttctatgacccttcccattctagcaagacctcccaccccatcatactctttcacccacagcgcaatggag

SEQ ID NO: 531746 - DNA, 151 bp, Homo sapiens
acctatctatctatcggtctatccctagaacagtatctggtcaccagtacaataaccacctgtatctctcacatgcatgtatgaatgcgcagagctcatgacatgagttacaccttgaaagctgcaggaagagctgatgaggcaaagggga

SEQ ID NO: 531747 - DNA, 271 bp, Homo sapiens
ctactccacttggttgcaccacaagagtatgagccctcggcatgtgcctgccggatggagaccacccattcctttgggatacccagcatttcagtgtctacacaacagccaaccaaaaagttgtgcccggtagttgctccaaaagctaagtacaatccatacaaccaacctggaggtgagggtgacttacttccacccccacctccacctctagatgattccattgtcccttccatctatctctggaaactattctcctccattagctctt

SEQ ID NO: 531748 - DNA, 248 bp, Homo sapiens
caaaaagtagcctgtaatcccagctactcgggaggctgagcaaggagaattgcttgaacctgggaggcagaggtttcagtgagccaagatcatgccattgcactccagcctgggcgacaagagcaaaacttcatctcaaagaaaaaaaaattctatcagagtgaacaataagtaggatgctagcacatacctgtgatctcagctacttgggaggctgaggcaggaagttaatacttgatgagcctaag

SEQ ID NO: 531749 - DNA, 227 bp, Homo sapiens
tgctatgccgacggcggatcgggaattactgctgtagttcagaagaggttggcttccccagagggcagtgtagagctttatgctgaaaagtgtggtcactagaggtctgtgtgccattgccaggcagagtctctgcgtaacaaactcctaggagggctatgctgtgcggatgtgctgctatggtgtgctagcggttcatcatggatgagtgggtgccaaagggtgcg

SEQ ID NO: 531750 - DNA, 109 bp, Homo sapiens
cacttcttcaagaggcgtgtggaggctcatcccattagccaaggtggctacaaaattctccatgatgcagtactgcggcctcgtgctgccgccatcttcaccctgccct

SEQ ID NO: 531751 - DNA, 645 bp, Homo sapiens
  misc_feature (5)..(5): n is a, c, g, or t
  misc_feature (43)..(44): n is a, c, g, or t
  misc_feature (47)..(47): n is a, c, g, or t
  misc_feature (51)..(51): n is a, c, g, or t
  misc_feature (53)..(53): n is a, c, g, or t
  misc_feature (73)..(73): n is a, c, g, or t
  misc_feature (78)..(78): n is a, c, g, or t
  misc_feature (105)..(105): n is a, c, g, or t
  misc_feature (112)..(112): n is a, c, g, or t
  misc_feature (115)..(115): n is a, c, g, or t
  misc_feature (147)..(147): n is a, c, g, or t
  misc_feature (217)..(217): n is a, c, g, or t
  misc_feature (250)..(250): n is a, c, g, or t
  misc_feature (259)..(260): n is a, c, g, or t
  misc_feature (274)..(275): n is a, c, g, or t
  misc_feature (285)..(285): n is a, c, g, or t
  misc_feature (315)..(315): n is a, c, g, or t
  misc_feature (319)..(320): n is a, c, g, or t
  misc_feature (322)..(322): n is a, c, g, or t
  misc_feature (324)..(324): n is a, c, g, or t
  misc_feature (355)..(356): n is a, c, g, or t
  misc_feature (368)..(369): n is a, c, g, or t
  misc_feature (374)..(374): n is a, c, g, or t
  misc_feature (378)..(378): n is a, c, g, or t
  misc_feature (382)..(382): n is a, c, g, or t
  misc_feature (398)..(398): n is a, c, g, or t
  misc_feature (409)..(409): n is a, c, g, or t
  misc_feature (438)..(438): n is a, c, g, or t
  misc_feature (460)..(460): n is a, c, g, or t
  misc_feature (470)..(470): n is a, c, g, or t
  misc_feature (483)..(484): n is a, c, g, or t
  misc_feature (503)..(503): n is a, c, g, or t
  misc_feature (513)..(513): n is a, c, g, or t
  misc_feature (531)..(531): n is a, c, g, or t
  misc_feature (543)..(543): n is a, c, g, or t
  misc_feature (553)..(553): n is a, c, g, or t
  misc_feature (571)..(571): n is a, c, g, or t
  misc_feature (577)..(577): n is a, c, g, or t
  misc_feature (581)..(582): n is a, c, g, or t
  misc_feature (607)..(607): n is a, c, g, or t
ggaantgcgatgtgttgcattttattaaccaccctggagagcnnggntgtngngattaaggcaaacagctaangtganggcacatataaaaggtccacagttggnattcaanggnaaaaaattcagggaaaaatagcagtataatantccctgtgtcaaccagcattctgcagcagccatcctgtcaattacattacataaaatacagataactggngctagacaataaaataatggctgtgttgcgggngtgtaattnnggtatcatcttgtnnagaccttttnttttaaaaaataaaattctgcttaaaaaanatannananaggtgggggggaaaagcgaatgacaaaaagnnagttaaagggannccaanccanaccnccccattgtggcctgngacttgctggngtgaacttcacccaaactagcttggcggnaaatcttctgtcctcttctgcnaccttgaccnaatgcctatgtanngatgttgccacttaatggnatggaactgngcctatggaaatggatgnatgtggaaaacnggtgcaacgngcacgaccacaatctccntgccanatgnntgaatgagtgcctggtgatgatgcngcatgatgtgaaatgctcattgtgaacatctgtcaaaa

SEQ ID NO: 531752 - DNA, 807 bp, Homo sapiens
ctgggccgcacctccggggagcctgagcgcaagagccaagcctgcagcgctgcgatgtgggccactgctgcctgctgctctgcgccggggtcgtggcgtcctgggagttcccctgtctgcgtgtgccggctgagctgtgcgtgaactccttagtggaagtttcgacttcaagtcaatggatgtcgtaagcaccgtgagaccgtacagtacggaggcagtaccagcacgggcgtgcggacgttgtgccgagcaactggaggaagataaacgcgctcacaacaatgggaaccacacatttatgaagtggcactgaaccaattttcagacatgagctgggctgaaataacatcgacaagtatctctggtcagagcctcagaattgctcagccaccaaaagtaactaccgttcgaggtacgtggtccctacccaccttcctgtggactggcgggaaaagaaggaaatttctgtctcacctgtgacaaaatcagggtgccatgcggcagttgctggactttctccagtcactggggccctgtgacgtctgctgatcgccatcgcaaccgtgataagatgctgtccttgtgctggaacagcaagctggtggacatgcgccctaggacgttcaataatcacggctgccaagggggtcttcccaggccaggcttgcgagatatatcctgtacaacaaggggatcatggcgtgaagacacctatccctatcagggcaaggatggttattgcaagttccaacctggaaaggccatcggctttgtccaggatgtagccaacatcacaatctatgacga

SEQ ID NO: 531753 - DNA, 1044 bp, Homo sapiens
tggtctgggcgtgggccgtgcggggtcttcaggggtacctgggctggttacatgcagctctacccctcacgacgcagacattgcagcgcagaaggaccagcagaaagatgcctgaggcggaacgggctgagctggcactgaccctgctggcctgaagctgattccctcctggtgcaggccgggagtggcttggagctggctgccgttgcagacatcctggtcccttggagcaccttcgtggaccagcagcgcttctcacggccccgcaaactggggagagcttgtgccagctgcctcgatacgcaaccgtcggagtactaccagagcacctatgtgtacgtgttcctgggcctcatcctgtactgtgtggtgacgtcccctatgttgctggtgggctctaggcttgtcttatatgcggcgcctgtgacattctctatctgcgcacctttggagtccaagcttgtgctactatggaccgaagaggtgagcacagacgcatcagtatgctctggcttggaggcatctccttcccctttctatccttggccttgagctgagtgcggggctcggacgtacgtatcatgggttgctggtacacgccaccacatggttggatcacatcaggaatcaccacgcattgaccttccaaccacgaagttgacggacatgtggacaggtgaaggaggcttgcaagacttggcgaccgcccaggatgtttaccgggtatgttcctaccgtaggggaaccccttggccaggggccattccctcggaggagcccaaagcttgtaccacaaaaccaccactggacccccaaattggccctatgtacccattggaaaccagggcgtcaatggcagtggctaccaggggcgccagagtatagcggaggccacggccccccagttcagacaatagaccccaggggggagaggaggaatcccccggaccgtatatgggagacaaatacgagcgggtggaccacagtgagggtgtgaccatctcgagggacaaggagtattcgacacaaaacagtgaataatag

SEQ ID NO: 531754 - DNA, 309 bp, Homo sapiens
agtagggtctcgctcggtgtttctactgagcggggtgccccttgtgcccagtgtggacccagcaccactctgaccgaaaacgaagtggtccggccggaagatctggccgaagggccccgagcgcacggagtccatggtggcgggctccagatccacgagcacggtgcggggcacgtacttgccgccagtgttgggctcattgtagtacacgttgatgcgttccagctgcaggtctgctgtccccgtggtaggtgcccgtgggggtcgatgccggtgctcatcgctgatcacctcccaaaaacgacattg

SEQ ID NO: 531755 - DNA, 279 bp, Homo sapiens
agagtaagaactgtcgatcatgtaataggagaccactactgtaactatatagagtgtataagaaccaacatatcatgctaatcctctgggtaacatctacattatcacactaatcattcagctgtaactatgcaaatcacagtctaagatggtagtcagaaaagactaaaatagggagaagaggcaggagtatcaaaggatagtcagtctgacactgctagacattatatcaagatacatatagcagtgatgcactggaactggtatatacaacttcat

SEQ ID NO: 531756 - DNA, 580 bp, Homo sapiens
  misc_feature (365)..(365): n is a, c, g, or t
  misc_feature (461)..(461): n is a, c, g, or t
gacagccccccttcagcccagcccagccaggtctcctacaccgccaccatgccattcggtaacacccacaacaagttcaagctgaattacaagcctgaggaggagtaccccgacctcagcaaacataacaaccacatggccaaggtactgacccttgaactctacaagaagctgcgggacaaggagactccatctggcttcactgtagacgatgtcatccagacaggagtggacaacccaggtcaccccttcatcatgaccgtgggctgcgtggctggtgatgaggagtcctacgaagttttcaaggaactctttgaccccatcatctcggatcgccacgggggctacaaacccactgacaagcncaagactgacctcaaccatgaaaacctcaagggtggagacgaacctggaccccaactacgtgctcagcagccgggtccgcactgggccgcagcatnaagggctaacacgtttggccccaaaattgctcccgtggcgagcgccggggcggtggaagaaactctcttgtggaagcttctcaaaaaggctgacggggggagtttcaaaagggaaattt

SEQ ID NO: 531757 - DNA, 890 bp, Homo sapiens
  misc_feature (65)..(65): n is a, c, g, or t
  misc_feature (145)..(145): n is a, c, g, or t
  misc_feature (172)..(172): n is a, c, g, or t
ggatggtacctacccggcaggtaggttagatgtgggtggtgcatgttaatttcccttagaagttncaagccctgtttcctgcgtaaaggtggtatgtcagttcagagatgtgtataatgagcatggcttgttaagatcaggaggnccacttggatttatagtatagcccttnctccactcccaccagacttgctcatttttcgagtttttaactagactacactctattgagtttaattttgtcctctaggatttatttctgtgtccaaaaaaaaaaaaaagagaaaagaaaaatttagggagaaattttgggggtaaaggctgaggaatggctggaggggttagtggtaccaatttctctttggacccttgggagctaaggatgctgattctagaagaaaagtggctagtctcaagcccggttaaagcccctcggtttctagcccggtaagttcatagcatcagtgaactgggagccacaacagcaaattcctatcaagttggtgtaccatacagttggtggctgaaggcgaatttctggagccattaactcagttataaagcactgagtcctatcttaaggatcatcttaaagagcaaatttctgtcagtgtgcttctgaacctaaaatattacgggagggaggtgtgggcaggacggcggattgatcatgtggccggcaagaaaatctacttccaataatgggtccgggctatacccctattatgtcgtttcccgaagcacattgcctggggtgcactacccaaaaggtgtgacaggtaataggcatggtttgagcagggtcgacatcgcctgccgaaatccaaaggctccaaagagggatttcagcagaccgttccaattgcggcacgactatcccagaaataaac

SEQ ID NO: 531758 - DNA, 684 bp, Homo sapiens
actgtgacggggactcctcgatgtggaaggttcgggtgagtgagattgtagaaggatgccgtagcacacgggcaccacaggtgcacgtgcggcagatcacgttgtagggcatgctgaagtccggtgtcggcaggttcaccagcagcggctccgtgtagagccgcacaaagtagttagagccatcagagactgggaacaggctgttgaagaggggactctcttcccagtccactggcttggctgctaccatgctgggcacaagggcgctgaggaccgatggggctgacatagaatccatggttaggatctggtgtgtactcggtccacttcagcagctgcccgctcaaactggatggaaaccttggtgactgagttggccggcagctgaatcagcatctccaggaggtggggttgcagccggtcctgggcaggctggtagtggatgtcacttggtatagttctccttgcccttggaggttatggtgagggtgtgcacatacggccgcagataccagggtacggtgtccagcagcagcaccgggaaggcccggtatgggtaggtgttgtacagcagtgtgctcagatccccttctgcagccatagcactccgtaccggggacctctaagtgactgcggcttaagctggcctggcgtgttaacttgggggaaaaaggggcggggaac

SEQ ID NO: 531759 - DNA, 101 bp, Homo sapiens
atgacgagccggtccggaagaagaggcaggcggccctagaggtcaccgctcgctactgtggccgggagctggagcagtatggccagtgtgtggcggccaag

SEQ ID NO: 531760 - DNA, 953 bp, Homo sapiens
gagtgttgaagtattgccagcattgtgaatagataacctgtgtgtagttcctcaccctgttaatgcgtgcggtaaatgtagagttgggatgtgtaactggaagcgaggtgggagggacgatctgtcagatgaatgtctctaatgttcgctaggagttgggtgggggtcgagaatattgcttgtcgaggttcattggttctaccctctcagggatcccggtcgttacgatgtaccttatcagtgcataattcgatctgctaggtcgatatatcagcatataagcaaagtaaaatctccacatatgcgagggaattaattccaagaagaaaacagcagcgattatgacagttcttactaaagaaaacttatgaatgacaagtatcttcactgtctaggaaggatcctagtggtgaaaagcagaagttgtaccatctcggaagcaaaatcggcatgggtatgttaaattccatttgtgtctcgcacccacgctacccaccatgtaactcagcactctgaataatttgtttgaaagctcgcattagaacttggtttgcttttattgacctggtaaagctatattcgggattggttcgaaaagaacgggtacaagaagacgacgcggtcggtgggcatgaaaccatggtggtcctcaactaaggtattattcgcgaaatcgcactagtcctagacgattctaaattcgtggcccaaacttggcgggttgtgaatgaacgcgatgtggttacgcgactaggaagcttcgtttaggacctgtagaatccactctcaaggtggcctgggagactgtcttttaactcccgtttgaggctttagtgtgtacctccgattcgaaggcatgaaaggacgtaacaagtatcagagcggcgccgggaggaatccacattcaggtccctcttgaggagaaactttcgaaagcaaattggggtagggca

SEQ ID NO: 531761 - DNA, 393 bp, Homo sapiens
  misc_feature (332)..(332): n is a, c, g, or t
tgtgcgcgctctatgaggatccccgctgagatgacagtcggcccagttagaatggcgatcattcaaaagtcaggaaataacaggtgctggagaggatgtggagaaataggaacacttttacactgttggtgggacagtaaactagttcaaccattgtggaagatagtgtggcaattcctcaaggatctagaactagaaatgccatttgacccagccatcccattactgggtatacgcccaaaggattataaatcatgctgctataaaggcacatgcacacttgtatttattgcagcactattcacaatagcaaagacttggaaccaacccanaaatgtccatcgatgatagactggattaagaaaatgtggcacatatacaccatggaatact

SEQ ID NO: 531762 - DNA, 660 bp, Homo sapiens
gcccctgcgagtcaagagcacaccagcctcgtcgccaaaaaaggtttttccgggacagaaaaggtggcccgcaaaaagggtgtttccgttgggttccgcagcaggtgcagaaactcttgcgagaaagagcccttttcggggaagtaataaatgctgttgtggactggagtctattcttgtggagcattctttcccccaggccgcgcccgcagcgcctggagggcctccccgcttggcggtgcagtacgcccccgcaatgggccgacacgcgggactcccgcctcgtcaacatcatcgtgggagccttacgattgtttcttgggtcttccatatcatgtctccagaccgctcttccgatgtgtcaacaaagtctttccgcagcagtgcctccgcggagtagatcaccacgcctttgttggggtcctattgtggggacaatcaacattcggacacgtcttcgtcgctgtcatgaacttcaaacaaccctcattaggcccggcggtggatattcaggctgtttatgtgagatcgggccgtttcccgcacgctgcggacgagattatcgtctcacccctgcttgccgcacagttaagagaataattctcgcactggttctgaccccctcaaaaatggtgggttcaacgccccatcaatgaacaa

SEQ ID NO: 531763 - DNA, 368 bp, Homo sapiens
cgcatgatttatcgtcctttgggtctatacccagtaatgggactgctgggtcaaatggtatttcttggttctggatccttgaggaatcgccacactgtcttcctgcagtggttgaactaatttacactcccaccaacagtgtaaaagcatcctatttctccacatcctctcccacatctgttgtttccattgtctttttaattgcatcaccattctcaatttggtgtgcacattggtatctcacttgtagtatatgcatttgccatttctcttgcaatgcaccagtgcatgcagctcttcttatcatcatgtcttatttggcttgactcaaatgtcttcatcttgcagcaactgtcttgttcaatcat

SEQ ID NO: 531764 - DNA, 1216 bp, Homo sapiens
  misc_feature (944)..(944): n is a, c, g, or t
gccggcgagaggcggcggcggaagcggcggtgattgtacgggtaccgagggaagctagtgccagaggactgggggtgctccacacagctcatgcatgcagtagtcattgaatgacatgtggtgcccgttgttgcttcagaggtttcaatcctagggatcgagcgagcggcagatatggcgcggggcgaggcaacccagatcttggactcttgacccagcgtgcctccaggatgcgttcccagcgaaggaaagcgtgaccggagtgtctcgaagacgcagtcgtgggtactaaatctggaacagatagatcaatggatgtctgcagaagggactgcattgccagcctgttgagtaccatcaggaacatcgctcgcgccgaagtaggatcgttcttgtcgctgacgctggtgagcctagagcaatgttttctccttgacggtgcacaacttctacaccttgggggagcgcgggtgtttgttgctggccgcgtattgtgcctatcgttttagtcgccaaggctagacatcgtggggttgcctaactacaaaggggcgccactagtgtggcgagcccacaagggttggccctggaagaccttgggaattgctaaggaaaaagctccatttgcgagtagagagagctttgcggaaccggagttttcgaggaaacgttttgcccttaccactaggtgcgcaagtgtcgggagaccgtttgttttgcggatgcgggcctttgtggcacttctcggaaataggaactccacgatgcgattgcggtttagggggcaaccgtgtctctttcccgttcattctcataagctttgttagggggaacggctccgctatctgggtgcgaccagaggaactcctgtttgtacccccgaattccttttgttgtttgtgcctgtggggcagttgtcctacagcgctggcacccttacaacnttctaggcctaggttccttgtggacacgagaaaccacgaaattggtgggcgttagaaggagccctcgcccacaaggtattagccaatattgggggaccctatgttcggtttgtattaacccccgtctcgacgtacaacactttgactttcgggccgctctatatacctttggggagacaagtgagcgggttgggcggcgaattataggggcgggaaccatactttgagaggaaaattttatacaatttagcgttgtatataggtaacaccca

SEQ ID NO: 531765 - DNA, 183 bp, Homo sapiens
ccaaaccgggggccaacccccctttttccccggttttttgggaaaaaccccccccttcccccctaatttttcccccaaaaagccttttttttggggggggggggaaccttttccaaaatacccaaaaaaaaggttttttttttttttttccccttttttttccccccaaaaccccaaagggga

SEQ ID NO: 531766 - DNA, 111 bp, Homo sapiens
tctgaagacacggccgtgtattactgtgcgagagatgataatccgcccggagtagatggtaggctatggttcggggagtggcactacattatggacgtctggggccaaggg

SEQ ID NO: 531767 - DNA, 135 bp, Homo sapiens
  misc_feature (38)..(38): n is a, c, g, or t
  misc_feature (72)..(72): n is a, c, g, or t
gcggatgaccggctgcagcgggggggcccgggctgagntggcatgggactggggaacgcggtggcttccganggtttcggcagtggcatccggggccggggtcgcgcgttggacggggccggggcgaggcgcgat

SEQ ID NO: 531768 - DNA, 129 bp, Homo sapiens
tgcaattgtaaggggtaatacaacctgcgagtgatacgtacaaggggtttcttatcccctattatcccccaaaaggccggacccccttttcccgcccctaaatgggtggcccccgccctcctctgggaa

SEQ ID NO: 531769 - DNA, 189 bp, Homo sapiens
  misc_feature (133)..(133): n is a, c, g, or t
  misc_feature (178)..(178): n is a, c, g, or t
gtagatagagaatttaaagcagctattataaataaatatgttggaggatttaaagtaagatgaatagatgtaagtaaagtaagatgaccttaggcagataaattgcaacaattaaaggaaccaaatggaattnctagaactgaaaaataaaatataccaaaaagaaaaattaactggnatgggccttaa

SEQ ID NO: 531770 - DNA, 415 bp, Homo sapiens
aagcgcactgcaacaaagaacttccctgagatcggggtaattaataaaagcaaagaggtttaattgactcacagtgtccacatggctggggaggcctcaggaaacttacagtggtggcgtgaaggctaagggaggtatgtcttacatgacagcaggcaagagagagcatgtgaaaaaggaactgtcgaatgcttataaaactgtcagatcttggtgtgaactctctcactattacaagacagcatgggaggaaccaccctcatgatccaatcacctcccaccaagtccttccttcgacacatggggattatggggattacaatttgagatgagatttggttggggacacagagtcaaactatatcaaagaaagtgatgcaacaggtaatatactacctgttgcagtgtgcttccg

SEQ ID NO: 531771 - DNA, 1173 bp, Homo sapiens
catttgctgtcactcgtcttctttccgtttttctctgttgctgcttctatctatctcctctatgtgctctctgtctcgttgcgtgcctctttttgtgcacgcgctttttctgctctccatatttttgtccttttagcttgttccccccccggtgttttctcggttttccggtccaccacagggttttgcccccttttttccccgggggtaccaaggtttatcccggcgccatttcctcgggtgcttggatctcccgctcatttgggcgattttccgccgagcatcagtcctcgtggagccctttcagatcccggtcccccaagaggagggccccttcgacaccaggtcccggaccacttcctgtaacctttgattaaatctcctttgaccgcgttcaaggcgctcccctcaacgctcccggttctgtcctcccaccatagccgagttgaatctttctaagcgcccagtctgccaaggagaaaaagtcctctttctaaggatatccggcccatctcaggctgccggggataaaccacgggagatgaggttacaggagccgacactttcttctggaggcccccttctcccagataccccaagcacttctgaggagccttcgaagcccctggcccagatgccacccttcgcgcacctggtttctgcacttcccgggccttccacgcacgcttttctgagagctcgaggtgtcctctcgggaggcgcaaagcccacggcttctctcacaaaggccccctcccacgttctcgttggtggtgagggcggcggttcacccccgctgtcctaagccccgtgcccacaaacctagtgtcctccacactttccacgcacacacttcccacgaatgggctcacaacttctgccgaagtggtgccgggtaatcacgttctgggacaccaccccaggtcacgttcgagcccatggtttctgggtccctgaggtccacttcccaaaagagcccctcgtgggtaagaagtccacccctccacactggctccacacacataatggctcacatctcacgaaaggaaggagaagtgcttgcttcacggagaggaggcacgcctatacacaaagaggtaattctagaaagaagcacgaaagacagagaatggaaaagataagggaccagaaacccaccaataccgattaaga

SEQ ID NO: 531772 - DNA, 378 bp, Homo sapiens
ctagtgcatctattagcatgtagtaacatcgtgaagtacactgccacacagccttattcgtcagtatcgtgtgttagcagtgggccgattggtcctctgtaacaccaggtggaattcggtcttccagcaggggatgaagaacaagatcttgatattaggcctctttgaagagacagtcctggctgctttccaattgctactgccctggaatgggtgttgctcttaggatgtatcccctcaaacctacctggtggttctgtgccttcccctactctcttctcatcttcgtatatgacgaagtccgaacactcatcatcaggcgaccgccctggcggctatgggttggagaaggaaacctactataagccccctgtccta

SEQ ID NO: 531773 - DNA, 609 bp, Homo sapiens
gtgggaggatcgtttgagctgttcgagaccagcctggccaacatggtgagaccccatctctatctaaaaattgtttaaaaattggctgagcatggttggtgcatgcctgtggtcccagctactcgggaggctggggtggggggatcgcttgaactcgggaggttgaggctgcagtgggttgtggttgcaccacttgcactccaccctggtctcaaaaagagagacacagaaaagaaacttggattaaacccaaaattattcctacagacatatcacaagctgatggtatcctgaagaacagttctagaacaatatcagcttagacatcaaagatcttagcctctggggccaaacgataagccaactggtcaacgttcaggcacggactgttgatatcagcagatgaagcggcggagtccagagaggagtgttcctgtcgacctgcatggcatcctgatcgactggcaggtagggataataaccttcaatttctgccatatggagagaacagctacaagtgattataatgggggatgtcctgttaatgaggagcattctgctgatgatatcatgggagttacgtgtcattcaaaagtcatggcgaaagat

SEQ ID NO: 531774 - DNA, 614 bp, Homo sapiens
  misc_feature (15)..(15): n is a, c, g, or t
  misc_feature (66)..(66): n is a, c, g, or t
  misc_feature (75)..(76): n is a, c, g, or t
  misc_feature (94)..(94): n is a, c, g, or t
  misc_feature (104)..(105): n is a, c, g, or t
  misc_feature (114)..(115): n is a, c, g, or t
  misc_feature (130)..(130): n is a, c, g, or t
  misc_feature (142)..(142): n is a, c, g, or t
  misc_feature (149)..(149): n is a, c, g, or t
  misc_feature (163)..(163): n is a, c, g, or t
  misc_feature (168)..(168): n is a, c, g, or t
  misc_feature (170)..(170): n is a, c, g, or t
  misc_feature (198)..(198): n is a, c, g, or t
  misc_feature (203)..(203): n is a, c, g, or t
  misc_feature (208)..(208): n is a, c, g, or t
  misc_feature (268)..(268): n is a, c, g, or t
  misc_feature (271)..(271): n is a, c, g, or t
  misc_feature (275)..(275): n is a, c, g, or t
  misc_feature (286)..(286): n is a, c, g, or t
  misc_feature (294)..(294): n is a, c, g, or t
  misc_feature (302)..(302): n is a, c, g, or t
  misc_feature (306)..(306): n is a, c, g, or t
  misc_feature (363)..(364): n is a, c, g, or t
  misc_feature (378)..(378): n is a, c, g, or t
  misc_feature (389)..(389): n is a, c, g, or t
  misc_feature (393)..(393): n is a, c, g, or t
  misc_feature (398)..(399): n is a, c, g, or t
  misc_feature (407)..(407): n is a, c, g, or t
  misc_feature (414)..(414): n is a, c, g, or t
  misc_feature (419)..(420): n is a, c, g, or t
  misc_feature (450)..(450): n is a, c, g, or t
  misc_feature (475)..(475): n is a, c, g, or t
  misc_feature (482)..(483): n is a, c, g, or t
  misc_feature (486)..(486): n is a, c, g, or t
  misc_feature (489)..(489): n is a, c, g, or t
  misc_feature (492)..(492): n is a, c, g, or t
  misc_feature (506)..(506): n is a, c, g, or t
  misc_feature (511)..(511): n is a, c, g, or t
  misc_feature (553)..(553): n is a, c, g, or t
  misc_feature (606)..(606): n is a, c, g, or t
ttgttacaacttttnctcccacccatatcttctgctgtgtagtatctggctcttccttgttgtccncatcctttnncttatccttccttctgcntcatcctgtnnttgtagctnngaagtttcttgcttnttctctagggtnatttganggcctctgcatggngattnanggcctgagaaagggctgtgactgctccnatcanacggnccagctcccaggtttcaatctggctttggaattgctgcaggaagtggtcagggtgtcagnggncctnttggaccttcnagtacctncttagtgncccntgttcctccaaaggggggcccctggccaccagggctgctagctatggcctctgggtnncctccccctgggcngggccagggcncttntccanntcgccagnggctgcnccttnncgtttctttggggtgtttttttttgtggcntgtttctgtttggtttgggttcttnccccccnngcnccnccngcgccctcctggcncggcnctcacgcagctcttcctccttggcccgggctcgctccctgangagccgctgctcctcctcctgctgtcgccagctctggctggagccctcagcangtgggggt

SEQ ID NO: 531775 - DNA, 244 bp, Homo sapiens
  misc_feature (29)..(29): n is a, c, g, or t
  misc_feature (128)..(128): n is a, c, g, or t
  misc_feature (186)..(186): n is a, c, g, or t
aaaaggcccaaggtggagtattcagtagnggcgctgaagacccacatcagcaagtgtacgctgggcaagttcactgtgcccatgctgaaagaggcctgccgggcttacgggctgatgatttgtctgangaagcaggagctgctggtagccctcaccaagcacttccaggacttatcagaggccgcncgtccagctgccctttcgcagttttgccaggctgcctggtctttttctcagccagtta

SEQ ID NO: 531776 - DNA, 569 bp, Homo sapiens
  misc_feature (332)..(332): n is a, c, g, or t
  misc_feature (443)..(443): n is a, c, g, or t
  misc_feature (489)..(489): n is a, c, g, or t
  misc_feature (543)..(543): n is a, c, g, or t
agtctctaaaaatcttgccataggatttggtctatacttttaaaaaccactcttttttcatgataaagcccttcaacttgctctaaaaggcaacataggaagagagagacgatgcaggccagtcctctccaaataaggcaaaacccagctttatttttagtaatgactttcccaactgcaagagggcacaagtccatgatccagcattacagaaacccaccaacttccagaaaagtttcaacaactcataaagactcacatgtgcatgcagacacaaagacccattttagggaagaggccccaagacatagtctgaagccccagctggggcnctttctccatgacaactcttcagccagcctgggacagtgcaacccttggagtaaccccagctttgcttaactggggacaacccacctctcctcatcctcctgggagaaatngcagttttgtatttttcctgatgttttgatggggcccgacatcagngggtcctcggaaagttcatatttcctggggaaattttgaccaaaccgttaaggnacggaaaaggctttttgggttaactt

SEQ ID NO: 531777 - DNA, 315 bp, Homo sapiens
cccccgggcccaaaatttgggcccgggggaaaaagccccccaaaggggtcccttttcccggggttttagggccccaggggttttaaggggtttctcttttttccctttgccttgggccggggggggcccccccccccccccccctttttgggtttcctggcccccccgttaaaaggggggggtttttttttcccttcttaaagggggggggggggttttaaagccccccggctgggggcccccgggccccaggttttaaaaggtcgtttttttaaccccttcccgggaaaaacccttggggttggggttttttga

SEQ ID NO: 531778 - DNA, 759 bp, Homo sapiens
acaaaatgtcaacatcagcagagatgcccagatctatttatctctaagtatattgaagtgatgctgtttatatgtgtcattttaaaattgtgtgtcagtaaagctacctgtaaaatttcagtccaaaaaaataaagctctcagggagacatgaataaaatcaatgaacattagaaaataaaatatagatgcttaccattaacctaccaactcttaatatccttaaattatgtgatatataaagaggactgttacttttttactttttttttttttttttttgggcttggcttaattatattggtagtggggggcaaacgtttctctctttccttctctatggactccgtgtgggggtggggttcccgtggttggagagagtagttggctccgtgtgcgcctaaaacattatttactcactaaatggagttttccagtcaattaacaaatatttattaagtccctactatgtcccaggcatagtagggctacaatgggtaagcaagacagagtcccgtgcccccaaagagcttatatctaagggggatataaggggatgattagaatcccattggtgtgccctggtacaggaatcatactatttaacaaataatcggtataacactataatggcttagcacagatgggcgagttatctggtgctatgtgaaagcggtgaaatagtgctctaagagttgtcaagagctgtggtttcacatctttcctcatggcaaattcagggactttctaccccctattg

SEQ ID NO: 531779 - DNA, 844 bp, Homo sapiens
  misc_feature (485)..(485): n is a, c, g, or t
  misc_feature (518)..(518): n is a, c, g, or t
gggtgatggcacctgtgaaaaggaggaacgtcatcccccatgatattggggacccagatgatgaaccatggctccgcgtcaatgcatatttaatccatgatactgctgattggaaggacctgaacctgaagtttgtgctgcaggtttatcgggactattacctcacgggtgatcaaaacttcctgaaggacatgtggcctgtgtgtctagctgtgatggaatctgacattggaaagtttggacaaggaaccatgatgggatctctattgacaactagtggagcgctatcgcaagacacgagactctatagatgggatggggtagaccacagggcccccagtggcttaactggtggcagggtctgtggcttggcagcctgtggcttgtgactggtccagaatgcgctgctctgtgtggggcacaggatcatccaggcataacgttttctttctatcctcagtccggggccaagcaagcctatgagnagactgctagtggacatggcccgctattacaanctatgacacgcagctctcggccctcagtctcgtaagtgtatatgtcgttgaccagtgtgcttggaacagtggttacctgaaggcctgtggccataggagcaaggagacactgaggtgttttcctacccaacatgtggtccgtgctctccaaactatctttgagctgaacgtccaggcctttgcaggaggggccatgggggctgtgaatgggatgcagcccatggtgtccctgataaatccagtgtgcagtctgatgaagtctgggtgggtagtggtctacgggctggcagttaccatgatccaagaggtaatgcactccttttccc

SEQ ID NO: 531780 - DNA, 124 bp, Homo sapiens
gcaccatacttattattctgcgcttgagctgtaagtcctaggcacagctctatacctccttattcgagccgatctgggccagcctggcgaccttctaggtaacgaccacatctacaacgttatc

SEQ ID NO: 531781 - DNA, 304 bp, Homo sapiens
agagaacttccttattactgccttaatttcgttatttacccagtagtcattcaggagcaggttgtacagtattccatgtatttgtagcagtattgagatgagtttcttaatacctgagttctatatttgattgcagatgtggtctgacgagacgtgttatgactttccagttcgtttcacactctagctgaggcagtttttactattcaacatattctggtgaattttcagaataagtacaatagtggtgctgagcaagaatgtatattctagtcaactttgggcgtggagcagtatctgtaga

SEQ ID NO: 531782 - DNA, 114 bp, Homo sapiens
ggggggagggggttgaaagttcaatcgacgtaaatcactaaacgaagattctgtacatttttgtttttattttgttttatttcttgtcgatacttttcacttttgagtggaaaa

SEQ ID NO: 531783 - DNA, 321 bp, Homo sapiens
cgttgctgtccagtgcttcttacccatttaagagttttgagaactaggctttacgatcggtttcgtcgcccccaaagatctctatagtcattcgttcttaccggataaaactgcgtggcgggggtgcgttcgtggatctgcgaaaaaccccggctatcctgagggaaacttcggagggaaccagctactagatggttcgattagtctttcgcccctatacccaggtcggacgaccgatttgcacgtcaggaccgctacggacctccaccagagtttcctctggcttcgccctgcccaggcatagttcaccatctttcgggt

SEQ ID NO: 531784 - DNA, 158 bp, Homo sapiens
cacgagatcaaggagcattgaggagcccaagaggaaaggatgtggctcaggctgggagggactccagttagaatggtggggaagaaccagtaccacatacccagtaggtattaaggtgtccagcagaggatgaaggtcagcaagttaagcagggccag

SEQ ID NO: 531785 - DNA, 934 bp, Homo sapiens
gtccacggcactgcagggggggactgctgattatagacactcatgtgctaaacacaagcgcttttctaggctttgggatttaaagctacacttctggaatttgtggaagatctggccatcttggaaaattaggtagaaggtgacataaggactggactaaaccactgatcatcccaacagtgcccgtggcttatctgttttcttagtttttgctttgtttttttagagatgaggacgtgctgtgtccctcagtgttggagtgcaatggtacaatcatagcttattgcagccttgaactcctgggctcaagcgatcttcccacctcagcctcccgagtagctgggactaggccctgctaatttatttatcttttgttatagagacaagggtcacgctgtactgcccaggctgggtgtaggttttttctgaagagcatttgggagtttgtttaatgcttggttacttttcctatgcacccttctaccactagggggagatgattaatcactaattgaagggatatgttccgtttttatgtaatagggttaattgataagtagttagatagtatcaataaaagaaagagtttaatccgcacgtaaggcacggccgcgccacgagatggcgtacttattcaaatcggtctctctgaaggctccagaggtaaggggtaaacacggcagaaggtacttgcataatcattcccactactttaggtacactgaaagatgggaagaaatgtgtagttcgaatcgcaaaaataatcgaggtggaaggcatgcaccgctgattgtaaagaaagggacagcaccagaagacggaagccacctagaacaaaagcaaaccctcacaccgcagggacaataagcggaacaaccaccaagacctcaaaagagtgtgaaggacaaaagcgaaaacaaatacacacactgac

SEQ ID NO: 531786 - DNA, 886 bp, Homo sapiens
cccccgagtgcggtctttaggttgcatattccttatgagaatctaattcctgatgatttgtggtggaacagtttcatcccaagaccattaccatcctgcgccccatcccttgccgcctgtggaaaaattgtcttccacaaagccggtccctggtgccaaaaatgttggggactgctgtgcttaagaatctgccatgaatctgcagcctctattatatagctccctatagactttgcttcctaccgtcttacgttctgccttataggcatttgactttgcaacccttgtttttgttagtatgctacgctggtgacattgaccaaattgaccacacattaattataagcttagttggtgatgacctcaacggaataacgtgacataagtattgtgacaatacttcttgcatgtatctgcaggtggaattgtaaacctggtggtccgagatggtctaattccatcttcctatgtatctccttatattaatagtggtaacatttgtggtggtgattcagcatttcaatgcctcttctcatggcaacaacaaacgttttccttctgaatcaacattaacctagatgttactgcggatcaaaattagactctacattttcaaccacagaaataccgggcagtaaaaatttttcttaatattgattgcctacataggttgtgtaattagcatatgtttacagttctatgatttctgcgtggctgctacagagctggagggggtaaagcaacagtattttctcagttgtgcgagcagcattacattataataaataggtaatattaaactgggctgatgagagttgcaaaagtctacttatgtttactattcgtacgacataacccccggggtaacggctcgattctatatgta

SEQ ID NO: 531787 - DNA, 957 bp, Homo sapiens
  misc_feature (957)..(957): n is a, c, g, or t
cagacgcagatcttcaccacctactccgacaccaacccggggtgctgatccaggtgtacgagggctgagagggccatgacgaaagacaacaatctgttggggcgcttcgagctgatgcggcatccctccgggcccccagggcgtgccccatatcgaggtgaccttcgacatcgatgccaacggcatcctgaacgtcacggccacggacaacagcaccgggaaggccaacaggagatcaccatcatccaactggacaagggccggcctgagcaaggaggagatcgagcgcatggtgcaggagggcgggataagatacaaacgcggaagaggggaggtgcacgcgcgagagggtgtcagccaataacgccctggagatcctacgccttcaagcaatgaatgagcgccgtgcgcattgatgagggcgctcaggggcacatatcatcgaggcgtgccacaaacgaagtaagtgtgctgtgacaagtgtcaaggaggtcactctcgtggctggacgccaacatccgtttgtgtcggatgaatggacgatggtttgagcacaaagaggaaggaagctggtaccgctaggtgtgtaaccccatcatcagcggactgtacccgaggtgccggtggtgtccctggggcctgggggcttcggggctctgggctccccggggataggtctgggggtcacggccccaccattgaggaggtagattagggggcctttccaggattgctgtgtctgtttgggcgcttcggactttgcttttcctagtatttctgtttgtcagttctcacttctgggttgcactgtttgagccttcttggtgaagtctgactgttttcccgcgtctacctgggagatgaatttctgccccttcactttctctttatccttatccggccttttagtgccgttcacgctacttacaaaaaaaggggggatcccggggctccctn

SEQ ID NO: 531788 - DNA, 105 bp, Homo sapiens
ggacatcgtacgccggttgcgcgatagccgcccgaacgcacacgcgcccggtggcaataaaaaaaggcccgcgaagactgcggggcctttcggctacgaagcccg

SEQ ID NO: 531789 - DNA, 705 bp, Homo sapiens
gccacactcaactacacactgcgggacctaccgcaagttcttccaggacatcggtctttgccacatggctggctcatgcgggaggacacagaagggctgggtggaagccccgatgccacctgggcgtgctgtgtgcactgcctctatggatactggtcgtaccccacagccagagctccgtatcgtactatgaagagcttccctgcagccgtggacccttagaacattctgactattgcgtggactggccggactgtggtacatgttgaacctctggagcacgagatgtccctggcgagtagctccaagggcactggctacgcatgcgctgccaggaagccaccaaagtcgtatagcctgcgagtgaggcctgcgcaacgcgcacggccgacgcgaacagtcgcaggcactagctaggaccaagctgccagacaagccttgggcccttattctagacagaacgatcgtgcctcgctttgtaggcccactagactcccttggtgctcgaccacgggacctaccttggatggcccttccggccccggagggaaccatggcatggttttggacctatccttggaggaccttggtcactcgggcgccacaccgacagactcttatggcaacaggttctgtcgacacctcgaaccaattcccaaagggccgcccggcagtttccttgggaaccgatggttcacagacatt

SEQ ID NO: 531790 - DNA, 382 bp, Homo sapiens
  misc_feature (52)..(52): n is a, c, g, or t
  misc_feature (346)..(346): n is a, c, g, or t
  misc_feature (357)..(357): n is a, c, g, or t
catgtttttaccactgcaagtggatgggcagggtttttaaaagatttgtttncctgtttgtaaacacttttttattgggagacagagtttcattcttgttgccccatactggagtgcaatggcatgatctcagctcactgaagcctctgcctccccaggttcaagtgattctcctgcctcagcctcccaagtagctgggattataggctgccaccaccgtccctgctaatttttatattttgagtagagagtgggttttgtcttgttggccaggctggtcttgaactcctgacctcagatgatttatctcctcagcctcccaagtctgtaaacattttatgtgagnaaaaaagtagnaaataatcctaaaaactccactttt

SEQ ID NO: 531791 - DNA, 323 bp, Homo sapiens
tctggccaatgttgactctacaaggtgttgaaagcgttccacagggatgctggcccatgttgactctacaaggtgttgaatgtgtccacaggatactggcccagttgactctacatggtgttgaatgtgtccacagggatgctggcctatgttgactctacaaggtgtcgaatgtgatgcacagggatgctggcccatgttgactctacaaggtgtcgaaagcatccgacagggatgctggcccatgttaactctacaagggtgtagaaagtggcagcccatgttgactctacaaggagtccaaaggtgtaccacagggatcc

SEQ ID NO: 531792 - DNA, 872 bp, Homo sapiens
atgcccccgggcgtcttcccctccatcgtgtggcgccccatgtgcaccaggtcgtgatggtgggcatgggtcagaaggattcctatgtgggcgacgaggccagagcatgagaggcatcctcaccctgaggtaccccatcgagcacggatctgtcaccaacgtgggacgagcatgcgccgtaaaatctgtgcatccacaccttctacaatgagctgcgtgtggctcccgaggagcaccccgtgcttgctgaccgaggcccccctgaaccccaaggcaaccgcgagaagatgacccagatcatgtctgggaccttcaacaccccagccagtgtacgttgctatccaggctgtgctatccctgtacgcctctggccgttgaccacctggcgatcggtgatggactccgggtgacgggggtcacccatcattgtgcccatctacgggggggtatgccctccccctatgccatcctgcgtcttggacctggcttggccggggtgaccttgccttgactagcctcgatgaagatccttcaccggagcgcggtaccagttcggccacccaggggcgacgcgggaatcgggggcgtgaccttaggagacagctgtgctacgtctgcccctggactttcgcagcaagagatgggcaggggtgccttccaggctcctccctggggaagaccttggagggtgcctgcggccaggtcattcaccattgggacagcggcggtccggtgccctgtggggtcttccagaccgtccttcctggggtggggccctggggtccacgagaagtcttcactcctcatggagggtgcggggggctcgcgagaacgttggcccctgtttttgtgcgcccacgttccgggttcgg

SEQ ID NO: 531793 - DNA, 237 bp, Homo sapiens
tatatggaccccttccccactgtgagggtgggagcagcggaacagcgaatgccagacaaggctcgctgctgctggaaggcggggtggacttccttcctctgtccggaaggcacaggtgtcaccagttccagccaaagctcctcacaggcgctgtgattttttgtacaagtcttgtacttttcgaatcaacaacttgtatcaatttattaaaaatgctcattgtgggagaaggggtgt

SEQ ID NO: 531794 - DNA, 528 bp, Homo sapiens
  misc_feature (366)..(366): n is a, c, g, or t
tctagaggaccccacgcccatgtcacaacagaatctctgtatatcatacttctgttaggtaacagggtaggtatgttaggtaacagggtaggtatggaacactcagagaattctggaggtggacatgggcacctgagtgggtgccttcagagttggtgtgaaagcgagggaaccaggctcatccaccaaggagccctgggctgcaaggcctgtcaggtcccagaggtggtggaggtcaggccttgtgggccgccatgtttggaaactgggagctgaagctactgcagggcattgagactatggatctttgctcttagtgcagaaacaaggttaggggaagagagggatccttgccctggaggtctnggggctatgtaaaacctgagaactaatgtctcatctggaggacccaggcctagccaaataacggggcggtggtagtggccacattatcaggcgttatctcttgtaaagaggagagagaatttcctgattattgggtactgcaccgagacaagaaatggtaac

SEQ ID NO: 531795 - DNA, 482 bp, Homo sapiens
tccagcaggaaacccaattaccgcggtccctgagtgtagagctcctgagtctctccatacatcttcagggtctcggcagccttttgaaaaataaccagctggtcccggtcccttcaaccctgctgtggtcggggcaagtccagaactcttaactggaagaaattgtatttctgcgtagaatttgaaccccctgaggccccccagcaaggtagtaactagtttaacctgtggtaaccttagggcccaacctgttggatagttttagcttcctgtgaacatttggaacccctggttcagtcccctccccctttttgccccctggtggtggtatctggccttacttgtggggttttccctgctgggcccaagggtgggtttttttaccccctcttttgaggggagtttgggattttggaattgagaggtcctttccaaagcagaaaaaggcccccaatatttaagcaaggaaaaggggaacttga

SEQ ID NO: 531796 - DNA, 544 bp, Homo sapiens
  misc_feature (218)..(218): n is a, c, g, or t
  misc_feature (251)..(251): n is a, c, g, or t
  misc_feature (256)..(256): n is a, c, g, or t
  misc_feature (305)..(305): n is a, c, g, or t
  misc_feature (342)..(342): n is a, c, g, or t
  misc_feature (344)..(344): n is a, c, g, or t
  misc_feature (356)..(356): n is a, c, g, or t
  misc_feature (364)..(364): n is a, c, g, or t
  misc_feature (369)..(369): n is a, c, g, or t
  misc_feature (374)..(374): n is a, c, g, or t
  misc_feature (396)..(396): n is a, c, g, or t
  misc_feature (414)..(414): n is a, c, g, or t
  misc_feature (494)..(494): n is a, c, g, or t
  misc_feature (526)..(526): n is a, c, g, or t
  misc_feature (529)..(529): n is a, c, g, or t
ccaataattgtgttctctcccacagaaagtatgctgaggccttggattaccaccgtcaggcactggtgttgattcctcagaacgcatccacctactctgctattggatatatccacagtctgatgggcaactttgaaaatgctgtggactacttcacacagcccttggtcttaggcgagatgatacattttctgttacaatgcttggtcattgcatcnaaatgtcattggtgattctgaagcttatatcgnagcanacattaaagacaaattaaaatgttatgactttgatgtgcatcaatgaanacactaaaaaacattatttcacctccgtgggattcangnaatttgaagtancagactgnataanaaacngggcttacgccattggaacctnaaggaaactcagattcanaccttccttgaagaaacctttgaaattgaaatgaatggtgccatgatgtagagcattatgtagaccacagacgtgactcngcagtggcctggccactggccaatgtaggacnganaccgcttgagatggt

SEQ ID NO: 531797 - DNA, 360 bp, Homo sapiens
aaaagccccctgtttgtattcccttaaacccgtcggggtgggggaaaggcaaaaacagctaaacccccccggggggtttgttttacatttataagggggccctcaacaacccccctgtttttcccttttttgggaagggtggattaaggggggtgagttgggggaaaaaatgccccccggccctccgggattttttttttttttcaaaaacccccccggaagatccccaaaaacttgagaaaaattgtttcctgatttgtccccttttgggggcaaaaattttattcatttttttaggaccttttatggtttttaaatggataattttaaacaattaaaaaaaaatttttgtttagggga

SEQ ID NO: 531798 - DNA, 2363 bp, Homo sapiens
  misc_feature (1171)..(1171): n is a, c, g, or t
  misc_feature (2064)..(2064): n is a, c, g, or t
  misc_feature (2074)..(2074): n is a, c, g, or t
agcgggcggagctctgaagcggctccctgagggcgctggttttgaactggtcttgtgcggtttgcgctttctcttagtggttacagttggcgctgtctccgctttcctgtttcgtggcgggcatcttggccaaaacactctccctgccaccttattcctctagggttgtgatttttttctttcaccaagaaatatcactcgctggtaatttgtcaaactgaagaaacccctgaagaagcagtggtgggcaggcgccaacgctgcggcttccagagcattttggcaaatcaaagccagggaccgttgctgggcctcatttccgcaacttttcggctccgaactgcttctttgacttagaaggatatcttatcctgccgttgtaatggcagctgaactgcgaatgatactttatgaagatgattcagtacaagtacaatatgttgatggttccacattgcaactttctccctgtggctctgaatttttatttgaaaagtcaccacctgtttcagcacatcctttagaacaaccagaaagaattcgtcaaaggacacattttgtcattagcacttacagagagcaactacagcgagccctagattttcgaaactcttcagctacttgcccttttttatctgaaaccatcataccttctgaaagaaaaaagcatatcttcattgacataacagaagtgagatggcccagtcttgatacagatggtaccatgatatatatggagagtggcattgtgaagataacatctttagatggtcatgcatacctctgcctgcccagatctcagcatgaatttacagtacattttttgtgtaaagttagccagaagtcagactcatctgcagtgttgtcagaaacaaataataaagccccaaaagataaactagttgaaaaaactggcaaaatctgtatacgtggaaatttaccaggacagagactgaagaataaagaaaatgagtttcattgccagatcatgaaatccaaagaaactttaaagaagatgagttgtgtaaatggaactgaagggagggaagagctgccttcgcctggtacaaagcacacatgtgtatacacatgggtcaagcagtgctggtctgtggctgcctgtccagaggaatggaaatatcctttgtctttagcacttcattttcataanaaaatcagcaatatgtctaaaattgatgcacatataactcagagtagatttttaacttctgatatttcagaggaaagaggaaaagtggtttctgttcttcccagggccctgtcactcagctgtccagtcccacacctacacaggtggaatttttgtgattcacttttacagagacaatctgatgaatattcctatcctgaactagtgaaaatggtttggtacaaggtgttacatatagacttacccatcaaaatatgaactcaatagagatttattctggggatggatctgttttcaaatcagaaggggcttattttgggaactattttacttattattctattcaagaaggatcaggaaagagagaagagaaaacttactcagtaaataaccttcctccagatagaccgggaagtccattcactgtcggttctctaattaaacaggcaacaagaattcttcaacattgtgtgaagatgagactttctttaagccataactatcgtatatgctgctggaaaatggtacctgggataaatgatagcaatatactgcctttggttttgaaagagtcactcatacccagtgtgggaagatttcttgcctactctgatgacaaagtacatgctatctttttagatggcattactctaaccctaaattggaatttcagctctcctattgagaagagacaggtaaatcaaggtcttaacttaggttggtgtaagttaacttttcctgatggacaagagcagttaattcagattgaacaccctgaaccatatgaaagatatgtgacaacagtaacatcatggtgcaggagactgacccagactagtcccagagagatgcccactcattcgtcatcttctgttctccaagaaaatggtatntttcttttanacttaaatctgttagaagagctaatacttaaaaaaaattaaaatgtcaaatggtaaactgagacttttttccccaaaaaaactttcttagttttgaatatgtttaactcctaaagtatttttgatagcttaagcttgaaaataatttctaatcagacatctaatttattacatttcatcatattctattttacctaaaggtaagaaaaccttgcattgaaaacttaacatgaaaatgagtggctctttttatgtgacaaattcatccctgaaacttactggcaaaggta

SEQ ID NO: 531799 - DNA, 108 bp, Homo sapiens
tggtggtcctgttgaggtgtctgcccagtcaactccccactggccgtcccggagcgggtcgcgcccggcgcggcgttggatgcagtcaggcggcgttggatgcagtct

SEQ ID NO: 531800 - DNA, 703 bp, Homo sapiens
  misc_feature (236)..(236): n is a, c, g, or t
  misc_feature (445)..(445): n is a, c, g, or t
ggggtgaagaggatgccgtcgccatgggccgtggtgatccggggacagaggaagggggccgggtctgatgttccgtgcgcaggtgaggcaccgtagaggggctgtgcgccgtgcgcgccgtggattacgctgaggggcacggcgtacgtcaaggtgcatcgttccaggtacatcattcgcatcgagccctgggcacgtcgagtcgcgtccccatcggccgaatggtggatcttccngaggaactcgcgtaatcgcgttataatgaaagctgcgtagcgtgagcatggttcatcttgggcgacggaggagcatatcatatcggggcgcagctcttgattggtagtttgacgagccaatggaatggccacatgttcacatatctgcgcacatgattgcatcccctgattggagcaacctacttgtccctgaacgcgcgttccaaaantcggtgttggcattgaccgttggcatggtaggtaaatgctcttggtacgaacccagtgcgcaaaaggtcctatgtgcctcgtgggcgaatcgagcgggagacatcattgcgccacacgtgttcatgcatccccaacgaactcgcttggaggaactcgagaggagagacgctctgtgtggaacgcgtagcctctcctggggctcccaagaggaacaggttagtcgtcgctccagtccaaacacgatgctagttggtttg

SEQ ID NO: 531801 - DNA, 2041 bp, Homo sapiens
  misc_feature (849)..(849): n is a, c, g, or t
  misc_feature (1742)..(1742): n is a, c, g, or t
  misc_feature (1752)..(1752): n is a, c, g, or t
agcgggcggagctctgaagcggctccctgagggcgctggttttgaactggtcttgtgcggtttgcgctttctcttagtggttacagttggcgctgtctccgctttcctgtttcgtggcgggcatcttggccaaaacactctccctgccaccttattcctctagggttgtgatttttttctttcaccaagaaatatcactcgctggtaatttgtcaaactgaagaaacccctgaagaagcagtggtgggcaggcgccaacgctgcggcttccagagcattttggcaaatcaaagccagggaccgttgctgggcctcatttccgcaacttttcggctccgaactgctcatatcttcattgacataacagaagtgagatggcccagtcttgatacagatggtaccatgatatatatggagagtggcattgtgaagataacatctttagatggtcatgcatacctctgcctgcccagatctcagcatgaatttacagtacattttttgtgtaaagttagccagaagtcagactcatctgcagtgttgtcagaaacaaataataaagccccaaaagataaactagttgaaaaaactggcaaaatctgtatacgtggaaatttaccaggacagagactgaagaataaagaaaatgagtttcattgccagatcatgaaatccaaagaaactttaaagaagatgagttgtgtaaatggaactgaagggagggaagagctgccttcgcctggtacaaagcacacatgtgtatacacatgggtcaagcagtgctggtctgtggctgcctgtccagaggaatggaaatatcctttgtctttagcacttcattttcataanaaaatcagcaatatgtctaaaattgatgcacatataactcagagtagatttttaacttctgatatttcagaggaaagaggaaaagtggtttctgttcttcccagggccctgtcactcagctgtccagtcccacacctacacaggtggaatttttgtgattcacttttacagagacaatctgatgaatattcctatcctgaactagtgaaaatggtttggtacaaggtgttacatatagacttacccatcaaaatatgaactcaatagagatttattctggggatggatctgttttcaaatcagaaggggcttattttgggaactattttacttattattctattcaagaaggatcaggaaagagagaagagaaaacttactcagtaaataaccttcctccagatagaccgggaagtccattcactgtcggttctctaattaaacaggcaacaagaattcttcaacattgtgtgaagatgagactttctttaagccataactatcgtatatgctgctggaaaatggtacctgggataaatgatagcaatatactgcctttggttttgaaagagtcactcatacccagtgtgggaagatttcttgcctactctgatgacaaagtacatgctatctttttagatggcattactctaaccctaaattggaatttcagctctcctattgagaagagacaggtaaatcaaggtcttaacttaggttggtgtaagttaacttttcctgatggacaagagcagttaattcagattgaacaccctgaaccatatgaaagatatgtgacaacagtaacatcatggtgcaggagactgacccagactagtcccagagagatgcccactcattcgtcatcttctgttctccaagaaaatggtatntttcttttanacttaaatctgttagaagagctaatacttaaaaaaaattaaaatgtcaaatggtaaactgagacttttttccccaaaaaaactttcttagttttgaatatgtttaactcctaaagtatttttgatagcttaagcttgaaaataatttctaatcagacatctaatttattacatttcatcatattctattttacctaaaggtaagaaaaccttgcattgaaaacttaacatgaaaatgagtggctctttttatgtgacaaattcatccctgaaacttactggcaaaggta

SEQ ID NO: 531802 - DNA, 768 bp, Homo sapiens
agcgggcggagctctgaagcggctccctgagggcgctggttttgaactggtcttgtgcggtttgcgctttctcttagtggttacagttggcgctgtctccgctttcctgtttcgtggcgggcatcttggccaaaacactctccctgccaccttattcctctagggttgtgatttttttctttcaccaagaaatatcactcgctggtaatttgtcaaactgaagaaacccctgaagaagcagtggtgggcaggcgccaacgctgcggcttccagagcattttggcaaatcaaagccagggaccgttgctgggcctcatttccgcaacttttcggctccgaactgctgtgagtggaagacttttggtggttgttttgatcaggctccttctgtaactagagactatagcattttgaaagaaatgagatttctcattcatgtcaagaacagactttgtggatttttgagtgttaaacattaccctgacgtaatgtgctgggtgatgagaacgcaagcgggaatgagactgtagagatgagaatggcagtgtgggttggagccgggttatggtttcctatggtatgccaagaaccttagtcattacactgtttgttgtgtatgcttgattatttaccaattagaaaaccgctcagtaaagctattaaaaaaaaacacctgaacaaagatagactatttttcccaaattgggaatcagaaaatgtcttccatctatgtatcagcaccgtttttcccctaaaataccaagtaga

SEQ ID NO: 531803 - DNA, 103 bp, Homo sapiens
ggcagaggtgccattgtgtcctcttgttttagtgtcactggctctccctggatcgctccctgagggaggggcacctggatgtgtgattcacaccgtgttgagt

SEQ ID NO: 531804 - DNA, 280 bp, Homo sapiens
tggaaatttaaagaaaaaatttatggaagatctgaaaaacaatccctaaaagatggacttttccaaaaactctagctcacccaaggcatggcgtctatcaggttaaaccgtgcattagacacaaatacaaaaaccatgaacacaagccaccattcttcaacaacttggcagccgaagaaaaaaaagtgcctaagtacccacacagggcagtgcactggccaagaggcagtgggcctctataacctctatacagccacccataacacaaaaaaaacaagcg

SEQ ID NO: 531805 - DNA, 206 bp, Homo sapiens
tcatcttgctacacaagagcaggaatgcttctgtcccttttgttataaatgtatccccgggacctcataacagtgcctggcatgtactaggggttcaataatgtgtttgctacataaacgagatgctgatgtgcatagcggccccacagtgggcgtgcatcactatcccccagtgtgtagaacattgacacgtggtacccgagctc

SEQ ID NO: 531806 - DNA, 292 bp, Homo sapiens
caggagaatcacttgagcccaggatggggaggttgcagtgagccaagatcacaccactgcactctagcctgggcagcagagccagactgcatctcagaacaaacaagtaaaaggatggggaaaatatatcacagaaacactaatcaaaagaaagatggagtagttgtgttaatatcaggcaatgtatattcaaaacaaatatcaacagggataatgagagacattactcaataataaaagaaggcaaaacaatccaaattgtgtattcacctaacaatagaatttcaaaaca

SEQ ID NO: 531807 - DNA, 274 bp, Homo sapiens
ccgccttagtgtaagagcacgcgcttccctttgacagcatcaaatgtctacaggtggatgaagactcttcaggggcgctggactatagagagattccaggccaccacagtcagtcagatatacaggaaagtctcgcagtccatgtacgtgccacgagaggtatcccatgctgcgtcattcgcatgcagggttcggcaagtcagctcagctgtcagcaatcctccataaaggtccatgcaggtaccagcgggtcaatgcatgagctctcgtattc

SEQ ID NO: 531808 - DNA, 146 bp, Homo sapiens
ataggtagaggattaaaaactgcatcagacaggtgctgataataaatactacctatgagaaggaggtgagagccctctgtgtggggcagagtcaaaacagacatctttttagtatgggtactttatctgccacttattttctacga

SEQ ID NO: 531809 - DNA, 505 bp, Homo sapiens
  misc_feature (291)..(291): n is a, c, g, or t
  misc_feature (293)..(293): n is a, c, g, or t
  misc_feature (300)..(300): n is a, c, g, or t
gctcctaggacccggtcggtagtcgtcggcccagcccgccgggggcgcagcgcccgagccgcggccctcgatgacgggaccgagtagcatcatgggctagcactgctcccgctgctcctgcctcacgtgctggcttctgcatgcatgctccatgcgcctgggcctgagcagcacctgccggggccggagctcgaccattacgagccctgccgagacaactgccgaagccatgtgcattccccacgagcgacggtgggcacgcagtggctgttgacacgttcttcccctggncnattacancaagtgtcaattcacgtgcaacgcgcccacgatacgcactgttatgcacgtggcgtactggttagcagctgaaccgccacaagtggtgtaacacagcacagtcatagcaggaacgaaacacggacaagacagacagctacacgaacgagtcttttcaacggttacccgaggacttggacaaggtccacagggcgccgatatatca

SEQ ID NO: 531810 - DNA, 235 bp, Homo sapiens
aatcgagccggtacctgttgctaggtggagtgtggtggcgtgataatagccaagagcctgactcgtgtgctcaagcagtcttcccacctcagcctcctgagtagctgagaagtatgggtgtgtaccaccatgcccagcattttttttttttttttttttttttttttttttttttttgaccccaaaaacccccttttttggggtttttggtccggggaaaggggttaaaaaaatt

SEQ ID NO: 531811 - DNA, 933 bp, Homo sapiens
  misc_feature (735)..(735): n is a, c, g, or t
ttaataggtagcctgttttccttgtttgtcttgacttgtgtcaagctccatgtcgttgttttgtgatgagcagggatttagaactggctcagcagcttagaagagtcttcagcaagctgcgcctagggtaggggcatattctctgttgttattgtactggtaccccaggaggatgcctggtaactgctctttggtcatgatagtggtaatgaatccattcatgtaaaatgcaatatgtctgtatagtttggggccagccgaggctcagatagaggtttagtatgatgccttccctttcttctttgagttatgaagaaacataatgtctggcacagtgtgactgcttcaaatctatgttctgctgctatctcctatagaggagggcagactttttattcttagtgcattggctggtaggtcaaggagggatggactttgaatctaggtgttcagagtcacagatccttagcggtatgtgcgtcttccaggtagaggagtttgtctgtgagtcctatgaatgaagggaaagctatataatttattggtacttcctaaagatagagaggtaaagtcatggtagttatggcaaaattaattttaaaaactgaaacaagtcatgaatttcatataaatcaagaagttttccttataaaagcttccgtttttgacaagtggatcagtgtagactttcatcctagtatcggtgacataatccacgtggaacataagcctggnttgaagggaccggggcccagactggttccgggcccctcgcaacaaaggggggaccaaggccggaactgagcccagcccgtaggggcaacacccggggggggggcaccggctgcacctgagtcgagcaaatgccgccgacagagacaccaagaaccacgcggagcgggtaaaaaaaaggcccacccggagcaaataacg

SEQ ID NO: 531812 - DNA, 224 bp, Homo sapiens
  misc_feature (171)..(171): n is a, c, g, or t
cgcaccgattgactacgcggctgggtctgtgggtggggaacgggagatgagtcaggttttgagctggtgagtaggatttggaaagtagagcaggagtggcagagagaagggtggttacggagaatgaagaaagcctgaatataaggagtctcagaccatttctcattgcgnatggcaaaagttgtctaagtctctaagtatattgaaatcgaaagtgccatttt

SEQ ID NO: 531813 - DNA, 162 bp, Homo sapiens
tcttttgcggtgccttttccaagtgctggccttcctgcagcttcacactcatccctctggctagcgtcttcttccgcaagatccagtccaacactcatcagtgaagatctctgctgcatcctaatgggcaggatggttcacgtccagtcattcgtctgtcac

SEQ ID NO: 531814 - DNA, 192 bp, Homo sapiens
cttccgaggatcccagtaagatgggtataagtgataacaacggtttatggagcttgagtagtttctctattcaatgtggtattggttaaactcgaagccaggggtggcaagacactgcatacgttcgtattattagtgtagaaggcatgaagacttttttccctgcttggagagtgtcatcagacaatgtat

SEQ ID NO: 531815 - DNA, 187 bp, Homo sapiens
caggccgtgtggtgctgagctgggccgactacctcagaggagtggctcccacagctctggcgacgggcttgaggtgggcttgtcgaactggcgcttccggtatgtcaccgtctcgctgtacgcactgaccatctcctcagctgtcctcatgtacagtggcgcagggggtaccggagctcggaattcg

SEQ ID NO: 531816 - DNA, 761 bp, Homo sapiens
tacagacttaactcaaaatggatcatatatctaaatgtgaaatggaaagctataaaacttgatatacagacttatcgtttacaacgctgaggcgtaggtatgagtttttagacattacaccagaagcacatgccgtgtgaagagaaaatagataaattggtggatttcattaagaattagaaaactttttctctctgaaaaatcctgttaagctgggcgcgtgtggttcatgcctgtaatcccagcactttgggaggctgagttgggaagaaattaatagcttgaggccaggagttcaagatcatcctgggcagccaagaggttcgagtgaccaaccttcatgtggagcggaagtaggagagaccttctcatattgttttatattgttttatactcagtacctgttttaagaaaaaaacaaggaagtgaaatcaaagacaggcagcccggcaccaggcctgaaaccagccctagggcctgcctggcctaaacctagtagttaaaaatcaacttgacgacttagaacctgatgttatccgtagattcgcaagcattgtataagaaaaattgtgaaactcctctgttgtgttctgtaccagtgcatgaaacccctgtcacatatcccctagattgctcaatcaatcacgaccctttcatgtgaaatctttagtgttgtgagcccttaaaagggacagaaattgtgcacttgaggagctcagatttaaggctgtagctcgccgatgtcccagctaataacatct

SEQ ID NO: 531817 - DNA, 360 bp, Homo sapiens
cgacgtcagctgtataacgacggcagcttatatccgaggtccagcgtaccgcgcggttccagtgtcaccggcgggtcagagtatcgaggtggtgcagcttaagtccgttggccaccttatatcgctgcacgttctcaaagtggcccaggtattatagcagattgggagagctgtgccccatgagttgctgtaatcgaagttgtggcagatgcgaagagatatagccaatcgacgggcacgaggaagtccacaccatatgcagatattggggctgtgggtctccgagcccttccactcctctcgtggcatatatctctggacctcatctgcattgcagagttcctcctcacggtgtcggga

SEQ ID NO: 531818 - DNA, 107 bp, Homo sapiens
gagagcggcggccggtcccgcgcggagcccggcgcccctccagcccgagccaggacgccgccggccccggtcccgctcctgggcacggggtgtgccagggatgtgag

SEQ ID NO: 531819 - DNA, 101 bp, Homo sapiens
tccatcttggtcttccaaactgctgggattacagatgtgagccattgaacccggcctagttttaagcatatatttttggttgtgtaccccggatccgggga

SEQ ID NO: 531820 - DNA, 216 bp, Homo sapiens
ctaacttttatttctttttgcctaacttttatttctttttgcctaacttttatttctttttgtctaacttttatttctttttgcctaacttttatttctttttgtctaacttttatttctttttgcctaagcttttatttctttttgcctaacttttatttctttttgtctaacttttatttctttttgcccttgggggaggaggccagcttctcc

SEQ ID NO: 531821 - DNA, 311 bp, Homo sapiens
gaaacctaataacggggtggaggaaagggagaaaaagagagtcaggaataaaccccaggtcttagaccttggtaagtggatgggtagtggtgccaccaatgactgaaatggtggagaaagaaagagggctaggcttgggggggaggtaacacatctttctcctttgttcgtggtaaaaaagttcacataaagaaaaatggataaaggagttcccatcgtggctcagtggttaacgaacccgactagcatccatgaggacgcgtgtttgatccctggtctcctcggtgggttagggatctggcgttgccatg

SEQ ID NO: 531822 - DNA, 338 bp, Homo sapiens
  misc_feature (5)..(5): n is a, c, g, or t
ggagncggaagagaaaagcctcgaaacgctgacccgcaccatcaccgaaaccagcgagcagcaggtcagttgggaaaccattccgctgatcgagcctatcagtttaagcctcggttacaaactggtggcgctggtggacaaagcacagggtaaccgctcacccagcggattcgcggcgtgcggcaggtgatttctgacggcaacggcgtgctgctgccggagatccgcattcgggaaaacttccgccttaagcccagtcagtacgccattttcatcaacggcataaaggctgatgaagcggatattccggcggataaactgatgccctgccctccagc

SEQ ID NO: 531823 - DNA, 657 bp, Homo sapiens
atgcctacttgatgttatatctataaaagactgacaggtaattatatttggacgacagttagatgcactaactttaaagaaattgaaaattcaggtggataaatagtcttaccaaagaccatgtgctttatgttatacctatagctttggtcccctctttaattgagaaacatttatctgtataaaacatatttttggataaatatatatatatatatttgtatcgctacacgaaaggcttcttaaaagcactttgaggaaaatatttggttccctctttctataatcactcccttaagatttcttatagctacactttggtttattcactcatatttacacgtatatatattgttcttttcacgtgttcacactcttgtgtccccactttctcaacttgtgtcaaccacgctgtgttgtgccactttttatgtgtaaaaagttgcagagcctattagagtctgcacgtttaagttgccactgctgctaggagaattgtcctttttctttctagctgttaacctacttcctggaaaaagtagtagctctctgtagcattatggagtttcagtggaacccaatttttgccattaaaaactggcattatactgaactatacattgagaaatccatccaaataaaaatttttactttcca

SEQ ID NO: 531824 - DNA, 144 bp, Homo sapiens
gaggctggttattaccctctctgagtctaggactatctacaaaatgatcatataaaatctactataatagaaagactatcaggataatatttggtctatgctagattcccctctacatgtttgttcacaattctgtttagattg

SEQ ID NO: 531825 - DNA, 148 bp, Homo sapiens
gttcagtgcacgatgcattccctggcaggtagattcacacacacacacacacacacacacacacacacacacacatattctctctactcgctgtcgtctcacactatacacgccacacatacacacaacaatttacaccagcaaatta

SEQ ID NO: 531826 - DNA, 714 bp, Homo sapiens
ctacatcctcgaagtgagaataggtgagctcaatgccgccggtcccatatataaaggaaatagagtttcctatgtgaaggcctttatgaagaaatctgaagaagaaatttccacagactatttgagggaccaggtctcctgtgtacatagctgtctgaatgctggatcaagaattgtctgcttggcatctataaatctggaattacaggataagtccccatgcctgctatccagcagtattaaactgtcattttagtaggaattgtctcgagtaccagtaaagagaacaatgaagttgtggtggaatacagtggctcatatctgtaatcagcactttggaaggctaagccagaaggattgcttgaggctaagagttggggacaggcctgggcaccatagcaagacaccttctctaaaaatgaaaaaaattagctggatgtggtgtcatgtacctgtagtcccagttgcttggaagactaaggcagaaggatcccttaagcctgggtgttcaagataggcctggtcaacacagcaagaccccttctctaaaaatgaaaataaaaaaattagctggttgtggtggcatgaacctgtggtcccagttgcttggaaggctaagacagaaggattgcttgagccaagggtttgaggctgcagtaagctatgactgctcccctgcaccccaggctgggtgacagtgagacccagtctcta

SEQ ID NO: 531827 - DNA, 845 bp, Homo sapiens
  misc_feature (14)..(14): n is a, c, g, or t
  misc_feature (52)..(52): n is a, c, g, or t
  misc_feature (75)..(75): n is a, c, g, or t
  misc_feature (98)..(98): n is a, c, g, or t
  misc_feature (166)..(166): n is a, c, g, or t
  misc_feature (171)..(171): n is a, c, g, or t
  misc_feature (180)..(180): n is a, c, g, or t
  misc_feature (245)..(245): n is a, c, g, or t
  misc_feature (249)..(249): n is a, c, g, or t
  misc_feature (264)..(264): n is a, c, g, or t
  misc_feature (271)..(271): n is a, c, g, or t
  misc_feature (378)..(378): n is a, c, g, or t
  misc_feature (509)..(509): n is a, c, g, or t
  misc_feature (602)..(602): n is a, c, g, or t
  misc_feature (606)..(606): n is a, c, g, or t
  misc_feature (632)..(632): n is a, c, g, or t
  misc_feature (641)..(641): n is a, c, g, or t
  misc_feature (649)..(650): n is a, c, g, or t
  misc_feature (674)..(674): n is a, c, g, or t
  misc_feature (678)..(678): n is a, c, g, or t
  misc_feature (690)..(690): n is a, c, g, or t
  misc_feature (696)..(696): n is a, c, g, or t
  misc_feature (698)..(698): n is a, c, g, or t
  misc_feature (713)..(713): n is a, c, g, or t
  misc_feature (739)..(739): n is a, c, g, or t
  misc_feature (742)..(742): n is a, c, g, or t
  misc_feature (747)..(747): n is a, c, g, or t
  misc_feature (749)..(749): n is a, c, g, or t
  misc_feature (751)..(753): n is a, c, g, or t
  misc_feature (758)..(758): n is a, c, g, or t
  misc_feature (761)..(761): n is a, c, g, or t
  misc_feature (775)..(775): n is a, c, g, or t
  misc_feature (777)..(777): n is a, c, g, or t
  misc_feature (828)..(828): n is a, c, g, or t
tactttgaatatanaggaaaccaaatccacaaaacaggaagctatgttctanggttatgccttttaacaaatgtnctgtatttacaaattgttttttnccctaagtaaaagcaccagctgaaaagttataggctgctaaaaccgttacaaatattacaaaccattnaaagncattatgcnaaacgtacttattaaaaaccttaacaaaacgaagagacaactgacaacgcaaccaaccaattganccancatgctgggctgggnggcagtnccaatttccttgcctgtgtttctgataaacggggctgggagtgcttatcccagggagaggatcctcgcccaccggcagggactacagggacagagctggggagaggnagctgtgtctcaaggaaacatggcagcctcacttcctgctgtaggtggcctcctggtcagaccccctcaacccacaggacaagggcagaggcatacaggagggtctggccagctttcggcttgttcatctntcaacagaatgcctttctgcgaccttgtcctcatccactgaagggtttggagtttttgttttttcctagacacttagctacaggacactgtgntgangggtcctcgagggacttgctgtctgncttccattntttttttnntttttgagacaaagtctcaccgtnaccnaggctggagtgnagtgtngngatcatgctcactgnagcctcaatctcctgggctcaagtgnttntcctntntnnncctcncanttttttgggactanangcatgcgccaccgtgtctggcctctattcttgcaattgaatgagatgctangaggcgctgagcgaccc

SEQ ID NO: 531828 - DNA, 276 bp, Homo sapiens
ggaaacctatgatgtatccctttggaaaatgcaccactgaaacgggcatgatggtgggtatgctcccaacatcctggagaagaaagacggcctggcgctgctgaagactgctattgggacaagctggctacactgataagtgtggtcatcggcatggacgtagcggcctccgacgtctacaggtcatggagaagtatgacctggacttcaatgtctccctgaattgaccccagcaaggtacatcatcgacttgaacaggatgactgaccttgatac

SEQ ID NO: 531829 - DNA, 250 bp, Homo sapiens
ggggggcccaacagggggccccccccaaaaaaaaaagggggccctggagtttttggcccccccgtgttagaacatgggcaaatccccaaactttttccaactgtttggcatgccccctctggggggccgggccctggaaggggggcttaaaaaggcccccgccccttgggcccccccccccatggtttcccttttatccccgtttttttggcccccccgcttttcccaaaaaggggttttttttccccca

SEQ ID NO: 531830 - DNA, 293 bp, Homo sapiens
  misc_feature (34)..(34): n is a, c, g, or t
atcacacaagtcattgccttcatatggacgtccnttgaacctgtggttgtgttggtcagctgtggccagaaagtgaaccataaacagtaaatcacaagaggcctgtaaggaaaggcccagataggtcatcttcacgtctggctggcacttaaacttggccttttcccataaaaactgttgagagaaaaatagcaatgttatgctagtagccctaaagcacgaaagatgtccaaatccatgccttgctactccacagttacctttatgaaaagtattttcttatagccaaatat

SEQ ID NO: 531831 - DNA, 489 bp, Homo sapiens
cgtacacagcaagactgaagagacagagtagtgcccacattctggaatcttatagagggttatgcccaattcttacatttatttatttgcttttaattttaaattcaagaggtatatgtgcaggtttattacatgggtataatacctgatgctaaagtttgagcttctaatgatcccataaaccaagtagtgaacatagtacccttgctccctctgtctctccctccttttggaatccccagtgtctatttttcccatctttgtgtccaagtgtacccaatgtttagctcccacttaaaagtaagaacatgtggtatttggttttgtttctgcattaatttacttaggataatggcctccagatgcatctacgttactgcaaagggcatgaatacattcttctctgtggctgcattgtgaacctggtggatattcaccacattttttttagtccagtctaccgctgatgggcacctaggttgattccat

SEQ ID NO: 531832 - DNA, 527 bp, Homo sapiens
  misc_feature (155)..(155): n is a, c, g, or t
tttctcaagggcgtgtttgttctccgggggtcaccccgcgggcccgaggacacacacccgcccttttttcgggtgtgtccgggggtgtgcgcccctcttcgtgtttttttccgcgcccctaagggaaaaaagggtttattttgggtggggttttnaaagggttagccctttcccccccccccccccccccgggggttttttttaggggcggccctgggttaaaccgggggggttcccccccccctagggtaaaaaaaaaaatttttttgggggcccccccctttttttttcccctggaggcccccccccctaggaccccccccccttttttttggcccccgcgggcgggggttttttttttcccccaattttggggggggtttttaggcccccccaaagggggtttgtttgccaaatcccccccttttttggcccggaatttttttttccccaaaagaggtttttccccccggggggtttgggggggctggcccaattttggggggggcctttgggccgggtaaacc

SEQ ID NO: 531833 - DNA, 394 bp, Homo sapiens
cattccatcccttcaaagatggagtttgatctacctcacccccccctgttccaagacaatggatgaggatattgtgattcagcaggccgatgagatccgcttaaaaattgtggggacccgtgtggacaaaaatgacatttttgctattggctccctgatggacgattacttggggcttgtaaactgagcctggtggcctcccacccttggtcctactctaggaagggtgattgtcccccttatcatgttgtccaaaggtccagtttggctgctgttgtggaggcaaggaaggcaactcatccccaaaggcatttggtgctttttgtagcttaactactgcccccccctttttcagtatgtgttttaagtataaaaagtccttggttttcatgga

SEQ ID NO: 531834 - DNA, 344 bp, Homo sapiens
aatgggcttccccccctggggtttcccccgctcccccgagaatgccccaggggccgggccctgggcagggttttttgtagaacccccgggggttcggccccgaccccagggtcttgccctgagcctaaagcagggagtcccgaacttttgccttccccggcccccccccccattgttataacccaaggccccctgttttgttttttccctttaatccacctgctattttgttttcccccccttttggctttagccccggggtgagccggggatccctgccgtcatgttcccgggctaggtacgttttttttttttcccctgaaaataaatgcctaagggtttga

SEQ ID NO: 531835 - DNA, 1478 bp, Homo sapiens
  misc_feature (749)..(749): n is a, c, g, or t
cttcagtatgatggtgccgctacgtagttttgctgcccccctcctcgcctcgtgctggttatgtgcctagcctactttggtgagtgttttctccagactcaggacaccaacgagtggccacccactgttggttttgccgccccaccactcaacgcatatcactacacagtgtgcttttggtgtgcgcggccccagttgtgtggggggcggcccagggagagggtccgtgtactcgcatcgtggccctcccctcctcttgggccctttgggggggggtttttcccccccccccccccgttggtaaggtggtttcccgcaacgttctggcgcccgcgggggggaaagaacaaactgtagggtgggtgggtttctccgccgcttgtggtcgcgcgtcttcctcacgaaagagggggccccaactatggtagataggaacattttgtgggggttgtggagcaccttctgtggatacgggaatcacccctctggttgccacacacgacgcgacagtgtgttgtatagatgcccacgtgccaccaacatcgtgtagaggtagtatcagacgatgtgagcatattgggcgaggaagaaaaaaaatgtttgttttgtgggggacccgccgccgttgtgtgtcccccccggatgagcgcgctttgaaccacaaaaaggttctcgccacggcccaacatgtgcttgggcttttatggggaaaagaagatccccactgcgaaaaagagggtttccacgcntgtagaggggagccgcttatcgctcctttgtcaaaccgtatgacacgccacaggtgcgtctcatagtgagacctcgcacatcacgccacatggggagagacactgtctgtgtcaacagacacacatgtgttgtgagagcctgtgagatcttggcccccacacttgtgtgtcacacctctcacattctacatctacgcccacaatattgagtgccacgatcaaatcgagagaggagagctctgagtgcgggcccctctcccctcgggagaccacagcccacagacactcacagagacacagtggggtgagagatgtcacacccgccacactctgagagccctcaccacttggcccaacagcacagagacccctcgggcttctggcacagcctgtgccgcacagaatagtctgggggcacagccctcggtgtgaagagaccacaccgagacacggggtgtttgtagaccacacacatagcacgggcacacctacacgggggcataacatttccgagagccacgaaggaacggctatccgcacaaaaacgagggctaacaatgcgccgccggtggctatcccccacgcaagcacagtttcaagacggcctatctgaggctttccaccttctgttttccccctgggccatccaaccttgaagtcctataaccacacctcagtcaataaaggtctgtttaaagattgtttctggttgattgcttgttgccacca

SEQ ID NO: 531836 - DNA, 311 bp, Homo sapiens
tttatgacataggcagactcataacactatctgttgattgcaaaatctacaaattccatgtaagtccaatgaaactactaccaggcttttacctggcacctgatggttgaataaacaatttatatggcagagtacaggcacaagacaagttcacgtgcttatggatggataagaagagcaggaagaattgagatacaaatggtgcaggcttatacaaaacatcagtgaatgaggcagtgtggcgccagcacagggatacacaaacagcatccgggaggcagactggagataccagtccacagcttaccttt

SEQ ID NO: 531837 - DNA, 890 bp, Homo sapiens
cgcggtggctcatgcctgtaatcccagcactttgggaggctgagacaggcggatcacttgaggtcaggagttcgagaccagcctggccaacatggtgaaaccctgtctctaccaaaaattacaaaaattagccgggtgtggtggtgcatgcctgtaatcctagctaccggggagctaaggtagaagaatcacctgaacccaggaggtggaggctgcagtgagctgagatcacaccactgcactccagcctggtgacagagaccctgtttcaacaaaaagaaatcctacagctggtacattattatcatcattcataatacagggccaatgttttccaatgtgtgttcctttgaacactgaacgagtactcaggcaggcaaatgggaggagactccctttcaacattcatccattcagtcagatttactgactgtctccggctctgttgccaggaacagggaatagcatgggtaatgtctttctttgtggaagttataacgcccatggacagagacagaaaagtgccccacacatagacaatttcagatcatagctggcgggaggacggtgatcctgatggtgctgtccatagatgggtgctccaacgacggcagccaagcttcaaagcctgagggaggcccacttcggagtgtgcgacgactggtggggtcgggtggagctctccggcgagagataggaggggactcacaggtggacctctcaggatcaaggctaaggcactttaaaccgccacgcacatgtcgcagagctgggcgaacgtcgaccctggtgcgcacgtggcgctagaacgacaggcgcagtcgcgcaacggcccaggggtggcccccccaggacacaaccgtggagcgcgacgagacgcgcgcagcacc

SEQ ID NO: 531838 - DNA, 260 bp, Homo sapiens
aagatacattcaacatgaaggggaaatagatatttttagacaaaagctgagagaatttttttcttgaatatttgcactaaaagataggttaaaattcttcaggctgaagagagcataccaggtggagatttggatctacaaaaaggaaggaagatttggaaatggatttggcaccattgactcaatttccagaacaagaaagcagggacagttttgggaagctcaagacacactgcccatgagcagcaatttggacctcc

SEQ ID NO: 531839 - DNA, 179 bp, Homo sapiens
ttacattatcgctaggatgaggatagactagtaatagggcaaggacacctcctagttcgttagggacggatcggagaattgtgtagagcgaatagcgaacatatcattcggcgcttagatgtggcgcgagggagtgtttacagggagttggctagcggtatacacttgtctgggctcgc

SEQ ID NO: 531840 - DNA, 1144 bp, Homo sapiens
caggcagctcgaggacccgcggacccgccccggctcggccgtggacagactagcagacggcagcgaggcctgtgaccggggtgggcatgttgcatgtaaccagtggaccagggtgatgtatacgtgtgtgacatgtgcacctgtgagggcgggccccgcagggtgaaccatgctgcatgtggctgtcgggcatcgggtctactccttcgggggttactgctctgtgtgaagactatgagacactgcgtcagatagatgtgcacattattcaatgcagtgtccttgacgtatggacaaagctgacccccggtgaagtctgccatccgtgggcaagctccatgtggtaccctacatgcgctatggacacatcaaccgatcctcatcgacgacacagatcctccatttggggcgggcggaatgacaccgaaggggcctgcaatgtgcatctatgccttagacgtcaatacgcacaagtggttcacaccccgagatgtccagggacagtatacctggggcccgggaatggacattcagcctgtgtcctaggaaagatcatgtacaatataaggcgggctacgagcagacagtgcggacatgtaagtaccaatgacatacacaagctagctcccagcaaccatgacacatggacctcttatctgtacacacgggcagcctgaccgctggagggacttcactacagaccacaatcctgggacaggtcaatggtatgtacaggaggacgtgccgaaccggaaggagccaatccactaacaacaatgagattactggcaccgaatccgagcactgaccaccgaactgcagatggcatggactggccccgaatcagatgctgactgaacggcagccgggaccccaccggaccatgaggctccccagcgggcaacaggacaacaagcaggggacacaaagtgacaggagtaacgagacatccctgaccccggggccatacacgggaggacaacggagaaacagtgaccaactgggtagggaaagacagacacgagacgacgacgattgcagcacaacctccgcctagtgacaccacaccgagaccagagaaacacctaaaactacacgaaaacgccacacccaaacgcaagccacatacaccagacaagcaaca

SEQ ID NO: 531841 - DNA, 336 bp, Homo sapiens
  misc_feature (150)..(150): n is a, c, g, or t
  misc_feature (186)..(186): n is a, c, g, or t
  misc_feature (247)..(247): n is a, c, g, or t
  misc_feature (275)..(275): n is a, c, g, or t
ttgtagttagtctattgtcttttaaatgcaggtacttctgaccttgtttttagaaaatggttgcgcttgtaaatctggcaatagttatcatcagtgggcacttccatctttcccatagtttatacttattttgtgtcctgcctagtaatntgtttcgtcttcctatagtaacctaaagaagtagcnttgcaaattttaagaatcttttacaagtgtgggttcttgtgcgtgtttctacatcttctgnggcaggtttttgcattttatacagccangaagcgtttctctttattgggagaaagcggaaaagagccaatagaacaaagtacaaaccgg

SEQ ID NO: 531842 - DNA, 771 bp, Homo sapiens
aataaaataggaacaaggagtaaacgaaattcgtcgagagaatcctgcgaggggaaggtcacatttacttacgccttccggcactgccccgtgcccttcggacgcagcgccttggcgtgcgtcgaggtcgtccgattcctatcggtccgtggtgtgaagcacgacctccctccggcgcgtgcgctgtccgtgagtaacgagctctagaatacgccagcggatgcgggccggcaactcaagcaagatctagcctacctgtgcgcccccaaccgtcacctggcagagcactcaccctactatgaggccatgacagaatgaaagacacagaggttctcttctgctttgagcagtttgatgagctcaccctgtgcaccttcgtgagtttgacaagaagaagctgatctctgtggagacggacatagtcgtggatcactacaaggaggagaaggtttgaggacaggtacccagcacgcgagtgcctatcatgagaaggagacggaggagctcatggcctggatgagaaatgtgctggggtcgccgtgtaccaagcgtagaaggttgaccctccgactggacacccaccctgaacatggtcaccgtgctggagatgggggctgccgacacttcctgcgcatgcagaagttgacaagaaccaggaggagctggcaagatctgaagaccacgctggagataaagccaggaagcggctcatcaagaagctgaatcagttgcgccaagcgaacctgacctgaatcagatgtgggatacaaa

SEQ ID NO: 531843 - DNA, 197 bp, Homo sapiens
cttttatgtattctgtaggcacatttgcaaaacagctcctctagtcacataggtaactgtttttgagacaagttctggctctgtcacgcaggctagagtgcagtggtgtgatatgagctcaccgtagcctcgacctcctgggctcaggcgatcctcccacctcggcttccccaactagctgtgactacaggcacgtg

SEQ ID NO: 531844 - DNA, 187 bp, Homo sapiens
gacattccggagtgccggcgtgtggccgcattatatgacattctggtgtgccggcgtgtggccgcgttatatgacattccacgttatgtgacattccggtgtgctggcgtgcggccacgttatatgacattccgcgttatatgacattccacgttatgtgacattccggtgtgctggcgtcggtcgc

SEQ ID NO: 531845 - DNA, 390 bp, Homo sapiens
tgagatggagtttcactcttgttgcccgggctggagtgcaatggcacatgcttggctcactgaaacctccgtctcctgggttcaagcgattttcctgcttcagcctccccagtagctgggattacaggtgtccgcttacacgcccagctagaactttattttcttaatctgttaggttttttcttcattatttccttagtagtgtacctaagttaagatagtgtttttagatctcactgttttacagcattctgactgcactggagtttcatttgagccattactattaatttattaacattcagtacgcgctatctgtattatacaatgtaagtgagttttatctaccagaagaatgtctcttaaccatctcccttctgtcgtcttctc

SEQ ID NO: 531846 - DNA, 580 bp, Homo sapiens
agaactttattccttttatggggctgaatgatatccattgggtggatgtgccacattttttttgtttgttttgttttgagatggagtcttgctcctgttgccaggctggagtgtagtggcatgatcttggctcactgcaacctctgccccctgggttcaagtgattctcctgcctcagcctcccaagtagctgggactacaggcatgcaccaccacacccaggtaatttttgtatttttagtagagacgggttttcaccatgttggccaggatggtctcgatctcttgaccttgtgatctgcccacctcggcctccggaagtgttgggattacaggcgtgagccaccgcacccagcctcactgtgattttgatctggatttccttaatgactaatgatgttgcccatcttttcttgtgcttgttggtcatttatagatcttcattgcagaaatgtctattcaagtcctttgaccattttaaaattgggttgtttatcttttggtgtcgagttttagagattccttctatattctggatatcaaattagatatgactcacagatttttctccatatatttt

SEQ ID NO: 531847 - DNA, 219 bp, Homo sapiens
tcgtgccgaattcggcacgagcagacactgaagcacccaggggctaggtaacaccgaaggcaacacatctgtcaagtgattgactgggagccagggtgggatggtgtgcctgcaaagtacttattgataactccctgatggcaaccaagggaaggctataaggattgtataacaggacgctatggggttggaaatgctcggcgagcctgtactagagca

SEQ ID NO: 531848 - DNA, 335 bp, Homo sapiens
gactctatgtaggatcccccccagaaagactactccagaggttttggcggcaagtttggcgtgcagtccgaccgacaagacaagagcgcccttggctgggactaccaggacaagacgcagatgcaccactcacaaagagattactccactggtttcggcggcaaatacggtatccacacggacaaacaggataaaaacgccgttgtcttcgagtatcaaggcaaaacggacaagctcgagtcccacaaagactatgtgaacggccttggcgtaaaatttgacgtgcagacagacagacacgacaaatgtgcccttgcttggaatcaccaggagaa

SEQ ID NO: 531849 - DNA, 304 bp, Homo sapiens
gtggcgcctgccatgcttgggctacccaaagctgggtggaccagacgctgcgtaatcccaaagagtgcagcggaggggacgtccagaacttcgggtagaacgccagcatgcctcagtgctgccctgctcctgtgacccctcaggacagtgtggctccagcccacagatgctgcaggtgttcagtctcaggggccgggtctcaaagtggtcacagcgagcaccaatgccaggtggctccagcagctggtcgatgccataggccaggccaccctcaaagggcaagtgccgctgcacaatgcgagcc

SEQ ID NO: 531850 - DNA, 266 bp, Homo sapiens
  misc_feature (230)..(230): n is a, c, g, or t
agcctgcacctattgggtgaaggagtgatagcttgggtcatgttcgctgatgtctccttggccaagtcagtgtgggttggggctaactaatggtatgaatactggggaggcatgaattattaggggccattagtgtagcattttatacctagaatgttcattaacggtaaactagtatttttctattttttctacctcacttttcagtttggaggagtttcagtctgacnatatcttcataggtcactatattctttcacttggcc

SEQ ID NO: 531851 - DNA, 479 bp, Homo sapiens
  misc_feature (343)..(343): n is a, c, g, or t
  misc_feature (393)..(393): n is a, c, g, or t
  misc_feature (406)..(406): n is a, c, g, or t
  misc_feature (439)..(439): n is a, c, g, or t
atgatagtgcatgctgtaatcccagtgcgtgggagattgaggcaggattgctgtaggttcaaggccagtcagggctgtgtatcaaaacatctccaaagaacaaaatattgagggtaagtaattccatggagttttacggggttttaaatgctgattgtaggaagggttacatcactttgtagcatcagggtcacatcaagctataaccttgaagcgttctatttccagcctttgcatacagtcacttatgctgtgtattttatagtatttaagataatagggatggcattggaaaggaaattactttcatgggcaatatttaaagttttgaaatatataaggntaaaaacaaacaaacaggatatccattttaaaagccgaagaattgaaccngatttataatgcnactttttaaaacttgaatgtgttgtttgttgcnagtggccgaagaaggggctggccttactcctctgcatatt

SEQ ID NO: 531852 - DNA, 404 bp, Homo sapiens
aacagtatgacaattcctcaacaaattaaacatggctggacatagtggctcacgcctgtagtcccagcactttgggagaccgagacgatggactgcttgagccaggagttcaaggccagcctgggcaacataaggagaccccatctctacaaaaaagaaaaaaaaaagtagccaggcgttgtggcacatgcctgtggtcccagctactcaggaggctgaagtgggtagatcacttgaggtcaggagttcgagaccagcctggccaaaatggtgaagccatgtctctattaaaaatacaaaaattagctaggtgtggtggcgcatgcctgtaatcccagctacttgggaggttgaggcataagaattgcttgaaccctggaggcgaaggttgcagtgagctgaga

SEQ ID NO: 531853 - DNA, 183 bp, Homo sapiens
aagggacccttgcctttgataacccttttttggggccgtttttcctcccctgggggggaaaccccggggccgtttttttgttaattaattttttttaggttgggccccgcccttttggggtttatttttggttgttggggtttttggcctttttttaaaaaaaaaaaaagggtccctttttta

SEQ ID NO: 531854 - DNA, 157 bp, Homo sapiens
agcacgtaagacttagattagctagtaggtagggtggctaggcaggcagcgagttacagacagagagcatcagagctgagcctaggaggagttggtaggcatagctgactagagtacagagtactacctactatggaggacagagaatcgaggtatt

SEQ ID NO: 531855 - DNA, 299 bp, Homo sapiens
  misc_feature (242)..(242): n is a, c, g, or t
tgtgaaggagcagtgtcgcagcgtctcaggagtcacagagctcgattggtctgtctccagcagcatgctctccagatgcagctgctgtcgctctccacatagggctggtgcagcacatggacaggtagctcatgggtgaggtcgggatccccggtgtgggcaagctccttgtgccaccgtgcgcttcaggagcagctccttcctgtacatctccaatgagcttatgctgaaaccctcatagnaaatgggttgtacggccacgctgtaggaacagtagcggggtctgtttaaactctcct

SEQ ID NO: 531856 - DNA, 431 bp, Homo sapiens
tatattattactttaaattttcattaactattattcttttatttttatcatatatacaaataacattcctaagattatttcttacataccaacattttttacatccctttccattatttataaatacttttataattcattaattatttaataatataattatctatctattacattttcatttattttattttttttaaaatctcattattatcttcacattaaatttttatttaaacttaataaacttttattatcttattaattattcctaacatttattccctttaacatataacttctttatccctttcctaaacctattctaactttttatcattggagggtggggggtccttttttaaaaatacaaccccctccactttctataaccttttgctttgaaaaattaaaaatcctctcccaaaatt

SEQ ID NO: 531857 - DNA, 537 bp, Homo sapiens
  misc_feature (49)..(49): n is a, c, g, or t
  misc_feature (62)..(62): n is a, c, g, or t
  misc_feature (65)..(65): n is a, c, g, or t
  misc_feature (101)..(101): n is a, c, g, or t
  misc_feature (116)..(116): n is a, c, g, or t
  misc_feature (136)..(137): n is a, c, g, or t
  misc_feature (142)..(142): n is a, c, g, or t
  misc_feature (145)..(145): n is a, c, g, or t
  misc_feature (158)..(158): n is a, c, g, or t
  misc_feature (202)..(202): n is a, c, g, or t
  misc_feature (205)..(206): n is a, c, g, or t
  misc_feature (208)..(208): n is a, c, g, or t
  misc_feature (225)..(225): n is a, c, g, or t
  misc_feature (249)..(249): n is a, c, g, or t
  misc_feature (266)..(266): n is a, c, g, or t
  misc_feature (268)..(269): n is a, c, g, or t
  misc_feature (273)..(273): n is a, c, g, or t
  misc_feature (314)..(314): n is a, c, g, or t
  misc_feature (317)..(317): n is a, c, g, or t
  misc_feature (328)..(328): n is a, c, g, or t
  misc_feature (334)..(335): n is a, c, g, or t
  misc_feature (337)..(337): n is a, c, g, or t
  misc_feature (341)..(342): n is a, c, g, or t
  misc_feature (344)..(344): n is a, c, g, or t
  misc_feature (349)..(349): n is a, c, g, or t
  misc_feature (361)..(362): n is a, c, g, or t
  misc_feature (371)..(371): n is a, c, g, or t
  misc_feature (390)..(390): n is a, c, g, or t
  misc_feature (394)..(394): n is a, c, g, or t
  misc_feature (396)..(396): n is a, c, g, or t
  misc_feature (405)..(405): n is a, c, g, or t
  misc_feature (417)..(417): n is a, c, g, or t
  misc_feature (422)..(422): n is a, c, g, or t
  misc_feature (457)..(458): n is a, c, g, or t
  misc_feature (486)..(486): n is a, c, g, or t
tttttaattcagtaaaagaaaccgggtcttagaagcggcggtggtctangcggcggcgggtntgngcattcattttttttgtttttgtttaaatatgtttnaattatcacactgcnggcactcctcatttgcatgnnattcngcnccatacttactanttgtggtaaagttaccccccaacccacgaaaaaaaacctactcnggnngnaaattttcactgaaatntaaccaaacttctttaagggggtnggggcagggttttaaangnnttgnaaaataacattttaaaattgggccatcaactttaagtaaanggnttgcctatacnaatttnngnaatnntnaaaanataatatattcnnccccctttngggccccggaattaaagcntaangntcagggggnaaaagggaaagnatgcnactgggttctagggcgggccatcttgccaggggtnnttaagggggggggggtatataagggaangggccgaatttcctagggccaacaagataacagtctatttttttcacttac

SEQ ID NO: 531858 - DNA, 121 bp, Homo sapiens
tgatctagaggatccgttaactgggttcgagttctggaatgtagaagtatgaggctgctggggagtctgcgaggaaattgatttctagcaaaatcttgtgtgataatttgggagatgtgat

SEQ ID NO: 531859 - DNA, 333 bp, Homo sapiens
ccaagggtcccgggttctcccccagaaatgaggggggattctgtaaaaaacccccggtttcccgatggggaggtttggaagaaaccccttccggctcaagaaaattagggggcccgccccccccccttttttttttttgaagggaaagggcttaaaatttttggggaatggttttccaaaaaggggtttaaaaaatccccccggccaagatgggttcgggtagaagtcatcccccccccgggaatcaggtagggaattattccttgttttttttagcaaaccaaggccggttttcccccttaacccttaaataaaaaattttttttttaaata

SEQ ID NO: 531860 - DNA, 562 bp, Homo sapiens
  misc_feature (79)..(79): n is a, c, g, or t
  misc_feature (81)..(81): n is a, c, g, or t
  misc_feature (86)..(86): n is a, c, g, or t
  misc_feature (93)..(93): n is a, c, g, or t
ctccctggacagtgttctcaaagtggtccttgaaccaacaccggtaagttccctggaacttatcaaaatgcaaggtctnangcccnacccccngaccctctgaatcagaaactctgagggtggagccaggaagctgtgtttgaacaagccctccaaaagacactgatgcatgctgaagttagctgctgctttagagaaactgttaatgagtttggggaaataagagatacatacatgaaatggctggaggagactcaagcattatgcatgacatttagtgaacgtaaaagacggagtctagacaactttatttccataatattaacaaaggacaatcctctcttaaaattcctggggtcagatgaatttctaaattcagattttgtttttcaatttagaaaggtaaaatgtgcatgtaccatatattacataatacctttggtaaggtctggggtgacactctaatatactaattttctgcaagggaaatcatgaatgacataagtgtatgcttggattatctactgcaatgtaataaatgttcccaaaataaaaaaaaaaa

SEQ ID NO: 531861 - DNA, 375 bp, Homo sapiens
tccttccgtggtcccagtgaccaaggctggggctgctccctcagccaggtccgccctctctctctgtagtgttgttttgttatagattaggggtcttgttatgttgcccaggctggtctcaaacccctggacttaagcaatcctcctgcctcagccttccaaaatgctgggattacagacgtcagccattgcacccagccttctctagcattttctttcacacagcagcggtgaccttgtgtcaggaggctttggggcacctgcgcctctcacttctgcatctcacactccctctgttgatctagtgtgtgtgtggccttgcgtctgtcacgcagatcagatccaagagtagtttgggtatggctgggaggggga

SEQ ID NO: 531862 - DNA, 565 bp, Homo sapiens
  misc_feature (2)..(2): n is a, c, g, or t
  misc_feature (158)..(158): n is a, c, g, or t
  misc_feature (535)..(535): n is a, c, g, or t
angggtagagcatgagagattatcaagagaagaaaaagggagctcggagctccgtaaggtagtgagacggagtcaccagggacaggacagccatgtaattagggtgaagacacagcgttgatatgaacactttgaaaactagcaggttcgaggcgggngggaagcgagttacagaagaggagccgtggtgagggcaggtgagggcgggcaacggcgaggcagggctgggactgggtccggaggttgagctgtctctgctccactgggctgcgggactgacgcctcctgaggctgcgaatggggcgggggaaggactcaaactccttctatttttctggacagggagagagtggcagcagcagatcaaaccccggagcccctgccctgggtgggtgccagcttccctgagacattccgtgcctgtgacattgctgtgtgcagagatgaacgagacgggaaaagccactgcaccctgaagaactacaatatggtgggggtggcagatgccaatcaatgacacagatacctatttaantaacaggtctaaggcgtttcattctacgca

SEQ ID NO: 531863 - DNA, 338 bp, Homo sapiens
  misc_feature (108)..(108): n is a, c, g, or t
  misc_feature (110)..(110): n is a, c, g, or t
  misc_feature (308)..(308): n is a, c, g, or t
gcccaggtgccgcgtgccgggacgacgagcgcgggcagcagagatggcccaggtggcaacagagatggcccaggtggcaacagagacggcccaggtggcaacagagangncccagggagagagtggcagcagcagatcaaaccccggagcccctgccctgggtgggtgccagcttccctgagacattccgtgcctgtgacattgctgtgtgcagagatgaacgagacgggaaaagccactgcaccctgaagaactacaatatggtgggggtggcagatgccaatcaatgacacagatacctatttaantaacaggtctaaggcgtttcattctacgca

SEQ ID NO: 531864 - DNA, 503 bp, Homo sapiens
tgcttccatatcttagctgttgtgaataatgctgcagtgaacgtggtggtacagatacctctttgacacactgacttcagttcctttagctatatgtccagaagtgggattgctggatcatatggtaattctatttttagttttctgtctccatgctgattttaatactggctgttttaatttacattcccaacgtcagtgcacaagtgttcccttttttctacaccctgtcaacacttttatcattttgataatagtaattctaacaggtgtaaggtgataccttgtgttaatttgcatttttctgattagtgatgatgagcatcttttcatatatttgtggccattgtgtcttttttaggaatatctgtttacatcctttgcccatgttttaattgagttcattttcttattagtggcttcagtaccttatgtatttggatattagccccttatcagatgtatgatttataaatatttcttcgaattcaaaaaaaaaaaca

SEQ ID NO: 531865 - DNA, 289 bp, Homo sapiens
ttaaatgggcacgaaatttcactttccttagctgcatacagagcttggcaatgtaatactcgtaattctgtaagtatcaaatatactttccataccagaatttctaagagtgtcttcaggttattagcgaaaagcttctatgttcatatctagacttattctaccagacgtagctactaaagtacagacagtatgtccctaccaggtctatatgtatccgaatatatctacttacctagtagtataactagagatacaaagaataccctactatttactatagtaagta

SEQ ID NO: 531866 - DNA, 382 bp, Homo sapiens
tggcgacctgagcctgcggagagacgtggactgtcagctcttccgagtaccatgtgtgcaagagtgaggagtgtgtgaacacgggcacgggctactcatgctattgaagcaacgggtactactaccacacgcagcggatgcagtgcatgagatatgacagagtgcgccgatgaggaaccgccctgttaaggcggccgctgcggcatcactgtagcctattatcactggacctgcgagagctcactgatgctggatggctcgaagagccgcatgcgatcttacgagagcacagagctctagatgaccctatggaagtgtgctgacctgatgtgtaggctgaccttttgtgcaggcacccattggtggaccgttaggtcttgcc

SEQ ID NO: 531867 - DNA, 245 bp, Homo sapiens
  misc_feature (8)..(8): n is a, c, g, or t
atccttangagctcgtcaatccacatcacagcagcgataacagctccagtgatcacagctccaaagagaaccaggccagcaatgatgcccacgatggggatggggggcggggaagacggctcccatctcagggtgaggggcttgggcaaaccctcatgctgcacatggcaggtgtatctctgctcctgtccagaaggcaccaccacagccgcccacttcgggaaggttccatccccggcaggccg

SEQ ID NO: 531868 - DNA, 1100 bp, Homo sapiens
agtgtttcggggtcgctgtcgtctgctggttgcctcttatgtgtttccttttcctctttgttgcctctgtctgggtttttccgtgtttcaccctgtgtcccgtgcttgctgttctctctctatcttttacattgctcgctttgtggtccctacatggcgcttcctgactccccggtctctgttcttattgtcttcatattgtctcttttgcattctcattgcttctttcaatcgatccttctgagtctgatgcgttgttgtgggtagattctttttcgacgctcgttatctgccttttgccgctgtctcccagtcataaacgcttatgttctctgtgtatatgtacgttagggtccttgtttgagtttattgggtatatactgtgaacaatcgttcgatatttagcatacgccttcgtatgcttgttgtgggcttgtgaatactgaagactgcttgaggttcggtcgattgcatgctgctctttggtcattcatcaaatgtaatgatcagtcaattggttatagttggtctcataaggatatcagtcttttgtcatgccttctatacttgatcatgccctgtatagtattctgtcatcctctcaagttagatggctgataacctcatgtatgctcttacttatgaggcttttttgtttttgttcctgatgctcctttgctacgattatactgaatgcctcaggttcagccaggccctactcaccatgtccaggtattctacccagtgaaaacatagaaatcacccttccacagtgatggcctttgggttcttgagagtttccttatgcatatgtgcactgagagaggaccttgtttccccccctaaggcaataatgtgacagttaatgagctatcaatggtgctctcgtggggttcttaaggcagtaacactagaagctgtgttaccagccagttcaatcctatactcgagctggtttttgtctttgtggtattagtggcatgtgtttttggtactgtgtttactgtgttttccccaatccaaaatgtgattcttggttacacggagttcagtatatggaaactaatttgttctactttttcataactcctggatctatt

SEQ ID NO: 531869 - DNA, 324 bp, Homo sapiens
ccgcttattggggcctttgctgaggaaccacccttcttcttcccacattggctacactactttacattctcaccagcggtgcatagggttctaattgctccacacccttgccaacactcgttttctgtttttttttttttttgggaaatacccatccgggggggtataaagggatttctaatggaggtttggattggaaaaagcaatattccggtggttttttggaggctcggggtcccacaggggcccacagggttggttgggcacagaacctgtgcctttaagtaaggccaacatttcccacccaagcaaagacccaaaagg

SEQ ID NO: 531870 - DNA, 927 bp, Homo sapiens
aggacatgcgtaagggggacgcggcccagatagggctgtgaacgatggtcataaggcggtcacctagtagattttgtgtacttagtttatgccgtccgcatagtataagggatctattcactgctcgggggcagatgcgatgccccgcggaataacatcgatgaggaaaggtgggggaggttcaatttgttgaggagcaactaagggatcatacgtcagcacggtcaggccaaagagtctcgaatagtaagtgcacgggggcgtgaatcagggctcacatgcatggctttgagcttgccaagtgctcagagactgcggttcaacaatggttgcccaagtcgcttgttctcaagactcgcgtgagccatcaaggtagaatccgccgatgaaatggggtactttcgaaaagtgctcgtggacaggtatgatgtgaggctcaccgtatctggaccggagaaggaccctgttatcggacgcgtaaaaaagaacttgcaaatgatatggtgctgcctttcaagggagtcgcgaaggagccctagaagagttggcacgcgagttaggctcccttatgcacgcgggtagattggacttgatgttgagattgcatttgcccagggcatgagacctagcttgaaacgaagctagatgttgcggacgcatcgatgctaatatgatacagtgcttgcgagatgggacacctcctggtgccggtaacaccatatggagaataacggcccacctgattctacagggcttaacgggagaatgagcggaacgctaccaagcaggaataagggcgggttgagacccactggggacgtgacaaacgtacagtatggtgttgaaagggggctaatgagggtgccccgggactaaggaagtgtgaaaaccgtactttaagctctgatgagcccggagacatggagg

SEQ ID NO: 531871 - DNA, 398 bp, Homo sapiens
gcaggcgaccttcaggccctggcggtgctcgatggtatgaacaaaatgactcgcttctaggagcgactcgtgggtcccagtatccagccaggcaaaaccacgctcttagcatttcgacggtcaacgacttgtcatccagataagcacggttgacgtcagtaatttccaactcgccgcgcggggatggcttgatgcttttggcaatgtccacaactcgattgtcgtagaaatacaagcctgttactgcgtagttggactttggcttcactggcttttcttcaatgctcagtgcgcggccggtggcgtcgaactcgacaacgccaaaacgctcaggatctgatacatggtagccaaagactgtcgctccggatgtctgggacatggccgagcgcaagttg

SEQ ID NO: 531872 - DNA, 479 bp, Homo sapiens
  misc_feature (462)..(462): n is a, c, g, or t
gggacatgtgagggctagtgcatgctgctgagcccagacccctcacacagcgctaccggcaacttgcttaacctagaggtggggggtgacgtccctgtcggccccgtcacctggggcccagcacctctccttggctttgcagacgatgttccacaggagcccgtgcccacgctgtggaacgagccggccgagctgccgtcgggagaaggccccgtggagagcaccagccccggccgggagcccgtggacaccggtcccccagcccccaccgtcgcgccaggacccgaggacagcaccgcgcaggagcggctggaccagggcggcgggtcgctggggcccggcgctatcgcggccatcgtgattcgccgccctgctggccaccttgcgtggtgctggcgctcgtggtcgtcgcgctgagaaagttttctgcctcctgaagcgaatataagtggtcgcccggcncggcgcgactcggctgc

SEQ ID NO: 531873 - DNA, 165 bp, Homo sapiens
  misc_feature (3)..(3): n is a, c, g, or t
ggntggtgtgggtagagggtactacagatgcaaatcacccttctgcagaaagctctttggcaccggtgcacttacaatttggtattacctgggagtgagaagaaatattacagcatgcctaagtgacttcttgaggtcagaatggcggcggtggagcatcgtcat

SEQ ID NO: 531874 - DNA, 366 bp, Homo sapiens
tccgaattgtgcttcactggacaagaatacggtggcaatgaatatacctcctatacttcataaactgctatactcaaacgggccagagtcggaagaaccacctattttgaacacaataggttcttcttcccagacaggattcacagcatttccttgggatgttttggtacttaaatgccttcctccttgtatccacaggcaaaccaaacatatctacttccacgtaagtcccaactttcttatcagaaagaaactgacctgaaataatcttaacagacaaagtgtttgccactatcccatctacgatgccttcagtaaatggatcaaaatgcttgtcaggcctcctcatgaactctggcttcaatc

SEQ ID NO: 531875 - DNA, 260 bp, Homo sapiens
ccgcctccccaggttcaagcgattctcctgcctcagcctcctgagtagctgggattacaggcatgcgccaccatgcctggctaattttgtacttttagtagagacgggggtttctccatgttggtcaggctggtctcgaactcccgacatcaagtgatccgcccgcctcagcctcccaaagtgctgggattacaggtgtgagctaccgcgccctgcctgttttgcttttttatcaaaacattttattgtggtaaaatata

SEQ ID NO: 531876 - DNA, 869 bp, Homo sapiens
  misc_feature (169)..(169): n is a, c, g, or t
gggccaggcagtgtttaagtgataagaattagtgatgaagatctaaagggatattttgcaccaaaatccaggtttctgcatctcttgaaaaatccaaagatttcgcaagttcacctaggctctcagaaagtcgcagttgtgggagttgggccggagccagaactcccanattactgtgtgtccgggccactcatcccatcatgtcctgaccaagcatgagtagccattcatcatggcttgcttaagtgttaggtgtactcttaaaacgtacacgcaaacgaagaacagggaagtattcttgaacccatgtctggtgtcacaaaaaggtccttgaattctttccctgtcttttagagtaccgcacccatacttatgctggtcttataagtatgtcgccatcaaagggccagcaggggggctagggccaggaacacctggggtgttagattttgtagcgccaggtggcataccggtaccccatctgttattccccaaggttctacacggaattcccttccagaattcaaggagtccattaaccaggttaccactaaattccctttttgtggggaagagtgcaagccactgggaaggcccttgccctgcgctcgtgtcagagacaacaacctggccaagggaagagacaggggcctgtgaccttctgtgggcttgtgtgccttcactgttcaccaactcaggcttggtgtttgcctaccagggaggcaagagcccgacttaatcactgaaaggaggacaaagttggacaacaacatggtcggtgcagtactgatgattatgaagctttaaggcaagcgacgagattagcctagtttggagggcacggccatacaaggctggtggacgactgc

SEQ ID NO: 531877 - DNA, 831 bp, Homo sapiens
  misc_feature (42)..(42): n is a, c, g, or t
acacttcggaccccctccaccccttgaccgccgtcgcaagcncccgcgccatgtgccgacacccgcaaaggcggccattatggccaggcaccacagaagctaaccccgattttactcacgcaccaacacggaagcaaactaaccggaggacatcaccacacccgatcaaaagcagacatcagacaacgcaacagaagacgagcaaaccaaacccaggcacacagaaccggaaccgaataccgaaaaaccgaactacaaggcaacgacagcagaaaccaccgagcacgcagaccgagccaatcgcaaccaaacgatggacagcacgctaaaaacaaccgccaacgtacaacgtgacgcaaactccagcaccagaacccccatacagatccgccacctgaaacacgctgccacgactaacacccgtacccacacacacccacccaacccaaggaggccatgcccccggaaccgcccgcccgcccacaaggcccacaacacacgacctcacaccaaacaagagccccagcacccccgcgatcacaggccaccacaaacccacggtaacccacagcgctacctaccccgcacaccagacgccctaagcccgcgacacccggaacacagcaaaccacacccgcccgccgaacaaccccgaccccaaccccccacacgcctcgggcaagcccccacgccaaccaacccccccccaccaagcagccgacaccaaggcccccgcacccacgggacaacagcgcgccgcccacacagggcaccccggccgcaccaagccaaggtcccacccaactaccccgccgaccccccgcggtcagc

SEQ ID NO: 531878 - DNA, 346 bp, Homo sapiens
acatgcacacgcacacacatgctctcatcagtcacactagcacacagcacacacacaaagacacagcacacacatgcacacacagcacaggacacgcgaacacagcacacacgaacacagcacacacagcacgcacacaaacacagcacacacatgcacacagcacatgcacacacagcacacacataaacacagcacacagcacacacatgcacacagcacacacgcatgcacagcgcacatgaacacagcacacacaaacacacagcacacacatgcacacacagcacacacactcatgcgcagcccatacataaacacagctcacagcacacaaacacgcagc

SEQ ID NO: 531879 - DNA, 143 bp, Homo sapiens
  misc_feature (135)..(135): n is a, c, g, or t
gatcccccttctttcagccttcccaaaggtgctgggattatgggcattagccactaaacctggctacttttaatcttattagtatcttttgatgagcagaagttttaaattttgatgaagtctagtttatttgtnttataatt

SEQ ID NO: 531880 - DNA, 819 bp, Homo sapiens
agaacaccaactgctgaggctgcctgggaagaggatgatcctaaacaaagctctgcgtgctgggggccctcgctctgaccaccatgatgagccctgtggaggtgaaggcatgtgggatccacctctggctccctgctcctttatagagatggacaggggttgtaaaacaaaagttgaaaagtcagatagttaaaaggggaagtgaactggaaggtaccttaaactttcacaactttattaaccgtggctgctcccattatgatttgttcggcagtggaagtttcacctgcttctccagagcacttggcgtcttgttccaaatttcctttcttcaacctcacaccagagtgccctggtcaggctggctcattcattaggcacaatgtgggcagtgcaggggaccctccatactgtaaagccacatgagaaggttttaactcgttttaaaattagaaaaataatggaatattagagcccaagaaaatgttttaacttttaattcagcctagattatatggtctttataccaattcagtcataaaatataattgtccatattttgtggaggaagaggcccatacaagcaagaatgctcagggctcacatgtcagaatgcagccttggtcatgactgatcctggccttcgtatggttctgctacctgtgtgcctgcccgtcttccccaaaatctatgtggtcctcgaatatagcaactgtcattcaatacacatgtttgagcaccacagtgagctaagttttaaggattcaacgatgaaaagtcatgctgtcttccctgcagagggtgctcagattagtgatg

SEQ ID NO: 531881 - DNA, 396 bp, Homo sapiens
tgtacatcacttacaagacagataggagaagagttatatggtaatacttaacaggccaggcacagtgactcgcgcctgtaatcccagacactttgggaggccaatacaggcagatcacgtgatgtcgggagttcaataccagcctgagcaacatggagaaagcccatctctactaaaaatacaaaactatctgggcgtggttgcacatgcctgtaatcccagctaccctggagtctgaggcaggagaatcacttgaacccgggaggcagaggtttgtggtgagccgagatcgtgccgttgtacttcagcatcaacaagagcgaaaccgtctcacaaaaccaaattagtcgggcacaatggtatgcatctgtggtcacagctctttgggagactgag

SEQ ID NO: 531882 - DNA, 341 bp, Homo sapiens
cccccatgattcttagaaccaggcgacttggatttccttggggttgacaatcgagtagtattcccgattgaggcccccattggtataataattacatcacaagaggttttgcattcatgggctgtccccacattaggtttaaaaacagatgcaattccgggaggtttaaaccaaaccattttccccgttacaggacggggggtatattagggtcaatgttttgaaatttgtggagcaaaccccagttttatgcccttggtcttagaattaattcccctaaaattttttgaaatggggccggtttttaccctatagccccccttttaccccttttagagcca

SEQ ID NO: 531883 - DNA, 187 bp, Homo sapiens
ccccccccgggggggtttttttttcccccaggggaaaaaaagggggggggggggccccctttttgggggcgttttttttttcccccccccccccccccccggttttttttttttttttccccgcccccggggggggggccggcccccttttttttttttccggggggattttgcccccccgggggga

SEQ ID NO: 531884 - DNA, 289 bp, Homo sapiens
gctcaaatatcttagacgtctcactctgtcacccaggctgatgtgcaatagcacgatcttggttactgtaactccacctccggggtaccggcacattctcctacctcagactcccaagtaggtgagattacaggtgcccaccaacaatcccggctaattttaagtactataagtagagacaagatatcaccatgtacgccaggttggtctccacctcttgacctgacctctggagatccacccaccttggacttcccgtgtgctgggattccaggcgtgaacaatctcg

SEQ ID NO: 531885 - DNA, 439 bp, Homo sapiens
gggacctcctgcgacttcccgacgttgcgactgcgtgtacttctctttgttttggagcggctcgagacctctgccatgagatagtgtggcaagctggttcagcgaactggcccattatcgtcggccctcatgacatcacggcatatccgcgccacgtctctcaagcaacgttgcgatgcaacctgtggtggggcaccatgtgccacaggaatccaaggagggaggccgattgagggacccccaatagatggctccacctcatatggacggcaaaatacaagaggccgcccgccattgcgttcccatgcaggatcaaagccgacccgtcgcctgagcaacgtttcgcccctgttagcctacacacgtcgaacttggtcatttcggctgttcgacaacgggcccctctcttaggacccactttcgagcacaattcgcgctg

SEQ ID NO: 531886 - DNA, 1199 bp, Homo sapiens
gcggagtgcaaccaccagccaccggaagtgctcggacgacgccccccagcacgcaacaaaccagactcaccgtagtacaccaccgcactcagacccccccgcggaccgcacgcacgtcatgcgtcagcgccgctccaggggccgagaacacatctcctggtgtgtcctgcagcggcgtactgctgccggttaagacgccagcgctcatcgggcagaacaaactcgcctgggtgcacagcgcacttgttgccgaaaataattctactcccaccctggccggcagaacatacacgctcgcatcagcacgcccgcgcgtcagtaaatgaaggcgccgcgtagccagtctcagagccgcccgtctcatcagtttggctcgttgacgaaatccgcgctgcacaaacccttcgcgcgtcgtgccaccgcacaagccgggttcataaatacacaggagtctctgttctatgttgtggagccacacaccttgctactctacatgaatatgataataattgtgttttgatcagcagagagaacgacacacacgaccgacgcacagcacacagtacccaccgcgctgtgcgggcggagctcgttacggcggaccccatgcaagtccagagagtgcgtgccacactcgcggggcgacagcgtcctctcactgagcagtcccacttcgcggcagggcactcaggggggggttctatctcctgtgggaggaggctgtcgtcgcaccgaggcacgccgccccctacgctcgatctcttttctgaggggcgcactcctcaggaggggttcatcactcccctttctctctttcttgatggcgaccaccgggcagagaagatatctcccctgaggccccccgctgccccacactcagcatcgttgggtttggagcttcactcacacacaatagcagggggccgccctcaacaaaggagggccctcccttcccacgacaaatatcgcctgccctcggcacgacggcccacaccttcgaaaagagggctcgcacccccgacgggaggagaggcgaatgccaccccacacgggggggccgaaaacctggggggcccggctaagcgagcccttctgtggggggcgggggacactgccagacttttttttgtttttgggggagaaaaaatgggtttttttttttaaaaaaaaaaagtttaaaaaaaagttgtccgagccca

SEQ ID NO: 531887 - DNA, 859 bp, Homo sapiens
ccgtttaaaacacactattgcccccacccctcttgctcctcccccccggggtaaccgttggcattcccaacctggtaagagcttcctttccgcactgtacacctttctaaacacagaagttgtgtacccgcccaaccacatatggcctcccccttccaatatataggcgaccccccaccaactggcgaaaaattatgccccccagttgtgcaaatccacttaacacaacttcttcgggaaacaaccccaaataatggtacccgttgtcgccaacgcccgcttggtgccactaatcttcacccacacaagtcacacgttggtcctaattcttagcaccaacggatttctgggaaatccccccccgccattcggcgtagtaaaacaaacaccccaaaagaagtgttgttttcccccccacaaagcgtcctaaattctcattattgggcgcacaacattttctcccttacatatgagtcttgtaactacacatgggttctcctctctccgcaaaagaaaattaactctggggtgtacacgacaccacatgtagcttaaatagttcaagattaaatctaacaaattcttcaaagagcatttaaaccccttccccctgaaaacaagtgtttgtaacagtcctcattctactagaagtgttttatataaaaacattctttcgccccaagtaattgtcatcaccccccctccccaaaaattgttattattcttcctttctgagtcaagactacttgtttttccccgcccgcctccaagaagttccctctctaatctgtcccaaggaatcaataaccggcgtgtgttggttttttaaaaaacaaaaaaatgaaacaacccacaaaac

SEQ ID NO: 531888 - DNA, 265 bp, Homo sapiens
cagagtcatggagcctactaataacatgaaacgggcagacctttgttggagcccatgacgaaggtgactgtcccactgcacaatctctggaccccagaatctctggaccaggatatttagtaaggccttgctgggaaacacacatacacctctatgtgcgctgtcatcaaatgaggtgacgcctatattacatctagcccagtgctgcagcatattaggtggtccataatgcacagtatgccagctgaccggctaccgagctcga

SEQ ID NO: 531889 - DNA, 81 bp, Homo sapiens
cagcaggaggactcggccgtgtatctctgtgccagcagctttccagcgggggagacagctagcacagatacgcagtatttt

SEQ ID NO: 531890 - DNA, 220 bp, Homo sapiens
gtaatatgcgattagtatcttaaaagaaaataaaattgaagcaaaaatagcctaagatattgagacaagagagactagaactaggcccaagagcgcagcactaggagtacatgctcctagaacacacatttattctatacgtaatattcagaagagaacacgaaagagggttaggtctaccgcctactactaccctaacatagttgaggaaaccaagcgc

SEQ ID NO: 531891 - DNA, 155 bp, Homo sapiens
tatcagccggtaccctataggcttggagcaggtggtcccagcactagagtttaaaactcttataataggagttataatagtaacagaaacctgcttactgctcccttatttgctacctgtacttcttcaaatgataaaaagcttcatcagctacc

SEQ ID NO: 531892 - DNA, 177 bp, Homo sapiens
taagtgctgtctatgtgacagatccatattattcatgtcctggcattcttgctcacgacgtgtcatccccctgcactccggcctgtgctctagggcacgagtccgtctcaaaaaaccatgaatattctaggctcaaatggtattacacataagtctaccatacattcaagccgtcta

SEQ ID NO: 531893 - DNA, 150 bp, Homo sapiens
gagaaccagtcggcgacgcagtcgtaggccacgcccttctggaggacctcggagccatgtacccgtgggtgcccaccgctggcatggggcttctgctaggagaagtcacaggccaggcccaggtccgagatccgcacggggccatgcgcg

SEQ ID NO: 531894 - DNA, 254 bp, Homo sapiens
  misc_feature (40)..(40): n is a, c, g, or t
tacatatacaatcgagctggtaccctcggatagggccaancactgaggcacacgtcgtggtgtagagtgggttctcatggcacgcgtacctcaccagggctccaattagtaaaatttaaaaaaaaaaaaaaaaaaaagcttggcaggagcggccagttgtttggggctgggccccaggtgggggattctctgccttattttgtggcgcccccgagggccccggtttcccacctcatcctttggcccttatcgag

SEQ ID NO: 531895 - DNA, 617 bp, Homo sapiens
tcctggcttaagtccagggcatagcacagcaaaatctaccctttggacgttcataaagaacatgcatagttctggcctcgtggcggtcgcagctctcccagggccctgctcttctctgagtgaccactgccctctggtctggtggacgcctgggcatctgtttctatgaaacaacctgtttgtttctgtgtttcaaatatttgtgtttattatggaagagacattattttttcatggaattctgaagactgtcatttttgaaggataagcaggttttggacaatttgcaattcttacaactgtctgtaaatttacattactgttataaatgagaagacccttctgatattcagacaccttgttaaatactggctcgtcattgatgcgtgcagcccagtgtgggctttgtgggggtttgaagtgtgtgtggtttgtagcacacggacattcccctcccaacgcagaggcatctttggcacgagcttcaaccgtaaatccagaaacaagcttgctggctttggacttcatgggccggttaagtaaccccccatagctgaggactgatttaaatgtacttttaattttgtccaacaataaaaaaaaaaataaagcaaaaa

SEQ ID NO: 531896 - DNA, 103 bp, Homo sapiens
gtgccatccctgtcgtctaaatctgcaattggacattaaaaactaaaagtaagaggatctccctgtgttgcccaggctggtctcaaactcctgggctcaaggg

SEQ ID NO: 531897 - DNA, 622 bp, Homo sapiens
  misc_feature (525)..(525): n is a, c, g, or t
  misc_feature (539)..(539): n is a, c, g, or t
  misc_feature (622)..(622): n is a, c, g, or t
ccggacgtgtcgacagaagacgacagaagggagagtatgacactaggattcagattggtgaaagtttatagtaccaagaaaacagggatgaggctcttggattaaaaggtaactctgttcactgattagctatgacatgagggttcatgcctctaaaataattgtaaaactttttatctgggcccttagtacccacctaaaaccatctttaaaatgcaagtggctgatatgggagagggggatgctaaccacagggcctgagaagtcttgctatatgggctcaagaatgccatgcgctgccagaacatgtgcacaaagtaaaatctacacaggacttctagggggggtctctcctccaggacgctgtatagtgagaccattacaatgcagcaccccacagtgggtgccttcagaaatatagtccaagctttctctgtggaaaaagacaaaactcattagtagacatgtttccctatagctttcataggcaccagtcagaataaagaatcataattcacacaaaanaaaaaagaattggnaaattgtaaaaaaggaacaataaaattattaaaaaaaaaaagggctgggacccaattcgcctatgtgagtcgaatacaatccn

SEQ ID NO: 531898 - DNA, 383 bp, Homo sapiens
  misc_feature (75)..(75): n is a, c, g, or t
atggtggccatgccgttaatcccagtactttcagaggcaaggggggaggatcacctgaggtcaggagttcgagancagcctggccaagatggtgaacaccccatctctactaaaaatacaaaaattagctgggtgtggtggtgcacacctgtaatcccagctactcgggaggctgaggtgggaggatcgcttgaagccaaggagtatctgggctgtaagtgcgctatgccgatcggggtgtccgcaactaatgttcggcatcaatattggtgacctccctgtgagcggggtgacccaccatggttgcctaaaggaggggtgaacctggcccagtgtctggcaaacgtgagcaggtacaaaactccctgtgcttgtcggtgcta

SEQ ID NO: 531899 - DNA, 419 bp, Homo sapiens
  misc_feature (133)..(133): n is a, c, g, or t
  misc_feature (141)..(141): n is a, c, g, or t
  misc_feature (159)..(159): n is a, c, g, or t
gtgtgggtgtccctcttgctctcccttcaggtcttggtttgttctgaagggacgttttatagtcactatccacatgccagtgtaaatgggcatctatacgtggtcagggtgtccattcctaatcatggggggngggggggnccccaaagaatgccaccnaagcattcagaaaggagtctgaaagggtggccacagccccacgtggtgtgccctggaggcttaggttggtctgaggttggcacctcaatctacaccagagcccagggagtcccagaggcaagtttcacagaattgtcaaatgatcccatttccttgagtctgtttttttttttgtttttttttgtttttttttggcagagataatcgtgtcttaaaagttgtttttaaatgacaataaaacaagccagaatgtcaaaaaa

SEQ ID NO: 531900 - DNA, 830 bp, Homo sapiens
  misc_feature (1)..(1): n is a, c, g, or t
  misc_feature (683)..(683): n is a, c, g, or t
  misc_feature (701)..(701): n is a, c, g, or t
  misc_feature (709)..(709): n is a, c, g, or t
  misc_feature (718)..(718): n is a, c, g, or t
  misc_feature (759)..(759): n is a, c, g, or t
  misc_feature (767)..(767): n is a, c, g, or t
  misc_feature (777)..(777): n is a, c, g, or t
ngaggtgcgggacggaagagggggtgaaggccagaggctcggggcttcaagaccgctgtctggagtccccctttccaggccatgtcggggcccacctggctgcccccgaagcagccggagcccgccagagcccctcaggggagggcgatcccccgcggcaccccggggccaccaccggcccacggagcagcactccagccccaccccagggtcaatttttgcccccttccatctgagcagtgttaccaggccccagggggaccggaggatcgggggccggcgtgggtggggtcccatggagtactccagcacacgcaggggctccctgcagacagggggggccttcgccctggaagcctggacgccgagatagacttgctgaggcagcacgctggccgagctgaatgggggtcggggtcatgcgtcacggcgaccagaccgacaggcatatgagcccccgccacctcctgcctaccgcactgggctccctgaagccaaatccagcctcgccgctcccagcgtcttccatatgggggccccacatccagccatcttacactaccgccagcaccccggctggcccagccttccccgtgcaagtgaaggtggcacagccagtgaggggctgcggcccaaccaggcggggagcctctcaggcctctgggcccctcccgggcccccantttcctctcccaggccangtgaagtntgggggccnggtataggagcagagagagcagggcaggggcaaagaggaantgctgggnctctggcctnagaagaggagaggagcgagcacgggcccaggtgccctgagcagcctcagagga

SEQ ID NO: 531901 - DNA, 527 bp, Homo sapiens
aggcttcttagctgccatttggagatttaggtcagggcaactctgactacaccctttgatatttcttacagtttccagttggagcttccttcttttgctggtagagatttaggttaggcaagtgcattctgtttttttctgaagttccagtagggctttagcagggaagtaaaactattcagtaagtaattgcaaacaactgtatgtggaatccaacatgttgcccttaagagttaggtaattggctgggtatggtggctcatgcctgtagtcctagcactttgggaggctgaggcgggtggaacacctgacgtcaggagttcgagaccagcctagccggcgtggtgaactaccatctctactaaaaatagaaacaaatttagccaggcatggtggtgcacgcctgtagtcccagctacttgggaggctgaggcaggagaattgcttgaacccaggagacatgggttgcagtgagccgagatgtcaccactgccctccagcctgggtgacagagcgagactccattt

SEQ ID NO: 531902 - DNA, 716 bp, Homo sapiens
ggctcgccatccatatttatttggaaaaggtcaaaaggagcatctatgaaacaagggaggggtgcagggcggaagcagcgcctcaacagccaggaactatgtaggcaacacaagcaggcacagcgcggccaccacgtgctccacacgcctcacacaagccaggcccgcagggccttcggagagctagcgaggttacatttcaggcagagtggccctcttcccacccaaacccacagaaccccaaacaaggcatcaccaggaaagacacgggaaagccaaactcacagttgtgacccagggacagaaaaacccttgggccccacgtgatgtgctcccaagccaccagcagcgtgctctccaaaactccctagtgctatccacagggggaatttacattcattttaaaaagccgtgatatatcccaggctctctaactcttccattattaaaacggccttggtttggctgcttggtccacactgagaaggcccaggaaagcggggagggcccctgatcagggcaggaggccacctcagaaagcccaggcccaccagggcccaagcacttgtcggggctcagaacagggcctcaaccaagagggttgatggcctccagtcaagaaacgggggctcatgccagagagctctctcctcctccagaaggcgccatgcaggggcgggctaaagaccccagtgttcaactcattagcgagagag

SEQ ID NO: 531903 - DNA, 196 bp, Homo sapiens
  misc_feature (130)..(130): n is a, c, g, or t
cccctgtatacctacacgcgtgcggatgtggtgcaggagggcggctgcttccctacttaccacttgggcttctcttgagagaacagcccagctgcattcccggctgcttcttctctccagcgtgtgtttnatctgtggatttgcaggcctgtggtgtagcctaatgcgggagctactgtgagctgtcgtgggtcca

SEQ ID NO: 531904 - DNA, 193 bp, Homo sapiens
gtgtgctgtgttcatgtgtgtgctgtgtgtgcatgtgctgtgtgcatgtgtgtgctgtgtttgtgtgtgtgctgtgtgtgctgtgttcgcgtgtgctgtgttcgcgtgtgtgtgctgtgtgtgcatgtgtgtgctgtgttcatgtgtgctgtgcatgcgtgtgtgctgcgtgcatgtgtgtgctgtgtgctgt

SEQ ID NO: 531905 - DNA, 742 bp, Homo sapiens
gggcgactacgcagatggccctgagtaaccagcagaaggcggtgcttgatgagcgacgcgggtgatgggcaccgagcaccccaagcaccatccaggaatacatgcacctggtcctgtactgcttcgccagcagccagctgtccaccgtcctgagcctgctgtaccgagcccgctacctcatgctgctggtgttctggggaagaccaccccgagatggcgctgctggacaacaaacatcgggctggtgcttgcacggggtgatggagtacgaactgtctgctgcgcttcctggagaactgcgcttgggcgtcatgcacgcaagtacctacgggcccaatggccctcaatggtggtcctcagtccaccaccttgtctgtccgagtctacgagagcaaacgctgagttccggtcggccctgcagcacgagaatggagggttacaccattctatcaagaccgcatgctggtgcgaggacccatgatgacctgacctctggcacagctccgagttaccgtcacagtagccctgacaccatgcatcgcctgtggcccatgcatgctgcacacattgaacggagagtcttacctggcaacgggatccacgcggccaacattcgccgcgccttcaaaggttcaccggtcacaccaggcactggcccagtaagtacattagggagcgagagtggaacctgtcatcaaaccagggcactcctacttcatttcttctcaggcaaacaacaccg

SEQ ID NO: 531906 - DNA, 978 bp, Homo sapiens
gcgcgtggctggcgggggtgcgctatctgcgggtgccgtcctgcccggacgccgtcgcgtgccgtggagactgacagccgaggtcagagggtgatgctgttgctcgggcccgggactggacagcgatccagagctgtccccgagaggagtggaggtgtcctggcagagaggaacgtctgagaacagaggaacggcatgacagaggacaggcagcagtctgcagggagttgcgggcgcaattgttggtcccacgaaacctcgcactgaccatggctgcctcggcgtggccgtgactggactccgtggactacctctgcttattgggccccaatagcacaatgaactggtcgtttcacgaacacgatggagacagtgtgctcctgcgtgcacatgtaatgtagcagtcgagcatatggtctccgcgatgagacagcttctccatcctgactaggcctacctcgtgatggagtgcttgcgaagtgcgtcggccggagatcgttgacggtggcacgaaaggggaatgcccgtgatagcagggagctggatgaggagggctctgatcccccccttgtcggggagggccagcgcattcgacaggtgctgcagtgctctcctagtgggttcagcgcggggcgggcgtgccagtgcaggctgctcagacaacaggtgagctcctccggtcggtggggggcgggttcaccagcaggcaggggtgagcaaggctttcagctcctcggtggtgggggcgggatcacagcaccagagctccgcagggccgttcctactcagaccttctgggcggtgacggtgtcacgtgtgcggtcattgcctcaccgcgaggtggtgtctggaatccggccctggctgggggctcagccagattggtgggcgcgtctcccctccgcaattaacgagggcggtgggccgcggggagctggcggccgggccgtttccgcccggccaggggggggtttcccc

SEQ ID NO: 531907 - DNA, 176 bp, Homo sapiens
ccacgcgtccgcggacgcgtgggtccagaaattcaagacccgcctgggcatcataatgagaccccatctctacaacaaaatttaataaattagctgggcacagtgttcacacctgtagtcccggccactcggggctgaggcaggaggatcactggaacctgggaggttgccactgc

SEQ ID NO: 531908 - DNA, 785 bp, Homo sapiens
  misc_feature (502)..(502): n is a, c, g, or t
  misc_feature (612)..(612): n is a, c, g, or t
  misc_feature (648)..(648): n is a, c, g, or t
  misc_feature (659)..(659): n is a, c, g, or t
  misc_feature (690)..(690): n is a, c, g, or t
  misc_feature (701)..(701): n is a, c, g, or t
  misc_feature (735)..(735): n is a, c, g, or t
  misc_feature (759)..(759): n is a, c, g, or t
ccgcgctgcaggaattcggcacgaggagagagagagagagagagagagagagagagagagagagagagagagagagagagagagagagagagagagagagcgacagtgctacagggactgccacctgtggggagacattagaccacaatgaagctgccgactgacgcgagtcccatctatccagcttgctgcttcttgctcatcccattctacctatccccagactctgttgagtgcatctcttcttcacctatgtaccgcagctgcacgtgcggatcttccttcctctaccccagttgcccaacctagttcattccagcatcaaccagcttcaactgactctggactatgcaggtcacgctgcccaaccacggactacttctgtacacgatagtcagtaattgaatactatgatcatgagtcgcttatcgacctcatgcccctcttgctagactatagtactactatctcatcggcaaggcttgccctgactacagatcanggctgactagccaccatcactgcagactcagacgtatgttctataccagtctgctcgcagcatgttgtacatctcgattgagcgtcctgctctaatttccatcctcccgngtagtctatcttgctcccgacttagcggactatgtntcagatggctntcttcaggcgagccgaatctcatctgatcangcttgcagtcngactgtccatttatgacttgagcttgactatgangagtctcattatgaactgatctantcggtctgttctgcatgtcacgcctg

SEQ ID NO: 531909 - DNA, 209 bp, Homo sapiens
  misc_feature (124)..(124): n is a, c, g, or t
ccagtacagcgctctcgtcacatgtgtatgccgatactgaagaaggcaagacaattcagacgtgatacgtatccaattatgactgattgattattatgtgatgctagtattattaaaattatgncacaccctggctaagctcgcgggaaggatcttttgtatgcaaacctactgctttagggaatgggaagtgggttcttttttggctg

SEQ ID NO: 531910 - DNA, 777 bp, Homo sapiens
ggatctctggacgagggtgcacgaacatgagcccaggccacagtaccgctattcacgctctgtgcttgtgccaagggggcaatggcggcttcctgtgttctacatgcacactgggcagaagatgcctctgatttggtctgggtacctggaagagtgacgcctggctcacggtaaaacgcagctgttaagtatgcccttagcagtaggctaccgccaacattgattgtgctgctatctacggcaatgagcctgagatcggggaggccctgaacgacgcacgtgggcaccaggcaaggccggtgcctcgggaggagctgctcgtgacatccaacgcctgtggaacaaccaagcaacaccccgaggatgtgcgagcctgcctccggaagactcttggctgacctccagctggacgtatctggacctgtacctagatgcactggcccttacatgccttctgagcggggagaaaacacccttggccccaagacatgctgatggggcctaataatgctacgaaacacagccactacaaaggagaacttggaaggtcctgcaaggcacatgcctgggataacgggggcctggtgcaaggagcctggggacctgtacaaacttccaacagatcggcaggatcggatgaccatcactcagtagcgggataccgagactcaactgacttgcctttgtattgccacccaaccttggcctcaacatgaactcatcgcccctgccacgacagtacctagagtactgtcacacactagggatcctgaacgg

SEQ ID NO: 531911 - DNA, 263 bp, Homo sapiens
caaagcactccttccctgataccgagaatctaagaagatcgatcgtcacatgtatcacagcctgtacctgaaggtgaaggtgaatgtgttcaaaaacaagcggattctcatggtacacatccacaagctgaaggcagacaaggcccgcatgaagctcctggctgaccaggctgaggcccgcagttctaagaccaaggaagcagtgttacccgagctttgaatttcggaaatcatggttcatttggctggtttcccttgtatat

SEQ ID NO: 531912 - DNA, 371 bp, Homo sapiens
ggagagagtcttcagagcctacagcagtgtgttcgtagtgcaatatccgtcctgtcagcacaggtcaagttgctgaatctgttacatctcggcttcctactcgtcgcagtctcggggctcctcccttgcaatgaaagatgcttttcagtattaggttggtttcagtctctttcacctcactttccaaccttcctcgcacctgctttgcatatgcacaccccgtcagctagcctgagtgtcagaatcgtagtacaggccaccgttccctttccatcggcccctcagcccatctaggggcctcctctaggcccctctgtgtccactcctcgtgcctccctcacacctcaaacacctagcgcgaatgccagctc

SEQ ID NO: 531913 - DNA, 314 bp, Homo sapiens
gcacgagccaaagagcagctccatattaaaaatgatttttgagggatagctcacacctgtaatcacagcattgtggaagccaaaacaggaggattgcttgaggccaggagtttgaaaccggcctgggcaacatagtgagactccatctttgcaaaaaataaaaaattagccaggtatggtgtcgtgtacctgtggtcccggctgctcggaaggctgaggtgagagaatcgcttgagcccaagaggtcaaggctgcagtgacctgtgatcgtgccactccattccagcctgggtgacagaatgagaccctgtctc

SEQ ID NO: 531914 - DNA, 265 bp, Homo sapiens
tcgatacgacttttcttttctttctttcctttttctctttctttctttctctatctccttccttcctctttcttttctttctctctctccttccttcctttccttcctttctcttcctttctctttctttcccttccttcctttctctctttcttttccttcccttccttctttctttctttctctttctctttctttctctctccttcctttcctttctttctctctttctttctctttctttccttccttccttctccctctt

SEQ ID NO: 531915 - DNA, 235 bp, Homo sapiens
gaggcccacagttggtagctcctctctgtaggcaggtcatctgtccagtgctcagttctcagtggagaggaggccctggaaagggtggcttctctctgctggcaggttgtctctgcagctctcagtggagaaggtagctcttctctgcagccagccatcccattgtctccagctaccagcagagagtactcctctctgcagctggtcatcccaacacctctctggcctctttgtc

SEQ ID NO: 531916 - DNA, 127 bp, Homo sapiens
ctctagacgatccccgagtgtcttcaagaaagaatataaaagaaaatgaacagtgtataaatctataaaacggaagttcattacattcacacagattcaagatggagaagaagacacaatgatattc

SEQ ID NO: 531917 - DNA, 474 bp, Homo sapiens
cttctgaaccaccgcggattgaattgccatcgagatgctagcttttaaagacagtcaattcgtttgaattccatccagtgtgtacaaagcaacgcgataatctacatcatgacacacttgttacttgctatccctcattggtgtagtggccgctattattttatcctgcttatatctattacctgtgttaaattattatccactacaaaactactgatggtttatgacaacgtagggtaactacagttcattctgttccaggttatataaaactgcatttcctgaatttggttaaaaactaaggatgatggattgcaaaacagttcttttaaattagtttatatgctttaggtgtattggaatttgccttcttgaacttcctgagtcacacagaaagcaactgtacacagtagaattctgtggcgcagaccatgctgtattaacacatcacttgctgtttcctactgagtgtac

SEQ ID NO: 531918 - DNA, 148 bp, Homo sapiens
gaaatgtatcccacatatgggccattaatgtgaaagaagattgcacaaggatgttcactgcagctatctatttgttaaaatgatcacctagaacagatagtgaaatctgctttaaaaaatatctgtcagttgattgggttgacgtcag

SEQ ID NO: 531919 - DNA, 430 bp, Homo sapiens
tggtgactcacgcctgtaatcccagctactagggaggctgaggcaggagaatcgtttaaactcaggaggcggaggggcggaggttgcagtgagctgagaccgccccattgcactccagcctgggcaacaagagcaaaactccgtctcaaaaaaggaaaaaaggataacatggctgagtgcagtggctcagccgaggcgtgaagagtgcttgagttcaggagtttgagaccaggctgagcaacatagcaagacctcgtctctactaaaaatcaaataaatgagctgggcgtggtggcgcgtgcctgtggtcacagctattccggaggctgaggtgggaagatcgcttgagcctgagaggtccaggctgcagtgggctgtggtcttgctactgcaatcctgcctgggcaacagggagacacccagtttccac

SEQ ID NO: 531920 - DNA, 115 bp, Homo sapiens
  misc_feature (8)..(8): n is a, c, g, or t
  misc_feature (68)..(68): n is a, c, g, or t
aatccctngtttacattattaagcttcctactaatataaaaataatggaaatctttttttgataaaantcattaacgactcggacggatttttaaaaccctttgtaacagtattg

SEQ ID NO: 531921 - DNA, 184 bp, Homo sapiens
atgccgtctccaagtggatctcgcatggattgcagtgtactccgtgcagtgtggtgacctggtttctgattgattgcagtgaatcgccatgcagcgtggcccaatggatctcgattgaatgcactgtattccatgcagcgtgtatgaatgcagtgtattccatgcagcgtgaagaaatggaacc

SEQ ID NO: 531922 - DNA, 160 bp, Homo sapiens
cctcagaagaatatgtcagcagctgctggacacatctgagccagcaatccccatagcaaccccaaatgtctgctttcttcaaagctggagagtcatccacaccgtcaccagtcacagccacgatagcaccctgtcgtttggcagctcttccacatatgat

SEQ ID NO: 531923 - DNA, 847 bp, Homo sapiens
ttaggctaggtacgaggctgggtggtgtttaacttggacacttcctccaaacaccccaggttcctttgcccaacctcctcgaatacagcctctctgggagtttccctctccccgactcagccgcgctggtccctgccttttcagcgctacctgccctccgtctgggacctggctcctttcctctcgccggtgtttcctctgccacccgctggaggggagtggctggaccccagcctccttgcctgcctgcccctgcctccccgcctcccctgcctggccctggctctgggcctgctgcaggctgcacctatgtgctgctggtcctggaggcctgagggcgaccacaagcagcctccgcctcctgctgctcctggactattctgctgctgggctagtcaggctgtgtgacccgtgacttgcgccctgtgcaagtggcttcgctgtgtgcgacgctgtctgccattgtggctctcgcttgtagcatgcgaagaggagagtgccagccgctgcatggggcccgggctcgggcctgggctgggggcctcctgaaaaaagccgagaggcgggactggaggcagtcagctgcccagcgggcaggacacggggtcccggcgcggaggatatacgggcgccagcatgggcttggatgcatagctggaaccaacatacgactgacaaggcagtacagacacagggcctggtctgaaaccaccatggaggtccccaatccaaaaactcgggagcccaaggcctacgatatccaacttgggacatcgcgctgtcgtgcatagtgggggccaacgatacatgactagaaaacgtcaagggcctggcacaaaaggccggc

SEQ ID NO: 531924 - DNA, 300 bp, Homo sapiens
  misc_feature (35)..(35): n is a, c, g, or t
  misc_feature (86)..(86): n is a, c, g, or t
  misc_feature (91)..(91): n is a, c, g, or t
  misc_feature (94)..(94): n is a, c, g, or t
  misc_feature (108)..(108): n is a, c, g, or t
  misc_feature (166)..(166): n is a, c, g, or t
  misc_feature (169)..(169): n is a, c, g, or t
  misc_feature (189)..(189): n is a, c, g, or t
  misc_feature (193)..(193): n is a, c, g, or t
  misc_feature (199)..(199): n is a, c, g, or t
  misc_feature (208)..(208): n is a, c, g, or t
  misc_feature (214)..(214): n is a, c, g, or t
  misc_feature (277)..(278): n is a, c, g, or t
  misc_feature (295)..(295): n is a, c, g, or t
tctgcagcaaaccagagacccagcaccagcgaggnaccagtcccttgctcgctgttccagtgacctcccctgcagagaccccagcntcacnggngtgctcagtcagcnccacaatgcgggaaaagtggggagccacactcaagggagcgcagggtttctgattggngcngtagttggtcccagggggcntggnggggcnccaacagcngtggcnctcatcaactcttctgggagacacggtgcaggctttgggccaggatgtctgtctcctcgtggnnttcacagctttggtgcnagctc

SEQ ID NO: 531925 - DNA, 254 bp, Homo sapiens
gagagagagagagagagagagagacttcaataacttttttttgcattcacaacttagctgtttggagcaagaatctagctttcagcctgtctaggctttttcacagcccctttctccctaacgttaatcatttctacgcttttgatttaaagtcgaaaatatcgcgactgtcccttccagatgatacttagaggcattgtaaggtattaattccgttattccaagattctttgtcttaaggatagggaacccaa

SEQ ID NO: 531926 - DNA, 206 bp, Homo sapiens
acattaagtcacaaatacagtcctcgatttatatagcccatacacataagtatttgtctaaaacatagtcttctattgtaacatctaggccctatccaccactagtgctatggtctgagttcacacaatctagtatgtaacctagtagtcttaccctagtcactatactactggctactacctactcctagctaaaggctttgtta

SEQ ID NO: 531927 - DNA, 267 bp, Homo sapiens
ccggggggggggttttaaaaaaaaaggggccccctgggggggtccccctttttggaattgggcccgggaccccccccccgcccccaaatgggggttttttaaaaaacccggggtgggggggccccttaaaggcccctttaaaaaaggaaggaaattaacccggcccccccccggggggttttaaagccccctgggtttaaacaagggtttggggaaaaaccccccccgaattttttttttgggccccaaaaaaagggggggccccca

SEQ ID NO: 531928 - DNA, 898 bp, Homo sapiens
  misc_feature (49)..(49): n is a, c, g, or t
  misc_feature (135)..(135): n is a, c, g, or t
  misc_feature (157)..(157): n is a, c, g, or t
  misc_feature (162)..(162): n is a, c, g, or t
  misc_feature (171)..(171): n is a, c, g, or t
  misc_feature (187)..(187): n is a, c, g, or t
  misc_feature (214)..(214): n is a, c, g, or t
  misc_feature (224)..(224): n is a, c, g, or t
  misc_feature (301)..(301): n is a, c, g, or t
  misc_feature (394)..(394): n is a, c, g, or t
  misc_feature (396)..(396): n is a, c, g, or t
  misc_feature (398)..(398): n is a, c, g, or t
  misc_feature (417)..(417): n is a, c, g, or t
  misc_feature (429)..(429): n is a, c, g, or t
  misc_feature (435)..(435): n is a, c, g, or t
  misc_feature (512)..(512): n is a, c, g, or t
  misc_feature (534)..(534): n is a, c, g, or t
  misc_feature (671)..(671): n is a, c, g, or t
  misc_feature (681)..(682): n is a, c, g, or t
  misc_feature (748)..(748): n is a, c, g, or t
  misc_feature (770)..(770): n is a, c, g, or t
  misc_feature (777)..(777): n is a, c, g, or t
  misc_feature (793)..(793): n is a, c, g, or t
  misc_feature (796)..(796): n is a, c, g, or t
  misc_feature (813)..(813): n is a, c, g, or t
  misc_feature (818)..(818): n is a, c, g, or t
  misc_feature (835)..(835): n is a, c, g, or t
  misc_feature (887)..(887): n is a, c, g, or t
ggggtaggaaggtcaccagaagcatgggggctgagtcagtcagcaaatncgtaaggcctaggcacagaggagcaggttagggcacattcaccttctcaggattctgtggctccctcattggagaagggaaagagnatcttgggggcgcaattccaanagcancgagggcanaggttagagatggctnagagcccctaacctgaggcggcaccanaataggcagnaacaactgtgtggaaagctggatgaactggtcagtagcggaaaatgggagggggcactgggttggcctcttggggangggtccaacacttggcttggatgaactcatgaaaatacccagatgttcccaagcagaggggggcagagcccaaagcccctttctctacaagcntncntaaggaaaaaaaggcactnagaaaaaaaggnattcanggaaccccctggaaaggggtgccagaatatagtccttaaggcacagctgaggcggacaaggcaccaaggcacaactngtggggggaaggcaagggcagnctccaagcacaaatgccagggtcacaagaggatgcaggaccgcccacgcttgatcggcgtggggttgagcacagcccggacagcctcggcgaacacttccttgacaccatcctgttgcagggctgagcattcgaggnagcgcacagnngggatctgcttggccagtacctggccctgctgcggtgtgatgggcgctggccctgctccttgaggngcgtagagtgtcaggctgggcnctcaggnccttcttggtgcccancancaggatgggcacatcanggcantggtggcacactctggnatgccacttgtggccgcacgttctcataggacgggggatggcaatggagaanagatgacgaaa

SEQ ID NO: 531929 - DNA, 169 bp, Homo sapiens
  misc_feature (18)..(18): n is a, c, g, or t
  misc_feature (31)..(31): n is a, c, g, or t
  misc_feature (33)..(34): n is a, c, g, or t
  misc_feature (37)..(37): n is a, c, g, or t
  misc_feature (39)..(39): n is a, c, g, or t
tctagagatccccagtcnccactccacctantnnccncncctctttttttttaagaagggccggatcatggctatctcagccacatgtgggcaatttaatttatttacttccttttttttttttttttttttttttttttttttttttttttttttttttttttttatt

SEQ ID NO: 531930 - DNA, 492 bp, Homo sapiens
taagaaatgggctttggagtgcctcgaatttggcctccacttttcttttctactgtcttacctggcttaggcaggtcggtgaccatctggagtcggagtttctctcatttgtaaagcgggggtgatatttttctcacagggctgcttcaagggttaacaaagttaatgtctaggaaggacatagcatagcaccttcacctggttgcaagcccctggagtcacatggcaacagctgtggaaccaggtaaatgacttgacttacatgttacacgctcttagttgttcgatttgtaaatgggaagagtgtgtgacccaaattagtcgtttccagatatttcctggtaaatggttgttgaatcataaaactagaaagatgggaaagaaagggaggaaccccccttacttcgaagaagtgttgttgatgtgaaggacaggactttttagacactctcatcctaagaaacagctgatatctactaggaaaaaacatga

SEQ ID NO: 531931 - DNA, 124 bp, Homo sapiens
  misc_feature (29)..(29): n is a, c, g, or t
ggtccgtccccctgcctctgcctggcggnccctcctcccctctccttgcacccatacctctttgtaccgcacccccttgggtcctttgcgcttttcccctcccccctgaccgcatggaccgttt

SEQ ID NO: 531932 - DNA, 120 bp, Homo sapiens
gggcacgcttggttctaagattgagagcagaacttagcattctaggaggcacggggttgtccacttggtttcggatacggtttaaccggttggtcagggtgtttggttgttggtccccat

SEQ ID NO: 531933 - DNA, 938 bp, Homo sapiens
cggactccctgagctgcctgcatcccacgtgacctgcgcctggccacccacagctccacctgctgagccctgctcgccatggcccatcttcaggggcccatcttcctagctgctgctggaagtgctgcacatgcagtgttcccagtgctgcaagatcctgcgtcacctccaatggcgctggagctggtgaacgcaggaggtgtgctgcgctttctggagcaagagctggagactatcaccatatccggacctgcaggggcaaagaagtgccacttctactacaacatctctgagtgtgaaggtcacagagctgcaacgtgacatcttccgagctcgatattaccagccacagcaggagctgatgcttacaaatcaccaagtgcctccttggggcaatgcgcttccggagacagcttgctctactggttcttctatgatgggggctacatcaacagcctcagcatgaggtgtgatccatccagcactggtctggagctctccctgggatcccgataggacgtgatgaatagtgtcacaatgtactcctgacaggcacactgatcacacaaaattgcaagcggacacatatcagaggaaaacctttcagagaaggggtgtaatgactagtaaatcatacaagatcccaattccgacgtcaatgggacatgcgccgttccctcatcaaaaccagacaagaactctgtgaccatggatcacatgtaaaccaacgtgcagggggaacggcgataacatgtaattgaacagtgcaccatacctgacaacaacacgaatgaccagggtttcagacgagaattcattgcatggaacgaaagcatgaaggggcgattgactagaaatcgacacaaataaagaggaagtgcatgaagacaattcacaagcacacgcacagcatagaaaatatggaacatatatggtac

SEQ ID NO: 531934 - DNA, 140 bp, Homo sapiens
gaaaagccatctttgcattgttcctcatccgcctccttgctcgccgcagccggcttcgccggggggcttcttcggcggcggggacttccgcagctttatcggcagaattccttaactctttggttttttttaatatccct

SEQ ID NO: 531935 - DNA, 825 bp, Homo sapiens
gtgccattccaatcaaggcagaagaaaaatggcaataattggaatgaactgtatggttaaagaaatccactgcgttgtcatagagcacaagacgctgggctgagatatgatggtgcaccattaagagtgtaaatgccgtacgatagcgatatagggggattgtagccgttgatgtgttgtatgaatgatgaagtgggcttgagatgagcgaacaggatcagaatgcaggaaagactatgtctgtgatgaagaaagtgtggtgaataaagccagagtagttttatacagagaaagagagaaagtgtcaggcctttgtagtaggatctgagtgaagcttctgatggcatacggaattgggaaagtgagatgttatgaagaccgatggccccgatttgtatcttcctcattcagtaattgtgccaggatcatagctgaaattactctaatcccaggtaagtcaagcctatagatgccctagaggaagagtaaaaccagaaattcatgctggttaaataatctatagcgagctttccatggactatctaccatcctaatggttggattaacagaacttaagaatgtgactgaacctctgtccacaaaacaagttcctgcgaggatgagacccacaaaaaatttgtcaaagcactgcaggcaacgggccccaggcgagtgtaagactcgcagacatcttctgctgcgactccgacaagaaaggcgggggcccaccagaagaagccggcgaccgacttgaaaaaccaggcgccagcacggactaacggctgccaaatccccgggagccccggcggagacaccccaggcggc

SEQ ID NO: 531936 - DNA, 181 bp, Homo sapiens
ggcgcgaccccctggcgttctgcctcgtggatttcgactggtgattgtgccctgccttgggcgtgagtagatctggaaagagcagaatgctttccttttcatatttggctggtcatggcaggtgcaggtgtacaagttggggtgggtcttggtacacgtgtttcggtgcaggtctacgtgc

SEQ ID NO: 531937 - DNA, 258 bp, Homo sapiens
  misc_feature (20)..(20): n is a, c, g, or t
  misc_feature (55)..(55): n is a, c, g, or t
  misc_feature (76)..(76): n is a, c, g, or t
  misc_feature (92)..(92): n is a, c, g, or t
  misc_feature (201)..(201): n is a, c, g, or t
  misc_feature (205)..(205): n is a, c, g, or t
cctgcagaggccctggtgtntgttgttcccctccatgtacccacgtgtttgtccngatggtctcctaccccccgtncccctgagaggccctngtgtgtgttgttcccctccatgtactcacgtgtttgtcctgatggtctcctaccccccgtccccctgagaggccctggtgtgtgttgttcccctccatgtacccacgtntttntgtgtgctgtgttcgagtgtgtgtgctgtgtgtgcatgtgtgtgcgtgtgctg

SEQ ID NO: 531938 - DNA, 833 bp, Homo sapiens
gctttccctgccgccgtcgattcgcgcggagtgcggaggcttgggtgcgttcaagtattcaacttcgagctccgtaaccctaccgtccatggccgatggaacggcattagctgcgtggagcgtgtaatgcgacgttatatactcgcttcacacagaggttctgaaggactgccctcatccatgagtggcctatcacgtggaatgctgcgaagctggctaaagccttagacaagcgcccaagtgcccatcttagtgtgcttgcattcgcagctgtgatgagtcctatgtatgtctatagtatggtcggagggcctttgtgctgaacacacgtatcaacctaagtcgaggctgctgacacccgatgaaactatggagaatgggtaggcctttgtacactccgacagagatgagggaaaccccgtacgtagtgagtccggttgccttatgtgtacgttgttgcggactatgtgcatggtcgtctcaggccgcggatgtcagccgaagagctatttctaacatgcacctaactaagtacgtacggcgatggtcgcatcatgatagttacccgacatactccttagtactattcgttcatcactctgaaaaattcacttgcatgacgttaacttgccgaaatatgaagggccgtctgaaattcctttctgacgctgacttgctggcaggaaggttgtgtgcccatgtgtgataaagttgacgcatgttccgtccgggggttcacctggagtccactctgtgtcaaaatgaccgtgacggggtgagtctcgcggttaaaacatacccggtggtgtgcccgaatttttgaagggaatctt

SEQ ID NO: 531939 - DNA, 1009 bp, Homo sapiens
gatccgacatccctgttggaggacctcgacttctacacgttcatctgcatgggcagcagagtcttcggagtgcatctgttgctccggtcaccctgtctccgaaaagacgccttcctgtgttagcccggtgtgatgaaggcatctgcggcgatctcgcatcacttggtagcagggcccttcattctgcgtaactggatctctgtgtcgtgggtgtcttccaaccagtattctccttcgggttgcagatgctgtgtgcttgcatttctttgcagttcgtgagtcgcccacacttgtacacacactatgctatcaacactcccgaacgaaggactgttagtgcctatcggtgcgatccgtggggaagctcagcctgaggcgatcctcgattggaggggagccaaagtaccggagaaaactgtgtgccagggatcgcgtaagttagattagctggggagttgtgaggttgaccgctctgacaaataagcgagcgtgtgcatcacaggcgctccggtgggccagtagacattagatactgcccactagaatacagaaagcagacttatctcgcaaacacaaatcaaacttagcaaaaccaagatgccaggatcatatctaccatatcgttaacatcgcggcccttcactccaaagcgccaggagggatggcatcggacttcgcgagcgctaggtacgcgagggaacagatcctggtgtgcacccctaggacttgcttacccgcacgagacaagatccggggtgttgggggggccggcgctctgcggaagccatggaaacggccggcgccctttccattcgcagtcgccgctgcgcaatggagaggcagctcggcaccaccaaggaaatcaagacagttagaacacttccgtagggatacagaattgcgcaatgggtgggagtaccttagtacaatggttgaacggcgacccatcgaaggaccaacgcatccgagcacagggaacaaagggcgccaccggaaggatgcacccaca

SEQ ID NO: 531940 - DNA, 174 bp, Homo sapiens
cccttgggcagctgaaaccccgcccttttgcatgagctgatcagcctgtgccccccttcgctctttaggagctcaacggtttggcagggcaacaggaggctttttgggctttggactccccggatgggtgggcaaaggaatgtgggctatgtagtcataataaattaggcccca

SEQ ID NO: 531941 - DNA, 334 bp, Homo sapiens
cactgctgtgatgtgtctctcacagcttgaaaagcctgacacagcatgtcttgtgagggactgagatgcagagatttacttcattcctcccctttgtgatttcaagagcctctgacatctctttctgcaaaggcacctgaatgtgtctgcgtccctgttagcataatgtgaggaggtggagagacagcccacccttgtgtccactgtgacccctgttcccatgctgacctgtgtttcctccccagtcatctttcttgttccagagaggtggggctggatgtctccatctctgtctcaactttatgtgcactgagccacaacttctaaggttaag

SEQ ID NO: 531942 - DNA, 210 bp, Homo sapiens
gtgtaggagttctttttgtattccttatactagtcccttatcagatatatgctttgcagatattttctcccagggtgggttgtcttcacttcccttgggtaggtgtccttttaattacacaaaggttttaaaatttttaattgaaggcaaaatgtatctacaattttcctttgggttgctcaagcttttgggtgttgcaatctaagatcc

SEQ ID NO: 531943 - DNA, 513 bp, Homo sapiens
gatctccagtgctactccaaaaacaggaatgcggttgcagggtgagtgtgctaacaatactcctgggattttcacgtccttggagacatccatctttaaatagtgcaaaaaggaccggattaattctcatttatttgctattttaattgaacaattgcaggcaatatgccttaatatggcaggaaggtctccattgtcctttctccttcattcttgattagcgtctgagctcagatggcatgcatcagtatgtttgtggcattacagaggtgctgggagcgagggagagtgcaggggtagggaagcattacatgcctgtaatcccagctatttgggatgctgaggcatgagaatcgcttgaactcaagagggagaggttgcagtgagccaagatcatgccactgcaccccagcctgggccacagagcgagactctgtcccaaaaataaagaaaagtcagcttctgtgctcctgcccagaaccactgaatcagatgctgggtgtcagctctgga

SEQ ID NO: 531944 - DNA, 315 bp, Homo sapiens
taccggatctttatcgccaaactttggaaccaaggtgtaggatcactgaggccaggcatttgagaccagcctgggcaacataggagaccctatccctacaaaaatttttttttaaattagctaggcatggtggtgcgcacatatggtcccagctactcaggaggctgagatgtaaggattgcttgaacccaagaagttgaggttggactgagccatgattgtgccactgcgctccagcctgggagacaaagtgagatcctgtcaaaaaaaaataaaaagttttaaaaaaggaacatctactatgtgctaattgtg

SEQ ID NO: 531945 - DNA, 414 bp, Homo sapiens
tcagatcaccttctctttctttctttctttctttctctctctctctctctctctctttctttctttcttttagagatagagtctcactctgtcatccaggctggagtgcagtggcatgatctcagctcactgcagcctccgcatcctgggttcaagcgattttcgtgcctcggccttctgagtagctgggattacaggcgtgcgccaccacgcctggctaatttgtgtatatatagtacagacgaggtttcaccatgttgaccaggctggtcttgaactcctgatcttaagtgatctgcccgccttggactcccaaagtgcagggataacgggtgggaatcaacatgcccagggtctatccatcttttctttaccttctctggtcttcatactaacaaccaagcaagggaggag

SEQ ID NO: 531946 - DNA, 106 bp, Homo sapiens
ggatgccggctccgccagtgaaatagaaagaaaaggctgattggtagcaataatagatggtcctaagtcattccacgtctatatcctgtaggagatgcatcatact

SEQ ID NO: 531947 - DNA, 120 bp, Homo sapiens
aggaacttttatatatttggcagtgtaggaaattgtctattcctgatataattactgtaggactcttgcttaaggcaagagtttcagatttacagttgaaataaacccccctcttcatga

SEQ ID NO: 531948 - DNA, 605 bp, Homo sapiens
gcacgaggttattttttttttcaggcaatttatgttaatagtatggtgacttggtctttatttcttgggtgttttatggccgtttgtgtttttaatgaggggaaatgttaaagccaattaatcttggggggcttgtcgtacagattggtgtggatcttttggagaaatatgggattaatgttgactttgaaggggggtctcagatccaattattctctttactgaggagaatgaaattacactggcgagatgttttttaacgtttagactgggaaatctatagtaggtcttctaaatttgccattataagacgatacattgagtattggttatagactctaccaattttaatggtgtcgttggacattttcattccaatgcccttctgaaagctttagaagacttacctgatgtctgtactttttgaatgtttacattcttggaaagtcatcatgggtacagttattctggaaattttgcaaattgtaaaatgtttaataaaaatgatattatagtttatagtatggataatcttttctaagtgttctttactttatagagttcctaaattaactttgagtatgttcttaaatcctttttattta

SEQ ID NO: 531949 - DNA, 878 bp, Homo sapiens
gaacagacggtaacgcgtgctcgtgagctagccagccaccacgaggaataatggctgaaaaagcggggtctacattttcacaccttctggttcctattcttctcctgattggctggattgtgggctgcatcatacactcgatttatgttgtcttctcttagaaaggcgagaagatctcagattgacatcatttagaacgaattaagaaaacctatgaagcatgactgatttgattaaaccgtctcatgtttaacacaatgcaatgttcgacatcactttgagcaaacttggatcataagactggcactttggtagtgcagtagagaatttcttcagcgacaataagaaattatgagtgaatttctctatattctgagtgagacaaatgtttagctgtgatgaaccatgcatgtcattaaaaccagtttgataaatttactcacattacaaaaaattatccccccttccctctggaaaaaactatagagaccgtgggctgaggctgtcgcaaggtggctcatgcctgtaatcccagcactttgtgaggaatcctttgagcccagaacatgccgaccttcctaggcgaccggatgaggagacgccccatctctgatgtaacaacacatgaatcttaaacaacacacaacttgttccggcgcatgggggcctcgagaaaaactttgagacctttttttggcagagggcgccgaacttgtaagcttggtcaccttcggccgcaaaaatctcgccttggaaagggcggttccccactccaaaacccggtggcccagtctcgaacagcccatggttccaggcctcgggtcacagggtcaggagcttataccaccggggggtgaagttttcctatcgaatcatgc

SEQ ID NO: 531950 - DNA, 342 bp, Homo sapiens
  misc_feature (10)..(10): n is a, c, g, or t
  misc_feature (19)..(19): n is a, c, g, or t
  misc_feature (26)..(26): n is a, c, g, or t
  misc_feature (82)..(82): n is a, c, g, or t
  misc_feature (98)..(99): n is a, c, g, or t
  misc_feature (103)..(103): n is a, c, g, or t
  misc_feature (164)..(164): n is a, c, g, or t
  misc_feature (184)..(184): n is a, c, g, or t
  misc_feature (224)..(224): n is a, c, g, or t
tgagcctggnaccagcganggcgtgncggcagccgggaagcgagaagtctctggcttctctgcgtccaggtcggcgcgcganacccggaagccgcttnngctncccggaagcgcgccctctagcgttctcgagtcgcatgaggcggctgctgccctcgcggtgnggaagggcgagctgcgcgtnggcctgggctccttccgaatggtggcgcctctgagccagntttcgaggaggagtcggaggaggagcctgaatgtttggagatagacttcaagtcccggaccttatccgtgcgccgcttcggtttgcaggtgacctttgcgtgcgggcgcccctttctg

SEQ ID NO: 531951 - DNA, 115 bp, Homo sapiens
ttgattgggaggatcgcttgagccaggagttctgggctgtagtgcgctatgctgatcgggtgtctgcactaatgttcggcatcaatatggtgacctcccgggagctgggggacca

SEQ ID NO: 531952 - DNA, 857 bp, Homo sapiens
  misc_feature (857)..(857): n is a, c, g, or t
aatctcagcacttagggaggccgaggcaggtggatcacctgaggtcaggagttcaagactagcctggccaacatcatgaaaccccgtctctactaaaaatacaaaaattagccaggcatggtggcacacacctgtagtcccagctactcgggagcccaacgcacgagaaccgcttgtacccaggaggtggaggttgcagtgagccgaagttgcaccattgcactccaccctgggcgacagagcaagattctatcaaaaaaaaaaaaagggcggggcaagtatttataaaagagaattgttgttaaaagggaattagcgtggtataaaggcgtgtaatcctctaagcttgaagaggggagacgaaaatccattggttaaatatccacatctcagggagggagaacccgggctgtgtgggttggtcgccaattcctacaccggaatgtgtggggtatcgacaaggatgatacgcgtgttttcaaatagggtccttggcagtatggatgagcaggacaagatgatgcgagggtacatgaatgggaaccatgcttgggggccagggacagcggcacggattaccgttaggaacaacgacgagagcgaacaaaacaatgtggcggcggcccacaaaacggttcacacccatcgggggccgggccagtgagataaactggcgctacgtgcaaagacacggatgaggggggctcccaaaaacggggggacaggtcggcaaacaggagtgaggacaggcaaaggccgagcaaacacacaaggaagggacacgagccaaagagtggacagcacgagtaacaaggtgcgtcccgcacgcgctcttctcgcgctgcagcaccagacan

SEQ ID NO: 531953 - DNA, 971 bp, Homo sapiens
gtgacagcccattgagcggacgtggctacccatgaacacttcttctgtgcacagctgtggagccttctattggtcccagaagggattccacacagaaggacggaaggcctactgtcgcaaggactacttacgacatgttctgcaccacaacgtgtgtgcgtgactgcgcccgggccatcctgagagaactatatctcagaccctcaacacgctgtggcatcctgagtgcttatgtgtgccaggcgaatgcttcacgccattcgatgaacggcagccttacttcgagcacgacgggcagaccctactgtgaggtgccaataccaagcagcggcgcggatcgctgtgtatcacggctgccagaagcccatcaccggacgcagcactcaccgaccaatggcccaacaagatacacaacccagagacactaacgtcaagagaccatacagccatcaaagcagccacaaccacgggacacactatacaccggacgcccagcacacgaccaagaccattacctgtcacgaaccttgcttacctcaacgactccttcatagctcacagtggcacctgcccccgtgtcctactgcaccaccatatcacccagacacagacattcccctcaaccttggccgatcattgtgaacccttaaacgcacttctcaccaccagcagaggcataaaatgagataacacccggtccttgccaaactagtcacacaccatcgtccccacagtatactgtgtcccgacgcgcaccaataaagatgtccttcgaatgagcatccaccacgtcaataggccatcacgcacaggtacaacacccatcggaacacccatcacacacgcacaagaaaaaaataagaaagacctggcaccacacacagcgccccacaacagacattcaagaccgacagctaccgcaccacaacaaactacgcatcaactcccagaagccgcccccccccatatcg

SEQ ID NO: 531954 - DNA, 145 bp, Homo sapiens
atgggcacaggagagcggccgagaccgttcgcagcccctccgacatcatgcgcaccgccctgatcgtctacctcgatgccgcaagctaacatcacctcacatgcacgcgctacaaggaagtcatgcaggcgacagcatgaatcac

SEQ ID NO: 531955 - DNA, 935 bp, Homo sapiens
tgggccgaacgggactttcccactctgccgtggttccacctggagtccctactggacctgggttctgggcaaccagataccgcggtttcttggaagatctccggtgtcgaccctgcggatttcgcgccgcaatggcgccaatccttacccgaggtacccatcccttggtcgtttttttccacagccttctggctttgtggtaacgtggtgaaatcccggataccccgccccttggttacaaccactaatccatgtccctgcggcggggggacacatggaataattatgtttgcgccccacaaatttggtgtccactggacgcttttggaaatccggccacaattcgattctttctcccggactgatcatccaacccccccctgttgaggaacctgttttcccccgctgtgtttaaataccgtttggcaaatgccatttatgtaaagtatttaagcgccccgcggatgtgtaacaatcatttgcgctccgccgaaagtattaaattttcctgagttctcccggccaggacgccaaaaaccattgtgacaccacgaagtaatttttaaagtttacacccgcgagttttgtataaaaaattgttcccctaatcccctgggtccgtcaagagaaccctctataaaggctacttttccaccttaggccacgcaataagggttcacatcctcttttacccctcttaaaaaaattgttaaaattctagttgtacacaaacctttttctcgtaaattttccacccgttgaactaacccactcgtccaaccaagctctttcgaacctttgaaagtaccccacctccacaaccacacagtgtggagcccaaatgatcacttctcaacccccgatgcacttgggcccaacccaccaaaagaaggggggtccaaaaacccttaaaattttttcccccaaaaaaaaaa

SEQ ID NO: 531956 - DNA, 121 bp, Homo sapiens
ttcagtcggtaccaattgcagccatgatcgcgtgcactgcgaggaggagacgttttcggacccagttacgcgacgacatcccagccgcccgcgccgacctcgtcgacaagcttaaaggcct

SEQ ID NO: 531957 - DNA, 475 bp, Homo sapiens
  misc_feature (83)..(83): n is a, c, g, or t
  misc_feature (385)..(385): n is a, c, g, or t
gggtgggttgtgggtagccctctctttgagctgaagcgtgatagtattctttggtaagaatttggagggatggagatgactgncttgggaacagagataggcataattgcattaaacgctggacagaagctggtgtggtggctggtagccatgtgaggtaggttcataaactttctaaaatatcccccaaggatgtgcctgcctaatccccaaagcttgtatatgtgacgagctattatatgccttccgttcactttaggaagagggagattatcctggattagtcaggtaataatggtatgagtccttaaaagcagacagctttccctgaccggtggcagaagccaaagtcagagggatctgaagccctagtcagatttgctgncccactgttggctgggagatggagagggctcctgtgatgagggatgtgggaagcttttagaggatgagagggtggcagccagcaaggaaa

SEQ ID NO: 531958 - DNA, 122 bp, Homo sapiens
gcgaggagggaccctgcggaatcgtggtctatataccccgatacatatacatgcctcactggtctaccttgatactcctgacacacctggtatgtacagcaccctaccatcactatctccct

SEQ ID NO: 531959 - DNA, 379 bp, Homo sapiens
  misc_feature (234)..(234): n is a, c, g, or t
aaagaattttcaaaaccaaattccagaatgattttccggagatatcccaggaaaattaaggctttttttaacccctaaaaaggcaggtaattgcttgttagcaaaagggatatgacccatttttgaaccttttttcattatgggtggggctgaccagtcaaaaaacctggtggtctttttgattttggcaaataacccggacccccttgggcaggtcccccaccctgtcccagngagggacattgaggggcccttcatgtacacccagggggggggggcttaaaaggtaattatttttgtaaaaaaacccctagtaatttaaaattttgtttttaaacgggaaaaaaaaaattgtaaagggcatgttttttaaagttta

SEQ ID NO: 531960 - DNA, 338 bp, Homo sapiens
aaaagtgtccagagctcggataggagactggacaaaagatatactggtgtcttctgatctcacagtgggtcagtgctacgttcttgatctggaagcgaatcatctccgagcggaggatgccttgagtcgctctgtcgagaatgtcattccacccagcagtgccacaatgggtcaggtgtaccaggaacaccatgaagaagacttctttctctacattgcctacagtgacgaaagtgtctacggtctgtgaagctgctgcccctgagctggaggggggtctcattctacaaagagagaggtggcccccctttcttgacctcctcctccttcaagctcaa

SEQ ID NO: 531961 - DNA, 2000 bp, Homo sapiens
  misc_feature (192)..(192): n is a, c, g, or t
  misc_feature (194)..(194): n is a, c, g, or t
  misc_feature (197)..(197): n is a, c, g, or t
  misc_feature (201)..(201): n is a, c, g, or t
  misc_feature (204)..(205): n is a, c, g, or t
  misc_feature (207)..(207): n is a, c, g, or t
ataaccatcattttgtgaaggaagaagctctgatttgtagtgtattttcatgatataaatactctgatcatggcctatcaatgggatgctactgaataggaggtagggaagaaatgtcacacttggctctcttgagctggtaggagccagctccagcttaccactgattaaacacttaaaaccatatttgangnccnggcnagnngntatacataaaatgtaaagtataggtgtttattcattttgaaatgccttggtatttcaggtgctaaaatgatgtattttctggacaagtcaaggcaggagaaagcaattgctatagccactagactagatgaaactataaaagataaagatgtaaagacattaataaaggtttctgaagcactgcttgatggcagctttgggaactgtagttcccaatatgaagaatataggatggcctgtcataacctgcttccttttacatctgccttcttgcctgctgtgaatgaagtcgacaatcctaatgtggcactgaaccatacagctaattatgatgtcttggcaaatgaaatttgaaatcttctagaaagtagactcctatagactcaaagctgaattgagatcagggtttcttttccaggttgcattttaatatacgtatgaaatgaaatatttggttaggatttttaaatggcatattctgtaagcttattttgttctttacccgacctgccaatttacataaccatctgttaaaattacctgtttattcttacacagttttgtggtagctccgatcgcttctgtataattataatttcttactaagctaagttgtatacaaccccactgtattattttctttagattctgatttcaggatctgtgctttgattccttgtctgttttatcgtatatttgcttgctttttaattaaagcacatcagttttaaagtgttaactatatgttaacaatatggaggctgggcgtggtggctcacacctgtaatcccagcactttgggaggcccagactggcggatcacctgaggtcaggagatcgagatcagcctggccaacatggtgaaaccccttctctactgaaaatacaaaaattagccagacgtgatggcacatacctgtaatccaagctgcccaggagctgaggccggagaatcgcttgaacctgggaggtggaggttgcagtgagccgagatcatgccactgcactccagcctgggcaacagagcaagactccatctcgaaaaaaaggaattcctcttggcagatattgaagtttatttgaaaatttaattcgtccttttttcattgtaatatttcatggtttactatttccttttagtattcatgaaaatcgtattttctggttgaataagggtgctctagttttatgtagatgatttcagaatgtgaaggctggtttgcctgtcagtcatggaaattcactggtaaaattgttgcatatttctctctcccagtcttaaaagcccacaggcaagaattaatgctttcttaactaagttactttgagtattaacaagtagcttatactgaggtgtgcttcaagggagcattatagggcagaaaacaaattaaaatgaaatgttgttgttatagccatgcattgaccattaaatgcattttaatatctcggcaaaatgagatttgaaactcattagtttaactcttaaaacatagtgttgttaaacagtattttttgggggcgggtggatagctttttgttctatcttgtacagaaaacagtaatggaatcactcatgttcagaaccttgtaaatatgtctgtaatattaatgcttccctttattaagacaaatatacattcaaaaagggagattttatttagacacacattttcttttcaccctaatctatttagattcatacttattgagacgggaaaaactcgctgtaaaataatgccaacctagataatgctataataaattattttgtacacagttgcttaaaaaaa

SEQ ID NO: 531962 - DNA, 1836 bp, Homo sapiens
ggacactttgatttttagtgatcacagttttttttaatgtgccttttttgaggtgattgcttactgtgtagattgtaaggcattattttagactgaggcagctttctcaatttaacacattgcatcttttgattaaagtggttattaactgcgagcttattatttttaaataatttgtgttttccttttgtttcactagacattaataaaggtttctgaagcactgcttgatggcagctttgggaactgtagttcccaatatgaagaatataggatggcctgtcataacctgcttccttttacatctgccttcttgcctgctgtgaatgaagtcgacaatcctaatgtggcactgaaccatacagctaattatgatgtcttggcaaatgaaatttgaaatcttctagaaagtagactcctatagactcaaagctgaattgagatcagggtttcttttccaggttgcattttaatatacgtatgaaatgaaatatttggttaggatttttaaatggcatattctgtaagcttattttgttctttacccgacctgccaatttacataaccatctgttaaaattacctgtttattcttacacagttttgtggtagctccgatcgcttctgtataattataatttcttactaagctaagttgtatacaaccccactgtattattttctttagattctgatttcaggatctgtgctttgattccttgtctgttttatcgtatatttgcttgctttttaattaaagcacatcagttttaaagtgttaactatatgttaacaatatggaggctgggcgtggtggctcacacctgtaatcccagcactttgggaggcccagactggcggatcacctgaggtcaggagatcgagatcagcctggccaacatggtgaaaccccttctctactgaaaatacaaaaattagccagacgtgatggcacatacctgtaatccaagctgcccaggagctgaggccggagaatcgcttgaacctgggaggtggaggttgcagtgagccgagatcatgccactgcactccagcctgggcaacagagcaagactccatctcgaaaaaaaggaattcctcttggcagatattgaagtttatttgaaaatttaattcgtccttttttcattgtaatatttcatggtttactatttccttttagtattcatgaaaatcgtattttctggttgaataagggtgctctagttttatgtagatgatttcagaatgtgaaggctggtttgcctgtcagtcatggaaattcactggtaaaattgttgcatatttctctctcccagtcttaaaagcccacaggcaagaattaatgctttcttaactaagttactttgagtattaacaagtagcttatactgaggtgtgcttcaagggagcattatagggcagaaaacaaattaaaatgaaatgttgttgttatagccatgcattgaccattaaatgcattttaatatctcggcaaaatgagatttgaaactcattagtttaactcttaaaacatagtgttgttaaacagtattttttgggggcgggtggatagctttttgttctatcttgtacagaaaacagtaatggaatcactcatgttcagaaccttgtaaatatgtctgtaatattaatgcttccctttattaagacaaatatacattcaaaaagggagattttatttagacacacattttcttttcaccctaatctatttagattcatacttattgagacgggaaaaactcgctgtaaaataatgccaacctagataatgctataataaattattttgtacacagttgcttaaaaaaa

SEQ ID NO: 531963 - DNA, 414 bp, Homo sapiens
cgaggtgactctagacgatccctttgcctcatccagtggaacaagaagactaccttgacctgtgcttccaggtaacagaacgcaaggcaggtatcaatgagatggaaacaggaatgctcttaatgcagtgcaatttacaaaagaactgttctttgctgaccactagtaagagaccatccaacaggctcctttttgaagccacatcccgaaaagatcccctcctgatgtctctagaaacatgcaaaaataaaattgcaacgtcagaaccataaaaggatcatagcagattgacggtagaagctatagatttgtgtgtccagaatgtttccccaggtgcctccttttgcaaaattggacctcattttaccattagggaacggggcctctcagactccgtggagaagcagagaatta

SEQ ID NO: 531964 - DNA, 213 bp, Homo sapiens
tacgccatcatgtccctggccgctgtttacaaaaacatcacctctagcatcaccagtattagaggcttggcttggcaaccacacggagggaggcgagcaggcgtatgtagcgtagacggatcctacgaccatgcatgccatgtgtgccaatggccacaagggaaacgcgagtggtatggtaaaacatccgtgcaggtcgggccaattatgttg

SEQ ID NO: 531965 - DNA, 360 bp, Homo sapiens
  misc_feature (14)..(15): n is a, c, g, or t
  misc_feature (67)..(67): n is a, c, g, or t
  misc_feature (78)..(78): n is a, c, g, or t
  misc_feature (86)..(86): n is a, c, g, or t
  misc_feature (118)..(118): n is a, c, g, or t
  misc_feature (122)..(122): n is a, c, g, or t
  misc_feature (126)..(126): n is a, c, g, or t
  misc_feature (156)..(156): n is a, c, g, or t
  misc_feature (161)..(161): n is a, c, g, or t
  misc_feature (202)..(202): n is a, c, g, or t
  misc_feature (214)..(214): n is a, c, g, or t
  misc_feature (219)..(221): n is a, c, g, or t
  misc_feature (259)..(259): n is a, c, g, or t
  misc_feature (275)..(275): n is a, c, g, or t
  misc_feature (277)..(278): n is a, c, g, or t
  misc_feature (325)..(325): n is a, c, g, or t
  misc_feature (328)..(329): n is a, c, g, or t
  misc_feature (359)..(360): n is a, c, g, or t
gttaactgtccccnnggtataacgtgtcaggctgagtgtctgggattctctagagctggcaagaccngttgtttggcntgcgggtntgtcagggtggaaagtccaagccgtaggaccnagtntccnttctaagctgatgtctttgccaagaacacngtggnctgttacttgctttgagttgaaaggggtttgcatttacgcntgtaaatgtatncatcnnnaatttatgtaaggttttttttgtacgcaattctcgatnctttgaagagatgacnannaattttggttttctactgttatgtgagaacattaggccccagcaacncgnnattgtgtaaggaaaaataaaagtgctcggnn

SEQ ID NO: 531966 - DNA, 205 bp, Homo sapiens
gggcttcctatgatacctctgctccaaatgcaaaacgtaagtatctggatgaaggagagacagatgaagacaaaatggaagaatataagggatgaactagaaatgcaacagggatgaagaaatttaccatatgaaggaggaggattaccaaaggatatctagtacctttttcttaagggaccacagagccttaaactccccataa

SEQ ID NO: 531967 - DNA, 458 bp, Homo sapiens
  misc_feature (191)..(191): n is a, c, g, or t
acgccagcacatatttaaccccccacacggagcaacgtccagtttaacccgcacagcagcaacccagcctccagctctgtctcaccaagcacgtgtcaacaattctcttcctaggtgattccagcagcacagcctggcagctcctgagcccttgggaagttctgcagctcggcttacccagggctgccctngccaaagccccagccactctcctttactgcagagagcgggaccgtgtcccccttcatccccctagaacggtagggctgggagctgcgtcagacctgcctccacgtgcctgtgggaagagacgtcggagtctgatcgcagacacaagaagatcagtcacccaaaaagataaaatatactcgaacttccgacccttcatcttcctttcagaacacactcacattttctataggaaaacagcctcataataataaaaactcaatttagcg

SEQ ID NO: 531968 - DNA, 135 bp, Homo sapiens
  misc_feature (33)..(35): n is a, c, g, or t
  misc_feature (37)..(37): n is a, c, g, or t
aactaaggcacattgccctttttgacctttctnnngnactattgaaatcaagcttattgattaggtgatatttttataacaattgaaagggcaatatcaaataatgacatatgagaattttttattacatattaa

SEQ ID NO: 531969 - DNA, 361 bp, Homo sapiens
ggtcgacgctctggctagcacttctattaatagtactacgttgaataagagtgatgaaagtgggcatccttatcctgttccagttcttaaaggaaagacttttagcttttccccactaagtatgatgttagctgtgggtatatcatatacgaccttcattatgttgagctacgttccttctattcataattcgttgagagtttttaatcatgaagtggtgttaaattttatcaagtgctttttctgcatctattgagatgatcatatggcttttgtccttcatcctgttaatatgatgtataacatttattgacttgtgtatgttgaagcacccttgcatccctgggataagtcgacgcgg

SEQ ID NO: 531970 - DNA, 237 bp, Homo sapiens
ctgaaattaaactctatttcttaaatgggagtctgtaagtcgactctgcatggatacagagggttcaaggagtgtgaccatttttgcgatccatcccaccagcataaccttgcccctttctgtgcactggtaaactcctccctgctgacctcagactgcagcgtagtcgctgttcctgattcctcaagtctcgtggcctgtacatgccagtgcagctggtctgccctaccattgccg

SEQ ID NO: 531971 - DNA, 223 bp, Homo sapiens
caatcactaccactatcttagcatagttctatcaggtgcataaacccttacattcatctagtagctgttcccccgaacaggtttattttagtacacaaaaaacaccacaaaacaaaaacaaaagatttttatcaaatgttatgatgcccaaaaacagaaaaagaaaaaacaaacaaagcaacaaaacaaacctccaatttttcggggttttgccaccaaagcc

SEQ ID NO: 531972 - DNA, 170 bp, Homo sapiens
gtcaggagctgtgtggcctctcctctgtggccaatctcatgcagtcatgttggcggtgtctccccgctttctgggggccgataacacaaccctagtggtccaccaatctcagcagcagtacccaccatagagctgcagggcattgtcccggagttctgaaggagatcgta

SEQ ID NO: 531973 - DNA, 155 bp, Homo sapiens
ccaccagactggtagaaaggcactttgaaccagcagaaggcagagcgcgggagaggagggtgaggatgtacaagtgagcatctgcaggcgagggaaacaatggccaggactaactgtggcgggaacttgactttgtctccacacactcgcaatcc

SEQ ID NO: 531974 - DNA, 420 bp, Homo sapiens
ctacctgacggtttgagtccatttatattcaactctaaagaatgcaaactatagtgaccaacagcagatcagtgatttcctggggatggtcggcctgggagagaggtagaaggacggattgcataggaggagacttttcgggtgatgaaaaatgcatttagttgattgtggtgatggttacaagggtgtatggagatgtcaaaacttatcacattaggtacacttgaaatatgtgcagtttatcataagtcaagtatacctcaataaagctgttaaaaaataactgattgcttttgtaaggcagaaatatgagactaaggatattgtattacatcatgcattgtcatatttcattactgtgtggccctgcttaattattcatatactagttagaaaattttgtgatgtacagattatggg

SEQ ID NO: 531975 - DNA, 367 bp, Homo sapiens
actggcagataccaccattaccctcccttttcaggggaagaaatcaaggcacatgaggtgtaagtgactttcccaagcttgcactgctagcaggcaatggagtggaatatgagacccagcaacttgcctgtatcatctgttagcctttcttcatgagaagggcaggctcatatgagagctctctgcattggtttggggttagtaacccttttctttttggcttagttctaggggaactattaggagtaggaggagagtttgagacaagataggcctggactgctgtgtaggaagaccacagctgcccagactcctgaatgtcatcatgactatagtcatgcagtttgcattttattataaaaaaaaa

SEQ ID NO: 531976 - DNA, 1244 bp, Homo sapiens
  misc_feature (1089)..(1089): n is a, c, g, or t
gcgtggctgtccccgccggccgcctgattcccctgcggaagccccgttggctaggtgtctagcgcgcaccccctggctgctgcaagaatggatggacatgcatggggaaggagtgaacatccatgaggaaatcgctggaggctatcgtggtggggccacggcaccggtggcaacccgtgtgccaccacggagccacgcataatcaccgttatatgcccgaggaacactgtgacaaatggcagactgggttcgttcgtccaagcgcgcagctacggacatcacgcattggcccacgaattcggaagacgcgacaacgaccacgctaggcaggacacccaccagagtggaaaaatgggctctgtgaaccaccctccatcgcgtaggtcatcgatccactatctgaatcacaggcgagaatccactagtggacacggaggtccgaaaacaaccgtttaggaccaaaatgttgcacgacaccgcagcacaagaccactaacgccccagggagtagacaacaaacacgcaaatttgaccgtggcactatactacaataaccacttaggcggaacaatcacagtgcgtgtagcgagcaaaccaaaatatttgcgccaaccgttgagaaagcgcaccacgagctaagcccgcctcctttaccacaaggtgaggaaatgacttaagaacaccggaaagtagtcccaccccgagttataaaaacaccccgctgtgaacatggatacaccccaaaaccagcatgaaactaggcccaccgttagaaaaccgagaacgcccccgtcggaaggaaacatcacaccaagagtggcaaagacgaggagcaccaaccgagcaccagagtgagggcttaccaagataaggaacacaggtagcccccgcaaaagtatagtggggcaacaaagtcaaacgggcgagcccaccgggacatatctaccgacggacaacgcatgccaccgcacaagcagcggatcgacaccacgggcagaggaacgaacaggacagacattaaggagtaggagatcgcggagataccaagcgagacgaccaacggcgaccccgagcaggagagccacacanacaaagggaccacaacacacaaacaacacccagcagagggggacaaccacaaagcggtgacagaccaccaagaaagaatatagaaaaagaccccgagagaacgacgtacacaccacagagagaacgggccacacaacgggagtacaaggagaccc

SEQ ID NO: 531977 - DNA, 372 bp, Homo sapiens
tctgccaacacaaacttctaagaaactttgtcagctccctcccctgcactgcacacctgcctgaggcacacctccccctgtagttcaggccccaagttcttgcctggacaatcccctcagctaccttgaacacaacaggtctaaagtaaatcaggctgggcgtggtgggtcacccctgggaatctccagcattttgttaaggctgaggtgggcggctcaccgaggacaggagttccaggccagcctgtgccatgtagtgaaaccccaggtctactaacactacaaaacttaactaggccatgtgttggggcataaatcacggggaccccgcagcttcgacttcggaaatccaatggtcattagcttgttcct

SEQ ID NO: 531978 - DNA, 166 bp, Homo sapiens
aggtccccccgtccgatggcccatgaaggctgtcagtgcgtcatcgggctgcagatggcccaactatatgcgccagccagtcgggcatgactgcgtacggcacgagaaggcatctctcttaccccatcgaaccatatcctgccccccatgggccaaagggacgggg

SEQ ID NO: 531979 - DNA, 882 bp, Homo sapiens
agcggcttttccgcccactcccccctccccccgagcgccgttccgcgctgcaccacgctcgctccgagtttcaggctcgatgctaatgctagacgcgcgtacgtgctgctctcccttcaggtctgccatcatgattgatctaccgggacctcatcagtccacgatgagatgttctccgagcatctacgaaggatcctgcggatgatcgcgtgacggtgttgtgcctgtgacggttggaggggaagatggtcagttagtgaccagaacggtgacattgactcgacgtcgctccattggtgggagaatgcctccgacgtgaagggccccgatggggcgatacggtatccgacaatgctatcagatagaatcactggtgctctgactattgtcatgtaggagccatcatcatggcacggaagacaagtttcacggaaagaagccttacgatgaatgtacagtcaatagacttacagtgaagagtcatactcaaaggggaagacgttgacacgaaacaggagaccctagatacatgcatgtaaacacctcttgttagtgacaggcggcttgcagaacaaagtcataggcacatcctttgctagattttgcacaaacacgtactcagttctcttacttgggtgagaaatccttgaatccaggatggtcacttggtttgctctatttggactacccgtgaggatggtgtgaagcccattattattgatttttccttttaacggcatgggttccagaaccttgtgacaaagatgttccaacaaaatagttggcaaattatcctccggacatctaaacaacccttgtccatccataacctggccttccttgcttggtcatcccaacactacaccaggaacttaggaacaa

SEQ ID NO: 531980 - DNA, 918 bp, Homo sapiens
ccgcgatagagtggtgcctgtccacggacaagagtggcagaagcagggggtgcgggatgtaggccgacaagaggtgcgaaagttgcccgacagcgagacctgtcgcataaaggacggcgggccaagactcttcgtgccgaagaagacagagggggggggcccacgagcgctagcccccgggggagagcacccgcgtcgctgaggagggggaaggcttcccaccgcggaggagaattcttcccgcgccgggggacgtgcgacagcaagagcggggtggagcagcggggcgctgggcttgtcgcagacagaatcctcgcgcgccggaggtgatgtataggtgtgtaagccaacggctgggtttccctgcccggtgaggttccgagcggtgcgtcgatcgagatcgtcttccgccgcagcgaggggtcccctccccccaatttgacaattcttcgttcatcggcgcccggtcagttggtgataggactgcatcctaaggagaggggccgcgccgcgccgcgcttctctctgcgagagattctctcactaggagtggcgtccgtccctcgcgcgtcctctccaccgcttgtttgtcttcggcaccgcctcatgtcgctcctgggctccaacgagggaacacactactgtcgaggagagagaggcacatttgcggcgcagcccacccggtgtcctcaaagagagcaattctgggacatcggcgacagatttctctcctcttcgtagaacctcttccgagccccgctctgtctgcatcaggagaacactctggcgaagtaatcaccctctggggagaatctgtaggaagatcagtggagcactttttctgatgagccttcatacatcagaacgccgccgtgtatcgcgcagcgtggctgaaaaccacttttccccgcgacatca

SEQ ID NO: 531981 - DNA, 871 bp, Homo sapiens
  misc_feature (64)..(64): n is a, c, g, or t
  misc_feature (71)..(71): n is a, c, g, or t
  misc_feature (80)..(80): n is a, c, g, or t
  misc_feature (82)..(82): n is a, c, g, or t
  misc_feature (84)..(84): n is a, c, g, or t
  misc_feature (87)..(87): n is a, c, g, or t
  misc_feature (90)..(90): n is a, c, g, or t
  misc_feature (124)..(124): n is a, c, g, or t
  misc_feature (127)..(127): n is a, c, g, or t
  misc_feature (130)..(130): n is a, c, g, or t
  misc_feature (159)..(159): n is a, c, g, or t
  misc_feature (162)..(162): n is a, c, g, or t
  misc_feature (177)..(177): n is a, c, g, or t
  misc_feature (189)..(189): n is a, c, g, or t
  misc_feature (192)..(192): n is a, c, g, or t
  misc_feature (202)..(202): n is a, c, g, or t
  misc_feature (218)..(218): n is a, c, g, or t
  misc_feature (225)..(225): n is a, c, g, or t
  misc_feature (239)..(239): n is a, c, g, or t
  misc_feature (273)..(273): n is a, c, g, or t
  misc_feature (276)..(276): n is a, c, g, or t
  misc_feature (285)..(285): n is a, c, g, or t
  misc_feature (296)..(296): n is a, c, g, or t
  misc_feature (300)..(300): n is a, c, g, or t
  misc_feature (303)..(304): n is a, c, g, or t
  misc_feature (323)..(323): n is a, c, g, or t
  misc_feature (328)..(328): n is a, c, g, or t
  misc_feature (342)..(342): n is a, c, g, or t
  misc_feature (346)..(346): n is a, c, g, or t
  misc_feature (349)..(349): n is a, c, g, or t
  misc_feature (364)..(364): n is a, c, g, or t
  misc_feature (375)..(375): n is a, c, g, or t
  misc_feature (379)..(379): n is a, c, g, or t
  misc_feature (383)..(383): n is a, c, g, or t
  misc_feature (385)..(385): n is a, c, g, or t
  misc_feature (394)..(394): n is a, c, g, or t
  misc_feature (400)..(400): n is a, c, g, or t
  misc_feature (403)..(403): n is a, c, g, or t
  misc_feature (412)..(412): n is a, c, g, or t
  misc_feature (422)..(422): n is a, c, g, or t
  misc_feature (424)..(424): n is a, c, g, or t
  misc_feature (437)..(437): n is a, c, g, or t
  misc_feature (439)..(439): n is a, c, g, or t
  misc_feature (444)..(444): n is a, c, g, or t
  misc_feature (450)..(450): n is a, c, g, or t
  misc_feature (459)..(459): n is a, c, g, or t
  misc_feature (461)..(461): n is a, c, g, or t
  misc_feature (739)..(739): n is a, c, g, or t
  misc_feature (829)..(829): n is a, c, g, or t
agctccgggcactcagacatcatgagttggtccttgcacccccggaatttaattctctacttcnatgctcntttatttcncncntcnacntgtgtagcatatgttgctaccagagaccactgcngcntcntagatgaaagattcggtagttattgtccnacnacctgtggcattgcngatttcccgtcnacntatcaaaccnaagtagacaaggatcnacagtcnttggaagacctccnacctccagttgaaaaccaaacctccgaagtccanccnccgataacngccatcccccncccntannatcccgatgaatcctcccnacccnatatgatagacgcngccnccntgaagtccaggaaantgttagaaganattntgananatgaagccncgcttntcncccctgacncccgtattcncnatttgccggacananatccntccccncatcccccncntgtcaccccgccagagaaggtagcccacgcctgccgcaccgtgccaggcaccctgcccagacacggtgcccatccctgatatcactgggaaagattgtcaagacattgccaataagggagctaaacagagcgggctttactttattaaacctctgaaagctaaccagcaattcttagtctactgtgaaatcgatgggtctggaaatggatggactgtgtttcagaagagacttgatggcagtgtagatttcaagaaaaactggattcaatataaaganggatttggacatctgtctcctactggcacaacagaattttggctgggaaatgagaagattcatttgataagcacacagtctgccatcccntatgcattaagagtggaactggaagactggaatggcagaacc

SEQ ID NO: 531982 - DNA, 136 bp, Homo sapiens
ttccgtacagctaactacagtaggcaagacagccaatagcaatgtgtgggcaggatgcagagtgattggaacctcattcattgccagtgagtaagtgtgaaatggtgtggctgctctggacccaggttcaacagtt

SEQ ID NO: 531983 - DNA, 118 bp, Homo sapiens
aacaggttcacaccccaacgctgtaggtgcgcgagtcgcgagtcaccttaaaggtgctcgtaggaaaggctgggagcaggtatagaaagctgtagacggagctgctcactctgatcag

SEQ ID NO: 531984 - DNA, 111 bp, Homo sapiens
  misc_feature (108)..(108): n is a, c, g, or t
tttcaaacaccgtcccggctgccttcgctcttgtcctcccacagtctgttttctacacagtaaccccatactgattttttgaaaatcctgatcagtccgaatcgcatngtt

SEQ ID NO: 531985 - DNA, 222 bp, Homo sapiens
aaaaaaaaaaggggaaccccccccccccttttcccttttttttttggggggggggggggggcaatttttttaaaaaaaatttttttcccccccggggggttaatgggggcccaaaaaagggggggggggcccccctttttttttttttggggggggagggggtgggggtttccccccccttttttttgggccaaaaaaccccccccccttttgtggggggca

SEQ ID NO: 531986 - DNA, 180 bp, Homo sapiens
tctgactgggcagctgaatagaagtctggaacgcctgaagggcataaaaggcccttgaggatagaccccaagccacctgtctggctttctctacttgtcactatccttctacatcctactctgcaacaaccaaattagattactcaccattccccacactgccttgtgatatactttctt

SEQ ID NO: 531987 - DNA, 1751 bp, Homo sapiens
  misc_feature (310)..(310): n is a, c, g, or t
  misc_feature (878)..(878): n is a, c, g, or t
  misc_feature (1742)..(1742): n is a, c, g, or t
taaacaaacccgggttctggggggggggggggtataatactaagtggaaatgatatcatttaggggggaaggcgcttgggtgaagttaggccttatttctcgtgggtcctttcgtacgaggggaggaaattgtgaagtagaatagaaacaccgaccgtggattactccggctcgtgacacctcgagaactcacgtagggactttaactcgtgtgaaacaaagcgaaccttttaatataggcggtggtgcacccatgtgtgtggatgtgtctccgtgattcacaacatctcggaggtctcgtataaacccncatatgtggggtgtgatatatgttggacttcataagaaataatacgggatatgtggcggccgtgtgtatatctccccctataggggggatacacgtgtgtgttctcgcgagtgggggtctcaaacgtgtataagtgtggggatctccaaacgtgtgagagtatatatatgtgatagattctgcgcgctttgagagagcgtggtgtgcagagtctcttatagcccatgtgtgtaccgtgggctctgcgacgagaagaggtgtggtggggggctcatctgtgaggtcatcgcgagaaggggtgctgccggccccccaaaagccgcgagaaaaaattttctcttataacatgtcgcgcgaagcgtgtgttgtgggtgataaggagtctatgaggaggacacccggtgggtgggcgcgttctgggtgctacgagcggtatacccgtgggtgtgggggcctctcctacacctcagacatttataaagaggagcctccccaaaatgaggggggtcatatacgtgcggaatccagagggccgtggggtggttataagtgcacccgcgaacacctnctttctcacagcgggggcccgagtggtgtccacaacttcttccaccgttgtgtgctctacacacgagttctacagggaagaaaaccaagtcttgtaaacccccctcttcgtggtggggaagccccaatttccccatactaagcagggggtccccccatctttttttagacgggggacaaccaaggcgtgcaatttatttggcataaccctttgtggcaccgcgggcatataaggggatcacccgggggggcccggtttacacaccatttggtgtctcactggggggcaggggcggggggcctcttaaaatactggggaaaggcacacgagagggtgacaggtcgttgggggcaaacccaggcgggcgggggtatcaaaaagatttgggcgaaggataacccactatacacatctgtcgtatacacgcgtcttccttatattagatcaatgcccgtggttatgaggctttacacacgggagagggggaaaaaaacgacccacgaccgcgacgaaaacggggcaaaatacggggggcacgaacaacaagcggacaacacaaggggttataaaattcagaacgagcggaccataccagctggagaaaaagatctacgcgtggaatcatctaaccaacgcaagagacttcgtacaagagggaagaaacggttcacacacgcgcgggagtggaagcaaaccacatagttgcgatgacaagaaaaggggccgaagaacagacacaatgagtagtgaggaggccacagcagagtaaatactcctacgagtagttaacgacgccagtgatctatcgacgcccgaactgtcgacacgccgcccccccccccccccgtaccacaccactatggnaggaagaga

SEQ ID NO: 531988 - DNA, 269 bp, Homo sapiens
gagctgttcctgatgtatcactcgtaatctcggtcaaggcctcatctacacggtgaacaccgtggggctgaagaaatcctcctgcctcagcctcttgagtacgctgggaccacagggaaatgccaacacacctggctacattttaaatttcttgtagaggcaggctctccctatgtttcccaggctggtcttgaactcctgggctcaagttatcctcccaccttgagctccacaaagtgctggctgagcattagcaggcattgaaccca

SEQ ID NO: 531989 - DNA, 486 bp, Homo sapiens
  misc_feature (462)..(462): n is a, c, g, or t
gacgtcatcgggaagtaaggctcacttgtttcatagaaacgcatcattgtaaccaggtgctcggtacacggctccgtaaataacgcgacgaatgtacattcttgtacgggtgtaattatcacgagctaagtatcagagaaccccgcagacggtacaacaaacccaccttaagacgaacacccgaggtgattcatatgcgaggactcagaatggccatcctaccccggaaaagaatgtggccccttgggaacggcaggaagtaccgatcgcacgtaccaggagcggaacaaccgcatcatagtccggaaagggtagcacctatgtggatacggaaaacttatcaccaccccagaggttgcgataccctaagactcacggacccgatacgtcccccccggggcctaagcatgcgcaacgacacaaacgcctccgattgtctattggcggccgaagacacacccnaaaggctaatcttatgatctagcc

SEQ ID NO: 531990 - DNA, 962 bp, Homo sapiens
gagatgccgaaaaactgtgagtctgcttgctttgtcagtggggaagctggtggtctgggacaagttctcagccctggtcactggttgccctgaaatagactcggtgctgttgtagggcacagtgggaatgacaccagcctttagggctgcaggctgcatgggagcagggtgaggcccatgaccgctgactttcccccacttgctggcaaactgtatggttcagcagaagcagccataatccccctgggaatataactccattggaccagacaccacacccccatcccccacagcagtcacagcaagccacacccaaggagaggctgagctcagccatgcctatccctgcccctaccgggtggtctttctctacacaccctggtagacaaagaccaaggtcataatctcttgggagttctatggccctgcccaccgcctgagaaatctgaatacttaaccagctgtccctagggaaagttggcatcctctctgcaggaccacaactgatgcactcttgaaatcaccacctcctagctggaggccaaccaacacaaaactagcgcactaaaccaaaatacaaccaaggacccttacagagtccacttcactcccctgctacctccactggctgcaaaacctgaagatggatcacatcacaggactcttgcagacactccccagtaccagccggagccagtagctccactgggtggtagaccagaagagcaaaaacatcatgacactttggcctcaggagccggattataggggaggggggacccacatcagggcccctggacaaagattgaacgggtctggaatcagatttcctggatagtaccatggaaagggaaaattcgggttcgccaaaatttttccccgaatggttccaggcataggttgtccaaaagggtttctaagggggggtaaaaggggatggggcctaaaaaaagcgagtgagg

SEQ ID NO: 531991 - DNA, 1292 bp, Homo sapiens
  misc_feature (333)..(333): n is a, c, g, or t
  misc_feature (407)..(407): n is a, c, g, or t
  misc_feature (931)..(931): n is a, c, g, or t
gggagtctgacaatgagctgggactctgatcatagagagtgaggacggggaagatgactgtgacgcttgtgaggaactgtgtaggagtgggggagacacatgcgattcgtcttggactttggggaggaacgaggtcaacgcttcatggttgacctctcgagtgcaccctgcgaggactgggacggtttccttcaggcgtatgtgaggatgtgcgtgccgccatcccttgcatgctagggacctgaacggcatgccttgcagcagggggcgtggagtcgatgcaaacggtcgaagctgacgcatggtgcctctgccagactggcgtgcatcaantaaaacaaagcctgagtgctaatgagaagggccgcgggaggagcttctcctgcctgtgtccggcctgtggggcncaccggagtgccgtcacgaggtgcagcgatgactgctgaagcgtcgagctgggagagcagagttgcagactggagcatagcaaaggtctactagtgcccacgtcacaatggggacacacacgacagcaagggaagcagtgccatgccatcgtgagggagctagagagggggcggcagtgagagccatggtagtgctgggcagctcgcgtcccggcttgctcgagctcactagcctgagtgtgaccttttcgctagcggattggcagctctaggagttgtggcaattctattgctagagaggccactttcctaggacccgagcggacggtccccttggatgctcggcggtgggtaaatgggcctactacagggtgcagagcgagtcggtcggtggcagagaccgccccccgtgtggtttgcggtgcccgggggcggcgctccatggaaaggccctccacattgcggcgtcccaaagcgttgttcccttattctcttggggcgatgccggtctggggtggctcttntccaagggcgttcgtcatgcgagcccttcgcaacgttggtggcgttaggtatcactaccaaacacggtgtcagtggcgttacaaatggaacgtgtaggcgttggtcatagatgaccccactccttcgagaatgaacacgatcttggcttgcgaaacaagaaattgggcgcgcgtaccccaaaggatgacgtaacgccagtaccagagggggcctcgccaccggacaccatacacattgcccaggggattttctcaccaataagggtaatcggagaagaggggaactcttaattctggcacaccggggggtataccacattggatagcctacgaggtgaaaaaacctccttaaggctacaga

SEQ ID NO: 531992 - DNA, 140 bp, Homo sapiens
gctcaccttctacgacatcgccatgaccccggggtggttggttctagctattgccatggtacgttttgatatggcaaaggacacacagaggtttatatacaagtattcagaggacacttcaatttttccagacatttgcc

SEQ ID NO: 531993 - DNA, 943 bp, Homo sapiens
agcggtgagcacatccggtgttacaagcgctggtacgccttgtgacaggcgggttaggaagagtggagactgctgcacggaactactgcgaacccctgaacatcatttcgatcggaaagaatctaacctctggtattgcgcgttgtgacaacactctttctcgatatcacatcccctggtccacgctcgcccgcccctcgaagacggtcctccatgcgcagttttggcctcttggtgatgcttctggtgggcgcgttgccagcggcgctcattagtgctcccatgatggttcgactcatcttcgatatctgagctggcgctgctgctctgccattgcgcgcctccgcatgtagtcatttgatggattgtggctgtaggttggctgaccacctctactagcctatggacagtcgtaccttgaagacatgacgtggggattctcgtggctcgcgatctgtagctattttgccatctcacagggcagcttcgtgcgctgggcccctcggccctcgcgatggtatattctagctaaatctagctttgtcgaacctcccttagttatgtcccgttgccctaactggccatttcgattggggtgctagctgggctacattgagtcgcttcacacctgtcttcgaccacgcttgcagtgtctcgtatctgagttcgccacgcgactgacgcgtgagcctcatcgctacttttgctgggggaagcgtatctttggaatgctctaggaccatgagactgcgtctgcctttgtgtcctatccctggtgcgcacatgtcttgctttgtagagatccagtgtggctttcccgcaggccgaaccgatagtaactgtggcgactgggtgggtgcatgtgtcggccttccgctccggtccctgattactccaacgttccaatttattgagcaaacggccggacgcatgggagattcag

SEQ ID NO: 531994 - DNA, 948 bp, Homo sapiens
tggaaaaggagtctcgccctggggcccaggctggagtgcaggggtgtggtctcggctcacgtgcaacctccgactcccgggttcatgccattctccgttgcctcagcctcctgagtggctgggactgtaggcaccgtgccaccacgcccagctgattttttggtattttagtagggacggggttccaccggtgtcggccaggatggtctcgatctccgtgacctcggtgatccgcccgcctcggcctcccaaagtgctgggattgcaggcgtgagcccaccacacccagccttaacacgggtctattaactctcaaaatggtccagtcgtgtaggataaattaactctctgacaatttcaactacgataccgtgccaacattaccttcgcaaaagaggcattctccgtaccacttataactcagtgcgtgcagactcaggaacgactttgtggggctcgtttgcgaacaattacgaaactctctctcacgatctactgcaaataacacttttagcggaagttattttctgcaaaggccaagcgcacaaagtggtagtgcgcgttattctctcatcaaaactttgcgaccccgcactgctcacaagcgcaagaatccaccacgcccaaaaagggaccttttctttcactgcggcccggaatactttacagctcgaacttagtggctcctcaagggcttagtcacccaatacaagtgtcgtgaacacccccccacaggaaacttcctgaagaaccagagcccagggtgtggacacgtggacaagagactgtgccaaaccacaaccgtgcaccgtgctcagggcgtcgggcaccaattgccagcgggcaaacacagcacaggcgaagcagcacccgcacagcgctcgcagcaactgcccaccgcactcgaagcaccaaacccttcgaagaacaacgggagactacaccaca

SEQ ID NO: 531995 - DNA, 594 bp, Homo sapiens
  misc_feature (461)..(461): n is a, c, g, or t
  misc_feature (499)..(499): n is a, c, g, or t
gggaacctgtatctccgtcattattatctgtagctcggattattgcaggggtgtgttctgctgagatgcacacaaaagtgaggctgctcatcgggtaaaagatgtgggtgaagaaaacaacagcggcttggtgtaggatggcttcgctcagtatcgtcaacctagctcatttgtagatcatgtacagtctacgaatgaagccactgaattcgcggatacacgtgttgctgatgagcaagctcataatggtgacaactcactatataccctcattggagacatataatgcacagatgtgactcttcgtgaagccgatggagggctgactgatggacgctcatgatcctgagagcaaggaatgcttctatgaacacatagatgacgaaccataccttccacgcatgagagaccatacgatgatgtgatgagcactgctattcatgacaatcgaaagacagttnaccaagaaagacattgtatgaacatgtcggaagacatncttacttttatggcacagaactgcgtctattcgtgaatggctggtgatgtacagaatgggccaagctgagattccagagactcaggagcgtcgcc

SEQ ID NO: 531996 - DNA, 479 bp, Homo sapiens
  misc_feature (7)..(7): n is a, c, g, or t
  misc_feature (65)..(66): n is a, c, g, or t
  misc_feature (68)..(69): n is a, c, g, or t
  misc_feature (85)..(85): n is a, c, g, or t
  misc_feature (91)..(92): n is a, c, g, or t
  misc_feature (94)..(94): n is a, c, g, or t
  misc_feature (97)..(97): n is a, c, g, or t
  misc_feature (101)..(103): n is a, c, g, or t
  misc_feature (113)..(113): n is a, c, g, or t
  misc_feature (118)..(118): n is a, c, g, or t
  misc_feature (120)..(120): n is a, c, g, or t
  misc_feature (125)..(125): n is a, c, g, or t
  misc_feature (127)..(127): n is a, c, g, or t
  misc_feature (129)..(129): n is a, c, g, or t
  misc_feature (138)..(138): n is a, c, g, or t
  misc_feature (149)..(149): n is a, c, g, or t
  misc_feature (160)..(160): n is a, c, g, or t
  misc_feature (176)..(176): n is a, c, g, or t
  misc_feature (186)..(186): n is a, c, g, or t
  misc_feature (189)..(189): n is a, c, g, or t
  misc_feature (191)..(191): n is a, c, g, or t
  misc_feature (201)..(201): n is a, c, g, or t
  misc_feature (208)..(208): n is a, c, g, or t
  misc_feature (213)..(214): n is a, c, g, or t
  misc_feature (226)..(228): n is a, c, g, or t
  misc_feature (235)..(235): n is a, c, g, or t
  misc_feature (239)..(239): n is a, c, g, or t
  misc_feature (241)..(241): n is a, c, g, or t
  misc_feature (243)..(243): n is a, c, g, or t
  misc_feature (249)..(249): n is a, c, g, or t
  misc_feature (256)..(256): n is a, c, g, or t
  misc_feature (265)..(265): n is a, c, g, or t
  misc_feature (273)..(273): n is a, c, g, or t
  misc_feature (316)..(316): n is a, c, g, or t
  misc_feature (325)..(325): n is a, c, g, or t
aaaccgncgcacacaccacttgtatctcctatgcccgtgtcaagcagcagcagggcggtgggaanngnngcacctgcactgtggnagcgannangantgcnnnacgtaaaggngtagnanttttnangngtgtgggtnggggggtcganccatgaccccntcccttgctcctttcntggggcggcngantngagctaaggntcatgancattnncaagatggtggnnnatgatcntctnantncatttntagggcngcccctgcncccttgcngtggtggacctcggtggggacgtctgggtggctttttagagcnggtcgtagnacgtagtccaggccctggcccagctcccagatagagaccccaacgcccagctcccgggccagctccagccgcacctgcagggacttcagggttgggtagaagacgacgtgcctcccactgcggctcttcttgtactcgaagaagtgctctgaga

SEQ ID NO: 531997 - DNA, 143 bp, Homo sapiens
gtgcactttctacacagatcactggcatccttagtgcttctcttaacactacagtaaattaatagaattcggcgggtcatcaattctatgacttgcctggctacgggccactttcctgtgtctcaacagaggaaattgaagtc

SEQ ID NO: 531998 - DNA, 237 bp, Homo sapiens
gtccgagacaaattagttgtggctataaaaatgattaaggatacgagtataagagatcaggttcgtccatttaatgttgtgtctggctatcatctgtctggaggttagttggatgagtcgtggctgggtggtgcctggcgagaccgctgacgagatatctggaggtggggatcaatagagggggaaatagaatgatcagtactgcggcgggtaggcctaatttctctcggaccaatg

SEQ ID NO: 531999 - DNA, 1131 bp, Homo sapiens
acccacgcgtccgcactgtggaagtttaagtggaaggagggaaggaataatgtcaacacgcatgcttcaggtctcattctgcccttactgccctgcagatggatatcacttggcatactagtggacgtataagctggaaggagggaatttgaaaatgggacgtgagtggtgcgtagagtttgtgttcataagggcttcggatgggtagacatgagggaatacaacattactggtagcatcggtgaggagcagttattcgctatcacagatggtttaaattgatgctatttcgagtatacctggttaacatggaccggcgcattatgaaattgggcatatagttgtcccctagtccatgtcacactcagcatataatctgtaagatctccgttagtgcattagatgctaatggatcatctatctaccagaatagaagcagctaggctgcacaggacacatgtttcctctggggctgttgctggcactaattggatgctccaatcagcagtattcaataagtccacaggtgtgcaacagccgcgaattggcctcgctaatggtctagatgaggccattcgttgcatctgggcattggttactcttctctgatggttccttgacccaacggaatctcaatgtgctcccctgatttttagaccccaccatacacgtatgccaggtctatgtgctagtgcttccggcatcgttgcatgggtgcatttggtattgaccgtattctgttgacacaggcaaccacatcgttgttacctggtaccaattgatggtgcgcaagcacgtaaagacccatagtccgagttgtaaaggaatctcccagctgcgcatgtaaccaatccagcgccgggaggttattgtaccctggccccggtgcaaaagtcctcagctgggagcgcaatgacaacggcgggtcagtagccccccggggcccttaaggatcactcccgggaacttcagaacccgcgcgacgtcacagggggaaagcccagcagccggggaacctccacgcagggatgcctgtacaaatatgcccagccctgttaatacgccacccatatgatggaccagctgccggagcgaacaaccccaggtcgcttcacccgcgattcatcaacg

SEQ ID NO: 532000 - DNA, 725 bp, Homo sapiens
  misc_feature (63)..(63): n is a, c, g, or t
  misc_feature (68)..(68): n is a, c, g, or t
accgtctccaacaatcccgccctcagtctccgaggaggatctcaaggtcctgttttccagcantgggngcgtgtcaaaggattcaagtcttccagaaggaccgcaagatggcactgatccagatgggctccgtggaggaggcggtccaggccctcattgacctgcacaacctacgtacctcggggagaaccaccaacggtgcggggtctccttcctccaagtctcaccaatctaggggcacaggccccacacggcccgggcaccctggcgacaacttccatcattccagagaaaagccacgtttagaaaacaggctgaagtgaccattagcagaccagagatttgacttgtcactaaagagaaatcaggtttaccatgttctcgtaaagaaaacttgaatctagttcaccgttgctcagccctgcggtgacagggacagcatcaggctcattggtagactcgtgcacaatcgcggagttcccggccctccacaaccactggggccagaacctcggggccatgccttggtggagactgtgtcgggcgtggaggcctagcaggtgggcagcacccagaccacgacttggcttccttgtgcattaagaaacctgccttcctgcagccacactacccacccggggtgtcctggggaaccaagggatggggaggtcacacaagagagaggcagggggcctggccaggctcctgcaggatatgcagctggg

SEQ ID NO: 532001 - DNA, 170 bp, Homo sapiens
ggctcggtaccttagagcttggcgggtgcgtggctgcgtggtcagtcggtgagctcctggcggtgcagggcaggcggtgggacagcttgtcccatcctcgtgcacctcgactacgaccagtctgtcgcaggtgctcaagcacttccccgagcgccagcgcaacgaagtga

SEQ ID NO: 532002 - DNA, 415 bp, Homo sapiens
  misc_feature (389)..(389): n is a, c, g, or t
acttaatcaacaatacatttaagtggtatgttatctcagctgatggaggatggaagtttcaaagtcatacaacttaccagtcacctcactgttcactacagctctcttctgagttgtggtagaaaagcatggctttgaagctgttgctacaagtgtttcctaaacactgatatgttcttccattcgatgatagtgggagcatgaacaatgacgaacacatgtgacataggcgaggggaacaactacacgctggggcctgtggaagaccggggtgagggagcgagagcaatcaggataaatagctaatgccttcgggggctaatacctaggtgaatgggcttgacaggtgaagcataaccaccatggcacatcaggtataatacccccgngcgggcgtggttttaccaagattcct

SEQ ID NO: 532003 - DNA, 330 bp, Homo sapiens
tcccgctatcacattatcggacaggcagcctgacccagatgagaacaaaccaaatggaagataaagtaaaggaaaaagctaagagctgaacatagagacaagcttggcagaactgagatgacactatcccacctgcctactgacttctcctgtcttgataatggtacatgacaagccagtgcagtcacctcacctacaaatcagtcgattgattcgaagactgctgatgatcaacgagcaccctagatgttctctctacgagagatacttggacaggtggtccctcccctacagaaacctcacagaacacagcaaaggataatgtgataa

SEQ ID NO: 532004 - DNA, 517 bp, Homo sapiens
agtcagtgcatctaattgagaaagaggggacagggaactaggaataggtgatatcggctgggacccagatgaaactgacgaatcctgacactgcccacgtcccttcagccacccttatcaggggaagtagcttgccctcgggtgttcgagaaagctagccttgctgggcttaaaatcatgtgctaccttcagtggaggcagatgtctgggagagggctcctcattctcttcaagagccagcatagaccccctcatggtcattagacccacaaggggggtaaaatctcagcatgtgccaggggcacagatccacagtgtgacccatgacgaaatagtttacagaccagaatgtaatcacgatagtgttcaatattctaggggagtgtattaacagagcatgtgtgggtatgcattatggggatgtttgaccaggaggatggaatagccaagtaaaaggggttaaattcatggatatgagtgacatttgttaaagattccagattcatgatgtgtcttg

SEQ ID NO: 532005 - DNA, 104 bp, Homo sapiens
cctgcatcaccttcgccacgaagctcttgtcggtggctttggggaaccaccactcctcgtccagcatggccagaatgcccgggggggctgctggcttctcaata

SEQ ID NO: 532006 - DNA, 167 bp, Homo sapiens
aggctgagtgactctaccccgcttattttttgtccctaaatccacacctgatgtatgtctctgagcagagctgcaggtcccggagggagcacttcagactcatgcatggtgaggtcagagaacaggataactgaaattctcctccacccgctacaatgaggccatgt

SEQ ID NO: 532007 - DNA, 214 bp, Homo sapiens
  misc_feature (8)..(8): n is a, c, g, or t
  misc_feature (21)..(21): n is a, c, g, or t
  misc_feature (32)..(32): n is a, c, g, or t
  misc_feature (51)..(51): n is a, c, g, or t
  misc_feature (53)..(53): n is a, c, g, or t
  misc_feature (88)..(88): n is a, c, g, or t
  misc_feature (113)..(113): n is a, c, g, or t
  misc_feature (123)..(123): n is a, c, g, or t
  misc_feature (127)..(127): n is a, c, g, or t
  misc_feature (136)..(137): n is a, c, g, or t
  misc_feature (139)..(139): n is a, c, g, or t
gaataccnaggttcctcagtnactcatctttnggtcccacgctggtttctntnccttcagaatggtcacaagcccggattggaaaggntctgcttacaaacctgtcccctgtnctccaacccnaaanggctttttnncngtcttaatatccagaaaatctaaatgcatcctaaaatcaatgtgaacctttaacaagatagttttacttattatc

SEQ ID NO: 532008 - DNA, 101 bp, Homo sapiens
  misc_feature (20)..(20): n is a, c, g, or t
  misc_feature (27)..(27): n is a, c, g, or t
  misc_feature (30)..(30): n is a, c, g, or t
  misc_feature (40)..(41): n is a, c, g, or t
  misc_feature (71)..(71): n is a, c, g, or t
  misc_feature (92)..(92): n is a, c, g, or t
ggcacgaggtaaacaatgtngtaaagnctntcagatgttnncacctccatttcaaattcatgaaagaattnattacttggaggagaaggccntattaaatt

SEQ ID NO: 532009 - DNA, 262 bp, Homo sapiens
aactttctgtactgtttttcttatagtctaataagtaaaaagtgtccttcaaattatgataattgcctattaaggcatgtgccttgccctaacaactcactgcagtctcttcatagacacatcttgcagcatttttcttaaggctatcctacagtttttctttgtaagccatcacaagccatagtggtaggtttgccctttggtacagaaggtgagttaaagctggtggaaaaggcttattgcattgaacaacggtctctca

SEQ ID NO: 532010 - DNA, 392 bp, Homo sapiens
  misc_feature (263)..(263): n is a, c, g, or t
  misc_feature (287)..(287): n is a, c, g, or t
  misc_feature (357)..(357): n is a, c, g, or t
tttcctctagaatcgaggccatcaagctacagatggtcttacaaatggaaccccaaatgagttcaactaacaacttctaccgaggacccctggactgaccagctggcacttcccctggcctagagagttcccctctgaaggacactacaactgcaaagccccttcttcgcccctatccagcaggaagtagctagagcagtcatcggccaaattcccaacagcagttgggggtgtcctgttgattgaggggtgacagcatgctngcagtcctcacagccctcactcgnttcggtcactctcggcaactcctcttgcctgggggtcccacttttggcagcattttaggagccccttcanctctgtatctaggctactctgatggggtcccttgg

SEQ ID NO: 532011 - DNA, 784 bp, Homo sapiens
  misc_feature (28)..(28): n is a, c, g, or t
  misc_feature (65)..(65): n is a, c, g, or t
  misc_feature (69)..(69): n is a, c, g, or t
  misc_feature (71)..(72): n is a, c, g, or t
  misc_feature (74)..(74): n is a, c, g, or t
  misc_feature (76)..(78): n is a, c, g, or t
  misc_feature (80)..(81): n is a, c, g, or t
  misc_feature (97)..(97): n is a, c, g, or t
  misc_feature (116)..(116): n is a, c, g, or t
  misc_feature (121)..(121): n is a, c, g, or t
  misc_feature (157)..(157): n is a, c, g, or t
  misc_feature (221)..(221): n is a, c, g, or t
  misc_feature (261)..(261): n is a, c, g, or t
  misc_feature (264)..(265): n is a, c, g, or t
  misc_feature (270)..(270): n is a, c, g, or t
  misc_feature (281)..(281): n is a, c, g, or t
  misc_feature (288)..(288): n is a, c, g, or t
  misc_feature (299)..(299): n is a, c, g, or t
  misc_feature (306)..(306): n is a, c, g, or t
  misc_feature (319)..(319): n is a, c, g, or t
  misc_feature (321)..(321): n is a, c, g, or t
  misc_feature (324)..(324): n is a, c, g, or t
  misc_feature (328)..(328): n is a, c, g, or t
  misc_feature (348)..(348): n is a, c, g, or t
  misc_feature (355)..(355): n is a, c, g, or t
  misc_feature (372)..(372): n is a, c, g, or t
  misc_feature (378)..(378): n is a, c, g, or t
  misc_feature (403)..(403): n is a, c, g, or t
  misc_feature (414)..(414): n is a, c, g, or t
  misc_feature (425)..(425): n is a, c, g, or t
  misc_feature (569)..(569): n is a, c, g, or t
  misc_feature (597)..(597): n is a, c, g, or t
  misc_feature (608)..(608): n is a, c, g, or t
  misc_feature (635)..(635): n is a, c, g, or t
  misc_feature (667)..(667): n is a, c, g, or t
  misc_feature (669)..(669): n is a, c, g, or t
  misc_feature (681)..(681): n is a, c, g, or t
  misc_feature (703)..(703): n is a, c, g, or t
  misc_feature (741)..(741): n is a, c, g, or t
aacgcaaacgcgccctgaaaatgaaccntccagggccaggagaggcacatgagggaggggtcggnacanannantnnnanncgggcacctagaagcnacaactaccctctacaganacggnactgcaccatgcgcaggaatgtatcgacacttgtcnatgatccttcctgaagcagtaagagcagacccgtagttactatgagcagtgcgtaaaggttgtntgagtatgtgttaaacttgctgtaggtctgcttgaggatntgnncagtncggcggctgcngtcttcnagcatccccanaagcgtntggatagccttcntntangtcntttaggaggtgatagtaatngctgttngaggtgtaataaaccangttgtnggggaacataatcatgaggaaccgnaagggctcaanaaacgaatgangagcagaagggagatgcggagagctctagattgagattaatgttgcgtttactccatgttgagagggtgttggaatagagatatgagagaagaaggaggtatgggagttatgcaggaatgaatacttctggtcctttgggatanaggtttcttcaaactcctggtaggtgtnaatggccagcnggtgcgcgcgaagggcttggagcatancgtgagtcaaaaagcctggataacggaaggtntnggacggcaccancctcttgcaagccagggcaggnagagcagggcaaaagccaggagcagggacgtccgggancctgccgccattgccactaggtgagccgtccacaggaccctga

SEQ ID NO: 532012 - DNA, 483 bp, Homo sapiens
  misc_feature (56)..(56): n is a, c, g, or t
agatgaggcagacatcgcttgaacccaggaggcaaaggctgaagtgaggcgagatngcaccattgcactccagcctgggtgacagagcaagacttgtctcaaatttaaaaaaaaaaaaaaaagaaaaagaaaggccaagaaggaaatctaacttatcatggagacgtaggggcttcacctcctctcatgaagaggcgtggctgcaggcgggtgaggtcacccgaccgtctgactccagtgaggccaccaaagtgcagccatccacacagccgagggggccacagcagaggcgctacccagcaggggttgacgggggggtccggtgaacaccccagcagcgagcagaggtcagggatgtgagcagggagggggcacaggtcccccgtagagtgacgcagacagggctgctccacagctcaacagactctcaggaacttgggcttatcagatcaaacacagaccacaggagctggaagctcgtca

SEQ ID NO: 532013 - DNA, 858 bp, Homo sapiens
  misc_feature (70)..(70): n is a, c, g, or t
  misc_feature (72)..(72): n is a, c, g, or t
  misc_feature (76)..(76): n is a, c, g, or t
tacatacacaccacgttgcgagccacccaccctcccactttgaaacattttaggggctgacgcttagcananttcntcaggcgaagaccaccatttaaacataagttggaaatctacattttttaaggaacccactcaacacaagaagacatcaataagcagataaatgacaaagagcgagtggcagctgcaaaggaaaaccccaacttacgggaaattgtggaacagtgtgtccttgaacctgactgatagctgttttaagagccactggcctgtatttgtttgatatatttgtttaaactctttgtataatgtcagagactcatgcttaatacataggagattcgtacctcagaccattatttaaaggattctttccaagccagatatatttataaggtagtacctatattgatcaatgtataacattctcaggatttgtatcacttaaatgatcagacagattaagttccctctagttatcatgtgtaacatgagctgctattcctctagatacccaatctgatacaactatctttccgtgtcaaatgtctactgcgcctcaatgttctcgattaaaagcatcactcctcgaaaagaaacaaacctctcatccttttattgacaaactcccatctcgctggcctattctgacctcactagtaggatccattctcgtcaattcccctttaaaggaagtgtcctctaagaatacacagccaataaacttaatgtacctaccgctattcgcttccatacttccccgttgaccctaattcttataggcgaaaatggatttatcatcataacttggtgattactccaaatcgacctcgctgatcactggatattaaagac

SEQ ID NO: 532014 - DNA, 475 bp, Homo sapiens
agagaagtgaaatgtataaaacgaagtaattctggggaaggaaaatgtcacaatttttcttcagtgttgtcaggcacactaacccgggaagccgtctctgggcctgaactatgcaaattagtgtccgaggaagtgtgacaaatgcaagcccttccaagtttgaccctgattcttaaaggtggccaaaagccgactttagaaactgcggtggcagcggcgtgattctgggagggccattcaacttttaaacaagtcctggggctttgaaccggtttgcttgggcaatggcaaaaggcattacaatattggcgaagaaacaagccgctgatcaaagcttttcctggccaggggttaaaagtcccatcaactttggaaccttattgaagcccgggccctgttaagaagtgaaaaaatggttcttcgccggggccccggcccgtgaaaccgcctctcccaaaaaaacaccgggggattt

SEQ ID NO: 532015 - DNA, 838 bp, Homo sapiens
gtaagctgtaataatttaaagacatactgaaaacactcaagcaacactaaaaaaataaaaaaaaatatatatatataataaggcagtttaggatactaaatgaattaaaaaaacaaacaaacaaacaaacaaagagttaatccaagatttggcaggaaaagagaaaagatgggatagagaacaaatggaatagagaagaaatagcaagatggtaaacttaaactcaaccacataaataattacattaagtgtaaagaagctgagtaatccatttaaaagacacattttgtagatggaaaaagaaagacccaacaatatgctgtctacaggaaatgcccttttttttatttttttttgagacagaatctttctgttgcccaggtggagtgcagtggtgcaattatggtcactgagcgtcaactcttaggctcaagtgatcttctcacctcagctcctgagtaccggagaccagggcaagtgcacaaactggtaatttttaaattttgtagtgatgagattgtaccatgtggtccaggatggtcttgaatcctgggtcaaagtggtcctctgtgctttggctcctcaagtcgggatttacaggtgttagccactgggcgggagaatgcgtttactatacggtattgatcaacgtcaacgcgaccatgtttctggtccatatgggaagggtgggataactaaaaggaccgggaggggaacctccaaaggatcctagtgaagggtgcccaactaaaccacgttgcaacgacatggcggaaaattctttggggcccttaaacacacgggggtataacgcttataaccccaacacccgcgccca

SEQ ID NO: 532016 - DNA, 925 bp, Homo sapiens
  misc_feature (260)..(260): n is a, c, g, or t
ctgtcgcagtctgctggtgttgcggcgtcttcgtgggcctgtcttgtcgtttgctgtgtcgtgctgtctgggcgtgagttggtgcgtgccggtggggagacgcggccccgcgtgggtgcggccgccgtggtgtttctctccgtcctattggaggggctgctgcccacacgtgcgagtcggtgtcgtcacttcttggtggggaactcgtcccagtgtttgtggtgccaacactgttcgagggttcctttgtcggcgcgcgnacatagctcggggttttgcccctttagcgcggcgttgccagattgtttcctattcaaccgcccttgggtaggggttgtcatccctacgcccgtgcgcgcggtgttgtaggtgggtcggggtcttgtacccccaacgggcgatttgaacccctttggtgctgagataccggggataatcccccttggtgtggagcagatttatgttggtagctagaataagagcgccatgtgctggtatcgtggttatgttcgctgcgccctgacgcgctagtggtttctgccccctgctacagagtacggctcattcggccccgtatgtccggtccccccgggcgccgccctcggagggcagagcgccgcgcctggactccgggttttggcccccatcggcctatctgggtcatctcgcgaatactagtcgtttcgtgtcccctccacttgtagccggactactacgcacttcagatacctagttatgatccaacgtgcataatgtttaactctcccgcccaggttactgttagcgcccctactggtacaacggctataaatcaatcccatgtgtgtacaaacacacggagcccccccaattgctttcgcccacctcgtctttccccttcccctcttcttccttctttcccctttaaaataaaatctcgcccaca

SEQ ID NO: 532017 - DNA, 219 bp, Homo sapiens
attggcaatgagcgcttcgctgtcctgagacactctaccagcctccttcattggtatggatctgctggcatccatgaaacaccttacactagcatcatgagtgtgacattgatatccgcaagacctgtatgccaccactgtctcatctggaggcacactatgtacctggtatgctgatcgatgcagaggaatcatgctctggctcctagaccatgagat

SEQ ID NO: 532018 - DNA, 178 bp, Homo sapiens
tcaggtggtcatagaactcagtccaagtagctgaggacgatgtgaaatggacctgcagtctacaaattttggatgtgtcgtttgtatttaatttgttttatggtatttattttttttttttttttttttttttttttttttttttttttttttttttttttttttttatttttttttt

SEQ ID NO: 532019 - DNA, 1021 bp, Homo sapiens
  misc_feature (231)..(231): n is a, c, g, or t
gagaagcgtgattgcctcctctgtccgcgcatggagagtgtgcgctccatggatatcgcgatgtgactcgcgaaaaggggtgagtcgtctgggtaaaaatgtctgtttgcctgtgtgtatacactgctcctatacggaccaagtagtagtagtgaagcttatgtgacagtcacgaacttgacgcttaaagacaaattgagcatgccctatgcgtgtcagtgaattagcgangcgctcatcacacgtatgggctgaggtcgttgaggagtagctggaaggcagctggggaatcgtagtcccgagacgtcgaaggtgggtggtactccagcgatctggcgcagggctgcttgtaggacaacgactgcgtcggtggatcgtgcgaattggttcgctacccaaaccaaatacgctgggagccggttagggcactctgtgagacgtgaactactcacacggaatgtactgatacgctcagtctggtactggcgccaggttgccctgcatgccctgacgctaggcagatgtggtctagtgtctcaaagcgtcggtcgtggtgtgatgcgaccgttcgtgccacgttcctctgtgtgagccagtgggaaggataaaatgcttgaagggcttgcacgcaatgaaccactggaagagctgatgtgctcccttggggaacacttgtgggcgtgcaatgtctatcgaatagggtcgatgacgtatgagcgaatggagagactgttgatgggtgaaacatgagaaatcgtccgacgatatgaagggcagggggcctgaggtgcaatctgatgaatgaggcggacggtatcagggcaaggactatgagaaggaagccggcagagtatggttgaaagtaagacaacgcttagaatgttgattgtggccctgtggaaatattgtggaggttgttgtgaagagaggaggagtgccgacgaaaattatagaagtttgggggagtgcggtgagaagagtctagaaaagaaaattttcgggacaagataaaaaagtgtgg

SEQ ID NO: 532020 - DNA, 423 bp, Homo sapiens
  misc_feature (415)..(415): n is a, c, g, or t
aaattcccaagacaaaaattaaaaatttccaagaggaccacccagagaacattaaaccccaagtgctgaaaccttgtgagcaaaggtgctgtattaagtacactggtcacacaccccatgagcccaggcttgctaaatggttgttcaagactatcccacaggctgggtgaggtggctcatgcctgtaatctcagcactttgggaggctgaggcaggaggattgcttgaggccaggattttgaggcaagactggagaacatagtgagaccccatttctataaaaaatttttacgaatcagctgggtgtggtggtacacacctgtagtcccagctacttggaaggctgaggtgagaggattacttgaggccgggagtttgaggctatggtgagttatgatcatattctagcttgggnaacagagc

SEQ ID NO: 532021 - DNA, 498 bp, Homo sapiens
ggaaaggagggcccagtttagcctccacgaccctcggcttcctcctcaccagctccccctccctccaagtccagtatgaagttgggccaccctggaaggcattgaccgggttgcttgtctggagatggctccactacatgcggacctgggcgcctggagtcgggcatgaaagaaaatagcgcctcatcgctcttatctaagcccacaggcagacttctcttgaaaagatcgagaatggatgaggggatcggcactcacttgcagacatcaaccgtctccagaaaatttggttcaatttcttcaccaccgaccctccaaccaaggagctggcaaatcccactaaccaaccatgagaacacagacccggtttgtcttttgaccaccgagtggaactgacggggcctgcgcctgccctgcgggtcccctaccttggctgataagatatccccttaaaccttggacagccttggcgacttacttgaaaaatattcctttact

SEQ ID NO: 532022 - DNA, 408 bp, Homo sapiens
atagagtgatcccctagtgcgcttgttgtggccggggaggggactccctgtgagatgaagtggatgccccagtgatacactgagctctggctgccaaggcatggtgtggggtcttccaatgcactgaaacagatctgtgctctggatcagctctacccccaccaaacagatggagagacagacagtgcagtgcagcatatctgaacccagtggaggggaaaaccacacgtgaggactgcgcatcttcgctgcccgcatctattattacgaccccctatataagtgagtgcgctgcaaatgcttgcgtggatgctgggtgcccaagtctccatcatgaactacgaagaatataagcactgctgggacacctttgtggaccaccagtggatgtcccaacaaagcgcctgg

SEQ ID NO: 532023 - DNA, 619 bp, Homo sapiens
actaatatttctggcgcagtgttgctgagcttacaattcagataaatgagggaagcagcttctcccacctctttactttggtcaccactgtggcaccaaggtggtctggccagacggcccacatcctccttgtgtttccccccctctcctctgtatccttccctctgcctttattaataccatcccttgtgcctaccaccctccactcttcctaagatttcttattgccttctaaaccataccctcttcctttcccaatgcttttcttttcttttctttcttttcttaggtagggtctcactctgttgcccatgctggaatgcaatggtgtgatcatggctcagtgcagcctcaacctcctgggctcagatgatcctcccacctcagcctcctaagtaactaggactgcagactcctaagtagctggaccaagcccaactaatttttgtattttttagtagagacggggcttcaccatgttggccaggctggtctcaaactcttgacctcaggtgatccgcccatctcagcatcccaaagtgctgggattacagatgtgagccactgcacccggccaagctacagtttacttctgaaaatcaatgagagttcaaatatt

SEQ ID NO: 532024 - DNA, 385 bp, Homo sapiens
gttcccataatccccatatgtcatgggaagcacccatgaatataattcaggtaactgaattatggggggtggttacccatgctgctgttctcatgatagtgagtactcatgagacctgatggttttataatggggcattttccccgtctttgtcttggcacattctcttcctactgccatgtgaagaaggatgtgtttgctgcttcttccaccatgattgtaagtttcctgaggcttgccagccatgctgaactgtgagtcaattaaacctctttcctttataagttacccagtctcaggtacttcttcatagcagtgtgagaacagactaatacagtaaattggtagcagtagagtggggtgttgctgtaagataccagaaaat

SEQ ID NO: 532025 - DNA, 938 bp, Homo sapiens
gagacccctcgtgtcttgctatgctcgaggtctcacccgtgaagcgtcatgaggatggagatccgcagctggaccatgtcaagcagttcagccaactcgtggtggttcgacaccgggcgacttcccatggaccaatcgacgagtacaagaccccaggatgcataccaacactaaccgcgctggctccctctgtagtactctgcgagcggtctacgccttatcgaggatagcccccgcattgaacccacgaagcggtggtgtggagcgaggcagattgctctatggtcggagagctgggcgtggtctcaagatggaccagattaatcaatcgctatttaggtactaacatcttattagttgttgtctcggagcagaaatactaagattaaagattccaggcgctcgagtatcctagcgatacatgctagatcgacacaggcctcttccctttgatacaatatgcagaatggtgtccatgagccaggctcgtgtcattcgacgctcctatcatagggacatgctgggcatcgagtcaaagggaccgagattgtctttgttaacgactgctgtcacctcgtgggacggaaattcgaggcttggaaaaagcgacgctttgatggagacagcacggggtccactgtgcatatgactgtttcctcttctccttccgcccaggctgtaggccttgttgcccgtggccggctgtgatccttcatctcccccatttgttccggggcgccttcttggcttggcttgctggcaatatctgccgggaacattctattaggcccctgtgatacctgtggtaccgtgttctcgtcgcacttcgcccaaagttggctccaacctttgtcttggggctcttcggccggggggttatccggcggcgctcctccccctcccggcgggggttcgccccctgctgtccgccctttaac

SEQ ID NO: 532026 - DNA, 132 bp, Homo sapiens
acgcaaagccgatcatacacctgaaatctgagatcatagtagctacagttatcaatttgttgaaagaccccaggatggccagggcacggtggctcaagcctgtaatcctagcactttgagaggccaaggtgg

SEQ ID NO: 532027 - DNA, 959 bp, Homo sapiens
  misc_feature (135)..(135): n is a, c, g, or t
  misc_feature (187)..(187): n is a, c, g, or t
  misc_feature (217)..(217): n is a, c, g, or t
  misc_feature (219)..(219): n is a, c, g, or t
  misc_feature (224)..(224): n is a, c, g, or t
  misc_feature (242)..(242): n is a, c, g, or t
  misc_feature (245)..(245): n is a, c, g, or t
  misc_feature (248)..(248): n is a, c, g, or t
  misc_feature (250)..(250): n is a, c, g, or t
  misc_feature (252)..(252): n is a, c, g, or t
  misc_feature (269)..(269): n is a, c, g, or t
  misc_feature (295)..(295): n is a, c, g, or t
  misc_feature (302)..(302): n is a, c, g, or t
  misc_feature (311)..(312): n is a, c, g, or t
  misc_feature (327)..(327): n is a, c, g, or t
  misc_feature (331)..(331): n is a, c, g, or t
  misc_feature (344)..(344): n is a, c, g, or t
  misc_feature (347)..(348): n is a, c, g, or t
  misc_feature (350)..(350): n is a, c, g, or t
  misc_feature (353)..(354): n is a, c, g, or t
  misc_feature (358)..(358): n is a, c, g, or t
  misc_feature (360)..(360): n is a, c, g, or t
  misc_feature (389)..(389): n is a, c, g, or t
  misc_feature (395)..(395): n is a, c, g, or t
  misc_feature (401)..(401): n is a, c, g, or t
  misc_feature (421)..(421): n is a, c, g, or t
  misc_feature (466)..(467): n is a, c, g, or t
  misc_feature (490)..(490): n is a, c, g, or t
  misc_feature (494)..(494): n is a, c, g, or t
  misc_feature (496)..(496): n is a, c, g, or t
  misc_feature (498)..(498): n is a, c, g, or t
  misc_feature (500)..(500): n is a, c, g, or t
  misc_feature (889)..(889): n is a, c, g, or t
  misc_feature (953)..(953): n is a, c, g, or t
gcccgatccgcgcccgcgatgctggcgctgcgctgcggctcccgctggctcggcctgctctccgtcccgcgctccgtgccctgcgcctccccgcggccgcgcctgcagcaagggctccggcgaccgtcctcttcntcctcctcgggaacccgctcgtgtacctggacgtggacgccaacgggaagcngctcggccgcgtggtgctggagcagaaggnanaagtngtcccaaaaaaagcaganaanttnananccctgtgcactggtganaagggcttcggctaaaaaagctccancttccanagggtgatnncttccttcatgtgcnaggngggcgaattcacnaannanaanngcanangcgggaagtccatctacggaagccgcttncctgangacaantttacactgaagcacgtggngccaggtgtcctgtccatggctaatgctggtcctaacaccaacgnntcccagttcttcatctgcaccanaaanananantggttggatggaaagaatgtagtgttcggtcaagtaaaaaagggaatggacgtcgtgaagaaaatacaatctttcggctctaagagtgggaggacatccaagaagattgtcatcacagactgtggccagttgagctaatctgtggccagggtgctggcatggtggcagctgcaaatgtccatgcacccaggtggccgcgttgggctgtcagccaaggtgcctgaaacgatacgtgtgcccactccactgtcacagtgtgcctgaggaaggctgctagggatgttagacctcggccaggacccaccacattgcttcctaatacccacccttcctcacgacctcatttctgggcatctttgtggacatgatgtcacccaccccttgtcaancattgcctgtgattgcccagcccagattcatctgtgccttggacatggtgatggtgatgggtgncatcaa

SEQ ID NO: 532028 - DNA, 1013 bp, Homo sapiens
  misc_feature (135)..(135): n is a, c, g, or t
  misc_feature (443)..(443): n is a, c, g, or t
  misc_feature (449)..(449): n is a, c, g, or t
  misc_feature (455)..(455): n is a, c, g, or t
  misc_feature (475)..(475): n is a, c, g, or t
  misc_feature (520)..(521): n is a, c, g, or t
  misc_feature (544)..(544): n is a, c, g, or t
  misc_feature (548)..(548): n is a, c, g, or t
  misc_feature (550)..(550): n is a, c, g, or t
  misc_feature (552)..(552): n is a, c, g, or t
  misc_feature (554)..(554): n is a, c, g, or t
  misc_feature (943)..(943): n is a, c, g, or t
  misc_feature (1007)..(1007): n is a, c, g, or t
gcccgatccgcgcccgcgatgctggcgctgcgctgcggctcccgctggctcggcctgctctccgtcccgcgctccgtgccctgcgcctccccgcggccgcgcctgcagcaagggctccggcgaccgtcctcttcntcctcctcgggaacccgctcgtgtacctggacgtggacgccaacggggaaagcccggctacggcccgccgttgggtgcttggaagcctgaatggcagattgttcgtccccaaaagaacaagctgaagaaactttcagaagcccctgtgccactgggcttgacgaaggggctttcggctaccaaccggcctccatcctttccacacggggttgactcccctttcctttcattgtgccaagtgcggcgcgactatcaccaaaccaccacatggccaccaggcggggaagtccatctacggaagccgcttncctgangacaantttacactgaagcacgtggngccaggtgtcctgtccatggctaatgctggtcctaacaccaacgnntcccagttcttcatctgcaccanaaanananantggttggatggaaagaatgtagtgttcggtcaagtaaaaaagggaatggacgtcgtgaagaaaatacaatctttcggctctaagagtgggaggacatccaagaagattgtcatcacagactgtggccagttgagctaatctgtggccagggtgctggcatggtggcagctgcaaatgtccatgcacccaggtggccgcgttgggctgtcagccaaggtgcctgaaacgatacgtgtgcccactccactgtcacagtgtgcctgaggaaggctgctagggatgttagacctcggccaggacccaccacattgcttcctaatacccacccttcctcacgacctcatttctgggcatctttgtggacatgatgtcacccaccccttgtcaancattgcctgtgattgcccagcccagattcatctgtgccttggacatggtgatggtgatgggtgncatcaa

SEQ ID NO: 532029 - DNA, 884 bp, Homo sapiens
ggagtacctgtggcaccatcagagccatcagcgtgacatcgtgcgctgtggtcttgataagtgatgcgatggcggtgtcagcttcccagtggctggccccagatgaccggctttctaggagggttcgagaaactcctaaggggtcttccagagttgggtcattgcgccggtgacaagagtgcagcgccatcactataccgcttctctctagtgcccatctcagtcgagcttaaccgaagacttccctgagccgagcatggtgctgggtgcgtgggctgatgcagggaagttctagccggtcctgccctgaagaaagtgaccctgtgtgcatgcatgagagtgagcagtcagttcaatactaggcctcctatctccagagtacacaagaggactggattagccgggcatgggtggtgcacgactgtggtccgtggctactgtgggggacgtgaggcgtggaggatgcttgaggtcaacccaggaggtagaggctgcagtgacgccaagatggtgccactgaactgcaagcctaggtgacagagtgagaccctgtgccctcctccccaacccccgcaagaaaaaagggctgggagtgactgagggctacgactccccagggtaggtcaggaagagcttcctggaggcggacagcacatcacgtggagcaatgatccactgtagtgtgagctatagtgtccatcaggtcgtctaatccacagaggaagatgagtagctggagcaggaatcggtaacacgggggacttgggctcaaagggcattagggtaaaaggggaagcagattggccgataagcctggcggcacggatgggtaccccagggccccgggggaacgcccagcggaggccagagccgggggcaagaaa

SEQ ID NO: 532030 - DNA, 222 bp, Homo sapiens
gtcaatacactgctgttgcgcaacattgaaccggatagcttgcctgggaagagcaatcccaagacacatagatttggtcttttcacatagtcccatatttcttggaggctttgttcatttctttttactctttttttctctaaacttctcttctcgctttatttcattaaattgatcttcaatcactgataccttttcttctgcttgattgaaccggatagc

SEQ ID NO: 532031 - DNA, 623 bp, Homo sapiens
tcagcaggagaatcgtatactctgggagagagggcaagtagagacaggtggggccgaagggactggtgatgccgtgtatggggaaaaccgtgcttggaagaagctctgttgtctcgggagcatgtcttggaattggagaacagcaagggccccagcctggcctctttagagggggaagaagataaggggaagagcagctcatcccaggtggtggggccagtgcaggaggaagagtatgtagcagagaagttgccaagtaggttcatcgagtcggctcacacagagctggcaaaggacgatgcggcgccagcacccccagtcgcagacgccaaagcccaggacagaggtgtcaagggagaactgggcaatgaggagagcttggatagaaatgaggaggacttgggggctgaggatggatggaccatggatgcggaagcagatcattcaggaggttctgacaggaacagcatggattccgtggatagctgttgcagtctcaagaagactgagagcttccaaaatgcccaggcaggctccaaccctaagaaggtcgacctcatcatctgggagatcgaggtgccaaagcacttagtcggtcggctaattggcaagcaagggcgcta

SEQ ID NO: 532032 - DNA, 258 bp, Homo sapiens
  misc_feature (34)..(35): n is a, c, g, or t
  misc_feature (66)..(66): n is a, c, g, or t
  misc_feature (89)..(89): n is a, c, g, or t
  misc_feature (144)..(144): n is a, c, g, or t
  misc_feature (147)..(147): n is a, c, g, or t
catcggtaaatagcgacgcatatccctttcagcnnaagcccgtctggcatatgggaggtgcaccancctaatgcagcaagcttgttaantatatggattcctgggtcctcccatggaaatactgattcagtagaatgggggtanggnctgggaatccgaatgtgaacaccccaggtagcctgggctttggtcatggagcagcagggcttctcaacgccctttccttcttcacctctagcctgtacccctcgcctcctc

SEQ ID NO: 532033 - DNA, 410 bp, Homo sapiens
  misc_feature (366)..(366): n is a, c, g, or t
cctttaattactgaaggagagaatcaactctgtgattcctaagttataaacccaccgttattaaagttcctactggagccaaaactcccaaattgttctgtatattaaaacttttcggcagggcatggtggcttacacctgtaatcccaatactttgggaggctgaggagggcagatcacatgagcccaggagtttgagaccagcctgtgcaacataggaagaccctgtctctacaaaaaataaaaataaagttagccaggtgtggtggcacgtttctgtggtcccagctcctcaggaggccgaggcaggaggatcacttgagcccaggaggtcaaggctgtagtgaactgtgatcacaccactgnattcctgcttgggcaatggaacaagaccctgtcttcaaaaaaaa

SEQ ID NO: 532034 - DNA, 681 bp, Homo sapiens
cgtgttgcattgacaacgggaatcccagagacctggtagtgctagttggtctatcaccaagcagatggagacctcgaccgatgctgggcaaacacggtgatcgcccgcatctctagcattgaagctagcatgaaacttacggtgggacgctcgtcgagtggggcaccatggtgcgtgcgcgcaagactacatcatcggagtgacttgaccgccagcgaggtaaccggggatgatagactcgcgtcatcacgagcatccttctgacgattagagacccatcattgattggtggatgacatgtccacggtgcgtgtgacgaccagagtcagtggacttgtcctccaagcgttgctctgcggggggtacactcaccaacttttgtttagctgactgctggttactctcgctacagaatgtgccaagataatgcccctcctcaggggctccctggggactggaaccgctgacgcccatctggggagtctcaacaagtgtcaatgtagcatgctccacggttagcatcatggaggcccttgcggaatgacatcctggtgcaagaagctgacgcgtggaagtgcaattggggcttgttttgtccccagtggcgcacgattccagagtccaatgtgggggcaacttggagagagcagtagcaacaccgtacacgaagactgttccggc

SEQ ID NO: 532035 - DNA, 140 bp, Homo sapiens
cgagttagtccaacgctgtggaagacacaaaattgttcaaggaatggtttcgaagaaatgtaatgagaacgacatcaggatgatgttctctccattgtggccagatagaagaatgcctggatcctccgggtgacctgatg

SEQ ID NO: 532036 - DNA, 324 bp, Homo sapiens
ccttgaagatgccaaagagactggaagagtcttctctgatcattataaaaggaaagagctgggagtcgggggacagagagagctaacacagcttctcctcctactcaggtatatctactggattcaagtatcagacttgcatgcacaacatacatacctggcatgcccacacggacacatacacatacacacaccgaccatgcacacagaggcacacacagacatgcatacatacacacagctgtacaccacccctgtacacaacagatgtgcaggcatgtgcaaagaaacatacacagatgtgcacacgcaacaaaaccctgg

SEQ ID NO: 532037 - DNA, 241 bp, Homo sapiens
ggtgatggacttagctcacatgactgacaccacacaccactgtcacgaggtgaagaaatgagcgcggtgcaagccagcctggagccccgaggaggctgtgcctcctcttcaagagtgggaggtgtggcagtgcctggagtgttggggtgcagcctggtgaacacctccagcttaatagtgctgtggttagagcacgaagacgtggactctgctggcagcagcccccagccctgacctgctc

SEQ ID NO: 532038 - DNA, 457 bp, Homo sapiens
ggcactttcttctctccattgcctttttctcatgacttgggtaagggtctgccgctcttcctcaccttccgggtcgggccttcggcattctaagtggagctttctggagagggagccccgttctaagggcactgagagaggagtggctgaagtgagaggtaaccaggaaagcaagatcagtccatgcccacaggccatacgtgccaggtggccgacaggagatgctaatgtgcttctacgtgaggcaatgcaagcataagaagggaggtcgcaaatggagacacacacccgctagcttcacacgccgttcccatcaatctcgttgcaaagaaggataatcatggaaaatcattaaaatgacagatggctagattaagccatgagaagttaggcaagagcagatgtatgtaagtgagtgtccgtttctttgaataaaatccacattgtaaaaactaaa

SEQ ID NO: 532039 - DNA, 83 bp, Homo sapiens
  misc_feature (53)..(53): n is a, c, g, or t
ttagcttagtaggaaattgttattattaaggtttaaaaatgagaacaggtgtnttttccaaaatacttaaaaataatagtgtc

SEQ ID NO: 532040 - DNA, 597 bp, Homo sapiens
  misc_feature (469)..(469): n is a, c, g, or t
ctcacccggagggggtggggggaagggtcagccgtcaccctgagaggggcgggggtggatgggaacagcctccggggcctcggactggtctgggctccgggagcgcccccgcccgggggtgggagctcaggcgggggcggccgttgaggaggaggagcgagaggtggtgcgggtccgagtcaagaaatgtgagagcttctggcggccagagttccgctcttgggctgtagatccccagatcacctcgctcgaggtgtggcagcacatcctcatccgagccttggattggagtggaaagaagacgttgggcatcagctaccggggccgggaccggctaggacaggaagtttacctctcacttctatcggagggggacctcagcacagccttggccactgcctccaaaccttaccggcaatggcgtgtagatatccggccctcggaggacagcccatggctagaggacggngacataatcagccccaaagatgtcatgggctccgatgtgtggctggctgagaaccggtcatcactgacgagggccgccctgccctttacacagtccatcctcactcaggtgggccgtaccttgtctaa

SEQ ID NO: 532041 - DNA, 458 bp, Homo sapiens
accttttaatgtaaagaaacatgtactaaatttgaatgaaactgtgacaagtatcattcaaattttagtaaatgttattttacatttaaaaatggagttctttgtaggcttttatcataattgagcagttagtcttattgagagtatttgactaggtttactgtggaattgcattgtttacacaactaagaatgtttacggagtgtatgaaggggtggatcagttaacctttaagatgatcacagtggaattcccactttaggattttacagtagtagttttgtcgtgggatggggcttaataacccaaatcattggttccgtcctcccaccacaaacgtgggatccgtgcacgttaacgattactaggactatgcagaaacctagagagattttttttttttgtgtttttttttttttttttttgtttttttgtttttttttttttctttttttttt

SEQ ID NO: 532042 - DNA, 191 bp, Homo sapiens
atggggccttattcccacatgactaatattcttattaatatggggaagaaacaggataccaacacatctcatatatctctcccccttctctctctctctctctctctctactctctctgtgtctctctctctttcccacttttacacagaaataaagcccactattaggacacgagtgcttccggggatcc

SEQ ID NO: 532043 - DNA, 483 bp, Homo sapiens
  misc_feature (163)..(163): n is a, c, g, or t
  misc_feature (212)..(212): n is a, c, g, or t
gtgagctgatcagtactggacatgtgcttttatagcaggagcagagacagctttgccctttctgtgctgaggactacacagaaagtctgtcagctcacgatgctgagatgtgcgttaaaaactactatgaagtcacaagcactccttgaggtgtcagaagtgngaagaaactggaggctttcttagagtttgagagaaaagcttcagatccnaatcgatttacaaaccgaggaggaaatcttctaaaagaagaaaaacaacgagccaagctccagaaaatgctgcccaagctggaagaagagttgaaggcacgaattgaattgtgggaacaggaacattcaaaggcatttatggtgaatgggcagaaattcatggagtatgtggccagcaccatgggagatgcatcgattggagaaagagagacgcacgcaggaaagacacctgacgaaccaaaaacagacgagacagagatgctgtatggca

SEQ ID NO: 532044 - DNA, 178 bp, Homo sapiens
tagcaaagtgctccttctctctctactacagaaaggcaaaacaaacacaaatcattttcccttctctctgcagctctcagaggcatttctcaccctcggcccagggtagggcaggtctagaagaatccacccccagctgtgattctcccagccctacacctgggcacacattatggag

SEQ ID NO: 532045 - DNA, 612 bp, Homo sapiens
  misc_feature (612)..(612): n is a, c, g, or t
tatgggcttgggtgagggaggtaggtgggtagttggtggtttaatatttttagtggggtgatgaggaatagtgtaaggagtatgggggtaattagtgggtgggccatacgggtagtatttagtgggggcagtggggtgtaaattattccctttttctagtttgggcacagtgcaggtagtggggtgaacagagagaaccgagggagggtaacaggaagaggagggacctacgtgaacccagagttcaggaagagatttaacactaaaatttccactcagtgccgggccggtgggggcacgcgccgtgttaatcccgaggctacccagggaggctgaggcaggagaaatcgctggaaccggggagggtggaggttgcaggtgagctgagaatcacgccatggtactccagccggggcgacagagcaagacctccattttcaaaaaaaaaaaaaaattcccctctgtataaagggggagcctcagtttcaggggcccatttccaaagggggtaccccactcctcattgggaaccctcaaggggatagggcagtgaaccctggatgagcaagatttataaccggggggagcctttaagtggtcataatctgggan

SEQ ID NO: 532046 - DNA, 193 bp, Homo sapiens
tccatctccttcgttggacaggtgtgtagtctttctctatgatcaggaacttgcagtccttgtggaaaaggtcatcgctctgcacacttgttgtgcaggctggggaggtggaacagccagtgtacacagccgcaggactctggggcatgtttttcttcaccccatatgctgtggaagtggtggtggtgccatt

SEQ ID NO: 532047 - DNA, 151 bp, Homo sapiens
tgattgtatcgcattatttggattccaagttatggctatcataaaaataatgcagtgctaaaggaaacatctttcaacgccttatagagttgctgcagaccagcttctaactggggtccatacctgtgaacaatatcgtgaggtaggaggt

SEQ ID NO: 532048 - DNA, 442 bp, Homo sapiens
tcctcgggcaggagcagaggaccacccaattccaagagccagcccctgggggaacttgaagttggccctagccagccctcctttccttatgtggcttacatagttccaaagaaaaaaccccccccccgaaaacggccttgaccccaaatttttcccagttagggaggccccacctttttagaccacccttaagggcccccccttattttaaacatttgggtgggtttcccttgggttagacccccccgggcccgttttggttggggtaaagaccctatgcctattttttctggggttaaccccaagttttttttccatatccctggtcccgggtttttactctttctttgcatagtaatatcccttaaatagctttaaatttaaaaggttgtttttaatgctattactcctccttttcccttaattaaggggtggtttttta

SEQ ID NO: 532049 - DNA, 105 bp, Homo sapiens
cgctccttcgagttcttcactagtcttagaagaactttccagaatactggcttcacactggttctggcagcacaatactggtgcattctggtatctgggggatcc

SEQ ID NO: 532050 - DNA, 232 bp, Homo sapiens
cccgtgtccatcccccttagattgaagagggggttgccacttcacgtatacatgagggccatcctaaaactgtgaggttaagttatttgtataggaagactacgggtcatgggcctgattcctgtgtaaaaaaactacgactcgtcagccttgtttttcacccttatgtatcatgaaggattgggatgaatcagggagtgctaatgtgggatctgtttctagggctgccttt

SEQ ID NO: 532051 - DNA, 101 bp, Homo sapiens
aatgagatggtccatatagtatttaagggaatggggtatatcagtaatttagggaaaggggtaatatcagtaatttaagggaaagggggtaatatcagtaa

SEQ ID NO: 532052 - DNA, 259 bp, Homo sapiens
aggttcgcaagaaggatgattagtgattggtgtcaagcgtctccctctactttttgccatccccatggatataaagttgaggtgatcttttaatccgccgctctcaatcaggtggagacgattggggatgcttacatttgtggtactctggcctacccaggaccgagaatggtcgagcgccagtgcaccgataaaattgctgcgtatggcgccttgtcattactagcatgcagctttcttaccttatcgtcatgcggcc

SEQ ID NO: 532053 - DNA, 586 bp, Homo sapiens
  misc_feature (305)..(305): n is a, c, g, or t
ccagggcccccacacacaccttgtccaaaagcgcttcggaacgggataatcctaatttatacctcaagaggttttttttttgcaggaattttttgaagcttttacccactcaagcaaagcccctaccccccaattaggaggggattggcccccaaaaggaatcaccccgttaaatcccataaaagtcccattcttaaacaaatcggtattattggcatcaggagtatcaatcccctgagctccccatagtttaatagaaaccacccgaacccaaataattcaagcccggctcattacaattttanggggtttttattttaccctcctacaagcctcaaagtatttggagtttcccttccccatttccgagggcatttaggggtcaacattttttgtagccacaggtttccccggacttcaggtcattattgggtcaactttcccccaaaattggtttcatccgccaaataaaatttccctttacatccaaacatcactttggttttgaaccccccccctaaaactggcattttgtaaatggggtttgactattttaaaatgtccccatcaattgatgagggtttta

SEQ ID NO: 532054 - DNA, 214 bp, Homo sapiens
agggtaattctattatgctgcctggctgagtcatagcctgggccccagggaaagttgaattcctaagtaagtcatcatggagatggagagttgggccttggagggggagaccctataccctttggatagcgagcaaagtttaagcagagcagtggccgtgtgcagtttgagagtcttttacgcgaggggctgcaacagaagaaggtcgtccaca

SEQ ID NO: 532055 - DNA, 768 bp, Homo sapiens
agcggaagatgcagcggcggctccggtgtgtcgccgggcgggcaggagcagcgcggacccgagccgggcagggggcgcccgccacggcacccgccgcgctcctagacgccccagagccgcctgcgggcccggactcctccatgccagagataccacacacgaacggtgcctggacttacagccgtgtagatgatacgaacgagagaacacggatgaacaccacgggacgatcatgacaaggaccaccagagcgagggaccggaacacaatggaaaaagagaccaagagccacgcgacgatgaggactaccacggagaagccgcgaccatgaatggacgaaagaggacagagcagggagactggagaccccgagcaagacgcagaaagatgacacaagaaggtctggaaagccaccctgagaaatcggaccctacacggcccataaatagataccaaaagcaggaggacagacaaacgagcaacatgaaaactaagacgaacgaaaagaaaagaaccagaagaagaaagaaacagacgcgagtaccacgaagaacagacaaaagacccggacacgacgaactagaacggcacctgccgtccacccacgcagaacacaaaagaccgcgaaccggggatacaagaaacaaacacaacggaacacatcggcagacacggaaaggcgccacccacaacactggagagcaacaatgagaggacgaacagaccgacacaggagacatcgaacaaaacagccgaccgacacacgga

SEQ ID NO: 532056 - DNA, 956 bp, Homo sapiens
  misc_feature (34)..(34): n is a, c, g, or t
  misc_feature (82)..(82): n is a, c, g, or t
  misc_feature (84)..(84): n is a, c, g, or t
ttgccaccttttagacatgaaaatgccgaaactntccagctttttggatcccctgctgtgggcggtccctggaggcgggggntncgggactcggtggcggccggacagctcatcggcacgtgcagtcatgaaccgtggcagccatccaggagcaggtgctgggcctgggtgccctgcgtaagctgctgcggctgctggaccgcgacgcctgcgacacggtgcgcgtcaaggccctcttcgccatctcctgtctggtccgagagcaggaggctgggctgctgcagttcctccgcctggacggcttctctgtgttgatgagggccatgcagcagcaggtgcagaagctcaaggtcaaatcagcattcctgctgcagaacctgctggtgggccaccctgaacacaaagggaccctgtgctccatggggatggtccagcagctggtggccctggtgcggacagagcacagccccttccacgagcacgtgcttggagccctgtgcagcctggtgacagactttccgcagggtgtgcgcgagtgtcgggagccggaactgggcctggaggagctcctccgccaccgctgtcagctgctgcagcagcatgaggagtaccaggaggagctggagttctgtgaaaagctgctacagacctgtttctccagcccagcggacgacagcatggatcggtgaaaccaggtggcttcttgcccccttctccgtgggaaccccaggcctcttgcctccctccccacctacaaggccctctcccaagggatcgcagggcctaggtgcctggacccagggtgtgccagcccgtctctgtgcagtccctggaaggggcgctgagaaaggcaccagctccttggaccccacctcccatgctctcactctcatccccgttctcttgtccacacagctcttccaataaaggtgtttctcttcctccttctcctcctt

SEQ ID NO: 532057 - DNA, 335 bp, Homo sapiens
atgggaaccctccgctgcgttggataacactaacgtcagtggtatttcggccacgaagaaccctcatctatcatactcacagtattccatgtacaatgctgacggatctcagtcctcccacacatcaacagtccggttttgaccttaagagacatcatggtctaattctctagataataaaaggcccctctatatatatactaccatggctggggggtggtagaggggaatcctttgataaattagagcctatgctaataaaacaggcagtcatgggtctccattggtacttcttggttgctaagattgattccctgagtccagaattgccccga

SEQ ID NO: 532058 - DNA, 225 bp, Homo sapiens
caaacgggatttcactggtccaatagattcaggaaagcctgaatgaacttgtcacttgtggctatcccttcgctgtcgagtaaactgactcaaagaacttgcttgttctttatcttcatcgcttctatctattgacaggatgattactttgcttaacatctctggaagaacgtgtttatgagccctcatttctcttacatccattgaactctctacgtttgcggt

SEQ ID NO: 532059 - DNA, 1148 bp, Homo sapiens
tgcagtgaggccatgtcggctgccttcctgaggccagcgggaggaggtggagcagatgaagagctgcctccgagtgctgtcacagcccatgccccccactgctggggaggccgagcagtgcggccgaccagcaatgagctgagagggtggccctgtgagctgctggccgacctgtgtgagaacatggacaatgcctgcagacttctgccagctgtctggcatgcacctgctggtgggcctggtaccttggatgtgctgtgtgggcttgctgggacttgcgtgtgtgctgggctggcacagctcatcggcacgtgcagtcatgaaccgtggcagccatccaggagcaggtgctgggcctgggtgccctgcgtaagctgctgcggctgctggaccgcgacgcctgcgacacggtgcgcgtcaaggccctcttcgccatctcctgtctggtccgagagcaggaggctgggctgctgcagttcctccgcctggacggcttctctgtgttgatgagggccatgcagcagcaggtgcagaagctcaaggtcaaatcagcattcctgctgcagaacctgctggtgggccaccctgaacacaaagggaccctgtgctccatggggatggtccagcagctggtggccctggtgcggacagagcacagccccttccacgagcacgtgcttggagccctgtgcagcctggtgacagactttccgcagggtgtgcgcgagtgtcgggagccggaactgggcctggaggagctcctccgccaccgctgtcagctgctgcagcagcatgaggagtaccaggaggagctggagttctgtgaaaagctgctacagacctgtttctccagcccagcggacgacagcatggatcggtgaaaccaggtggcttcttgcccccttctccgtgggaaccccaggcctcttgcctccctccccacctacaaggccctctcccaagggatcgcagggcctaggtgcctggacccagggtgtgccagcccgtctctgtgcagtccctggaaggggcgctgagaaaggcaccagctccttggaccccacctcccatgctctcactctcatccccgttctcttgtccacacagctcttccaataaaggtgtttctcttcctccttctcctcctt

SEQ ID NO: 532060 - DNA, 281 bp, Homo sapiens
ttttccccccccccttttttattttcccggcccctttaagaataagccccttaaggccctgggatttatttgaaagggttaaggggggccaacccccccctttttggacccccaggggtgtttttgggtttaacccattcccaggggcatttttttccttaagggtgggtttggatttgggggttgggcccccctttcttttccagttccctttttttttcccccccttggggggttgaaccccccccttaaattgaaaatcctttttttgccccccccca

SEQ ID NO: 532061 - DNA, 104 bp, Homo sapiens
  misc_feature (14)..(14): n is a, c, g, or t
  misc_feature (23)..(23): n is a, c, g, or t
  misc_feature (98)..(98): n is a, c, g, or t
cctttttttaaaantattatgtnctatatttttagtctcaaacacactatatattatatatatttaatttttttatatatataaatataaatgttttnaaaagt

SEQ ID NO: 532062 - DNA, 209 bp, Homo sapiens
  misc_feature (105)..(105): n is a, c, g, or t
  misc_feature (131)..(131): n is a, c, g, or t
  misc_feature (140)..(140): n is a, c, g, or t
  misc_feature (150)..(150): n is a, c, g, or t
  misc_feature (174)..(174): n is a, c, g, or t
  misc_feature (176)..(176): n is a, c, g, or t
aaaaaacaacaaaaaaaacagtcacttttgtgttaaaaaaaaaaaaaaagctggagagacagttctcatgcataaatgcctggtaacaaaaactattattacaanaggccacaaccttttgaaaaactagnacctagccncaaggacccntcaccaaccttatacccaaaaaantncttctgccaaggacatctgctccggcaactgga

SEQ ID NO: 532063 - DNA, 243 bp, Homo sapiens
cccctttttttttttacccaaaccatttttgggacccaaccatttgcccaggggggccccctcctttcccatccccctggccttgtggccaacccggctggttttgtaaaaaaatggggtggggcccagggattttttttttgtaatttaaacaggcccagccatgctggttttatttaaaggacatgaaaaaatgttaaagggtttaaagtgatttaacgggccgcctttgccaccccggga

SEQ ID NO: 532064 - DNA, 1092 bp, Homo sapiens
  misc_feature (34)..(34): n is a, c, g, or t
  misc_feature (82)..(82): n is a, c, g, or t
  misc_feature (84)..(84): n is a, c, g, or t
ttgccaccttttagacatgaaaatgccgaaactntccagctttttggatcccctgctgtgggcggtccctggaggcgggggntncgggactcggtggcggccggacagctcatcggcacgtgcagtcatgaaccgtggcagccatccaggagcaggtgctgggcctgggtgccctgcgtaagctgctgcggctgctggaccgcgacgcctgcgacacggtgcgcgtcaaggccctcttcgccatctcctgtctggtccgagagcaggaggctgggctgctgcagttcctccgcctggacggcttctctgtgttgatgagggccatgcagcagcaggtgcagaagctcaaggtcaaatcagcattcctgctgcagaacctgctggtgggccaccctgaacacaaagggaccctgtgctccatggggatggtccagcagctggtggccctggtgcggacagagcacagccccttccacgagcacgtgcttggagccctgtgcagcctggtgacagactttccgcagggtgtgcgcgagtgtcgggagccggaactgggcctggaggagctcctccgccaccgctgtcagctgctgcagcagcatgaggagtaccaggaggagctggagttctgtgaaaagctgctacagacctgtttctccagcccagcggacgacagcatggatcggtgaaaccaggtggcttcttgcccccttctccgtgggaaccccaggcctcttgcctccctccccacctacaaggccctctcccaagggatcgcagggcctaggtgcctggacccagggtgtgccagcccgtctctgtgcagtccctggaaggggcgctgagaaaggcaccagctccttggaccccacctcccatgctctcactctcatccccgttctcttgtccacacagctcttccaataaaggtgtttctcttcctccttctcctccttcactgccgcctttgtcatctcctttggagggtgcatgggggacgggaggaggggcacgggtttaagggacttggggagccactggaagaataataaaagtgttgctctttatcatctacaaaaaaagacacacaac

SEQ ID NO: 532065 - DNA, 154 bp, Homo sapiens
  misc_feature (129)..(129): n is a, c, g, or t
cctccacctcgactccagcggccccgacagctcggaagcacttgataaagaacagggttagaaaggcagtaggacgctctcttgacgcattgcaagtccacggaaaacaattatgggttgcttttaatnggatgaagtttatttttactggtgg

SEQ ID NO: 532066 - DNA, 223 bp, Homo sapiens
gggccccagaactattcaacattcatgaagactgaagccccccagtggaattggcaaaccccctccagcccctgaaaggaggtcgaatgggtaaaggagcatttttttattcagcaaactttctttgggtatgagggtgaaagatcaagtcctttgtgaatattttcaacaatgtagggaaatttttaaggttcacaaagggaaataaattttgtttttttta

SEQ ID NO: 532067 - DNA, 1205 bp, Homo sapiens
tgcagtgaggccatgtcggctgccttcctgaggccagcgggaggaggtggagcagatgaagagctgcctccgagtgctgtcacagcccatgccccccactgctggggaggccgagcagtgcggccgaccagcaatgagctgagagggtggccctgtgagctgctggccgacctgtgtgagaacatggacaatgcctgcagacttctgccagctgtctggcatgcacctgctggtgggcctggtaccttggatgtgctgtgtgggcttgctgggacttgcgtgtgtgctgggctggcacagctcatcggcacgtgcagtcatgaaccgtggcagccatccaggagcaggtgctgggcctgggtgccctgcgtaagctgctgcggctgctggaccgcgacgcctgcgacacggtgcgcgtcaaggccctcttcgccatctcctgtctggtccgagagcaggaggctgggctgctgcagttcctccgcctggacggcttctctgtgttgatgagggccatgcagcagcaggtgcagaagctcaaggtcaaatcagcattcctgctgcagaacctgctggtgggccaccctgaacacaaagggaccctgtgctccatggggatggtccagcagctggtggccctggtgcggacagagcacagccccttccacgagcacgtgcttggagccctgtgcagcctggtgacagactttccgcagggtgtgcgcgagtgtcgggagccggaactgggcctggaggagtctttctctgacgtgcgtaagcacgaagcgtggatccacgtatcgtaactggcttgactacgtcctatcgatgaatactagtacatggtagggtagacatagtgagatctcgttaggtatgacaagtatggatcgttacgaggaacagccaacttgtgagtaagcatgccaccatccgaccaccgaactagccatccacagagcagtataaaactaggattggattgattactccccggtctctcggacggaagcgctcagtacactcttgcctcaccttttctacctagcgcgctcctttcaacaagcgagtagacctgggtcgctaaccactccctcgcatatcacggcatgctaccaatcgacttcacatccatatattatttacctggagtgtcgagagatgcacatcattctacttgcatccctataattactacaggtcaa

SEQ ID NO: 532068 - DNA, 414 bp, Homo sapiens
aatagttaggaatgcccttggcagaactgaagtcttattaaatggtggacagagctcttgccagctttgtccagcccctcagtctcggagttatgggcagggttgggggcagtgctacactgtaaagaatttccaggctgggcgcggtggctcatgcctgtaatcccagcactttgggaggccgaggagggcggatcacaaggtcaagagattgagatcatcctggccaacatggtgaaactccgtctctactaaaaatacaaaaattagctgggcatggtggcacgtgcctgtagtcccagctacttgggaggctgaggcaggagaatcgctggaacccaggaggcagaaggggcagtgagccgagatcgtgccactgcactccagcctggcgacagagcgagactctgtctt

SEQ ID NO: 532069 - DNA, 496 bp, Homo sapiens
  misc_feature (66)..(66): n is a, c, g, or t
  misc_feature (74)..(74): n is a, c, g, or t
gacacagcgaaaagaggagggcgacgagaaagacaagaatgaagagcgtggaaccacatgagcccntcgaaaanccagggaaatggggagagagaaacggagggaagaaaaagggaggagggaaacaggacaaaaggggattggaaaaaagagaaggaaggaagagagaggggggaaaaaggagaggagaagggggacaccaaagaagaggggaagggcagaaagagaaggaaagagaaagggagggaagaagagaggggagggggaaagaggaaaaggggagaaaagggaagaagaggggggaaggggagaagacaagagaggaaaaaagagagaaggaagaggaaggagagagaaggggagggaaaagaagagagagaagaaggaaaggaaggagggaagggaggaggagacgggaaagaggaaggaaaaaagggaggagaagagaaaaaaggggaaaaaaaaaggagaagggaaggggaggaagaggagaggg

SEQ ID NO: 532070 - DNA, 99 bp, Homo sapiens
ttcgactgtggactcagagggaacacgtggaaaacggttctttcaaagcagcacagttcatccatcaatgcgtgtggcgtggtcgcgcctctgactcgc

SEQ ID NO: 532071 - DNA, 744 bp, Homo sapiens
  misc_feature (315)..(315): n is a, c, g, or t
gtggcgatcagataaggaggattggtgcgtattaatcaaaagggaatgactccctttgccttagatgctctttcaaaagaaggcatagtcgctctgcgccccggaggtcacaggggagatatggagaggctgactctgtgctggtgcgtggtgcgtcacgccgcgtgcatacttctgtgtgggagcgagcctaaagttcctgccctgtgttgtgccatcttgcagcgacttgttatttgagtctacgtcgtggatgctgaggaagtggaccttcttgttgagaggttgtagcaaaccttcgattcatggtcacanttcactggatcaaaaggacgcatacattaaggtcagcgacatctcagcatcgagagtcaaaagatgcacgtgaggaactggcttgatgggctgtcaagcatatgcctatttggattgaatggcggtcgtgggttccatggttgctgagctgccgctggaaaagtgttgctcattggcctgtattgcccctggtgtttccatactctatgcccaggctgtctacagggcacggggcacgtgctgtgtgccagtgccatcgccttgttggctgattgtcttggcctgcaatctattccctcgatgggttcttgctgcgagaagctctgggttttttgaccttgcatgtagtccatttagtttgctcatttccaaggcagtaaacctttccaggaactcaggggtcaaggtttgtcggttgttttgggaccc

SEQ ID NO: 532072 - DNA, 109 bp, Homo sapiens
gtaggccctaagctgaagaagtgaggcagtgattctgccttcattcttggtttcccaaaggcccaaggcaacattctttaggggagaaggtcttcaaagtatatatata

SEQ ID NO: 532073 - DNA, 130 bp, Homo sapiens
aggcgttgtcagtgaggcagacgaataaactacactcagctcgtcgactgcacgccgatacgctgagtgtggttgcggattctggccttcccgtgtaaccagttcgggaagcaggagccaggtagtaacg

SEQ ID NO: 532074 - DNA, 756 bp, Homo sapiens
gcagaagagcagcctctgccgccttccaggagaatgtggggagacagggcactttccctcatggtattgatattttgaccacagctgactattttgccgtcggtaacagatccaactgtttcctggttataagtgtgtttattgccggctttcctgagtacacgcagccaatgatagaccacctggttaccatgaagatcagccactgggatggggtcatccgacgagcttggctgcgagggcgctgcacaacctggcccagcaggcacccgacgttcagcgccacgcaacgtcttcccgaggctgctgtccactgacactgagctccagcatcttcacaccgaggcatggcgtcgactctcgcctgcgcagaagtcgcttacgccttgtacaacccttgccacgcccaacgagaacaggcccgtcacggaccatctggacgagcaggcagtgcagggcctgaagcagattcaccagcagctctatgatcgtcacgctatacagggcgtctgggaggacagctcatgagacaagcaccgtgtgtttcaatagaaaagttgtcactttccaaaatgccctttagaggtgacaccgtcactcgatggctcggcaaccggctgatcacctgacactttcagacatctccatctcatctcaagtcactcccggcagcagatgaaggatgcagcagccccggccctggctgctctatgcagtgaactaccacacgacccgagccggcgcgaggcagcatcc

SEQ ID NO: 532075 - DNA, 103 bp, Homo sapiens
tggggggccccgggttttttttccccccccccccccccccccccggggggtttttttgggtaaggggggggggggggggaaaaaaaaggggggttttggggca

SEQ ID NO: 532076 - DNA, 428 bp, Homo sapiens
gcttacattaaactcttctcataagtgacttttacaagctgaattgtgttccccaaaaattcatatgttgaagtcctagccccaatacctcaactctgactgtattggaagacagggcctttagaggtgattaaggaaaatgaggtcatacgggtgaaaccaaatcccacctgactagtgtcctcattaggaggaatttgaccccgacatgcacagaagaaagaccatatgaaggcacagggacaagatggccacctacaagccaaaaagggaggcctcagaagaaaccaatcctccccacacgttcatctgagacttccagctccaggactgtgacgataaattcctgctgtttaaaccacacagtctgtggtactttgttatggtcaccctatacacgaatacagccagccaataagaaaaaaaaa

SEQ ID NO: 532077 - DNA, 324 bp, Homo sapiens
  misc_feature (14)..(14): n is a, c, g, or t
  misc_feature (55)..(55): n is a, c, g, or t
  misc_feature (100)..(100): n is a, c, g, or t
aacctctctcccancccctgccctcccaaactccccttgcccagcctctgttganaacccattcctactctctgcccatcacaaggcctacttttgtaanttccgcgtgagtgagaacatgctcctctttctgggcctggcttatttcactgaacataatgtcttccagattcatctgtgttgctgaacatggtacaatttccttctttttatgcctgaatattatttcattgtgtatatagaccacatgttccttatccattcatccattgatggacataggttgattccatatcttggctattgtgaatactgctgcaataa

SEQ ID NO: 532078 - DNA, 82 bp, Homo sapiens
ggaggcagggtaccactatgttgcccaggctgttgtcaatcaaactcctggcttcaaggattctcccttctgtcgtcttctc

SEQ ID NO: 532079 - DNA, 135 bp, Homo sapiens
  misc_feature (38)..(38): n is a, c, g, or t
catccaaggcaaaatatattgggtttcccttatctcgncaatgcagttggggtgactttcttttgctgtttcctccttcctcattccctccttttacccctctgcagtttcttagcgaggttgggctgttcatca

SEQ ID NO: 532080 - DNA, 536 bp, Homo sapiens
ctcctacctcagcctcctgattagctgagattacaggcgcccaccaccacgcctggctaatttttgtatttttagtagagatggggtttcaccatgttgaccaggctgttctcaaactcctgacctcaggtgatctgcccgcctcggcctcccgaagtgctgggattacaggcgtgagccaccacgcccggcagggaccacacaatttattaaccaaccaggttaataaattcttttttttttgggagacggagtctcactcttgtcacccaggctggagtgcggtgacacgatctcggctcactgcaatctccgcctcctgggctcaagcgattctcctgcctcagcctcctgagtagctaggattacaggctcttgccaccacaccccacacatttttggtatcttcagtagagaacgggaattcgccatgttggccaggcggttcttgaactcctgatctcaggtgatccgcccgcctcggcctccctaagtgtggggactacaggcgtgagccaccatgcctggccccaacc

SEQ ID NO: 532081 - DNA, 890 bp, Homo sapiens
gggtgtgattcctgctcctgcgcggttgttctctggagcagcgtcttttatctccgccggccttctctcctacctaagtgcgtgcctgcacccgatgaagattcgatggacatggtgatgatgccccctgaggcccccagaagtatctttttcggtggtgaactaaaggccgacaaagattatcattttaaggtggataaatgatgaataatgagcgagcagtaatcttaagaagggtccagttagaggggctggtgcaaagacggatgagttgcacgattggttggaagcagaggcagagtgaatttaccgaaggcaggtccgacttaaagtaacactggtgactttgaaagatgtctgtagagccaacgagttgtcccttggtggggctttgaagtaacaccacccagtggtcttacggtgtgaagtgtggttcagggccagtgcaatattattggagagcacttagtagctgtggggaagatgcagaagtcggaagatgacgaggaggaggatgtgaaagtcttcagtatatctggaaggcaggtcgtgccctggaggtggttgcagggttccaccgaaaaagtaagaattggtggtgtgaatatgatgaccggatgatgactgaatgaggaggttgatgacgccgattgatgatgatgatttggtgatgaggaagtggagaaaagggcaggagaatatttgagatgatccggcaaaatgggaaggtattagatgggaaggtcaactcttaaccaagtaaggggaatcttgaaggaaacttaacagggtttttgaagttaaggcggtaaaggtgccaggggcataattaagtcggggaaaacacgggggtaaaaacaaacattgagtgtcacaacaactagagactc

SEQ ID NO: 532082 - DNA, 434 bp, Homo sapiens
caagcagttaaatacagactcaacattagtctaagccacactgggcagcacacctcaaggtgccctatgaagcatgagactggaagttggaagagtcactggatttgggcagcgcctccctcggcgttgattttcttacaggaacaattctgtctcttctgcatgccaggttctgtcactgaggaactgaaacacttcctcactctgaagtacaagacatttggaactgacagcccagtgactggctacttgggtataccacacccccagcaaaaaaaaaaaattcaggggcaaatttctggcatgtttggaaaaatctcaggtgggcttaattttgttggaaaacgtcattatgagatcttccttaccctaaagggtcatttttccctaaggctgacagaaccccacctttagcagcataaggggcctctact

SEQ ID NO: 532083 - DNA, 284 bp, Homo sapiens
gggttttttttttaaaaaaacccttttgggttaaaccatttgcccccgcaatatttttttttaatccctcaattaggtccatcagcagggttttatagaggtaagggttgccaaaatttttcttttaactccccaattttgaaagttcggttcctttgggtgggggtttctttgtaaaatgttggcccttgtgtttccccctggcccctgtttttctttttggagttagttttgggccccttccccccttagaataattttttaataaacgggaaaaactgcca

SEQ ID NO: 532084 - DNA, 1295 bp, Homo sapiens
agaaaatgtgcggcgtgagccgaacaagacgaaatccaggaggtcttattaagagtgcttcgcgcagttccaaccaacaaggcctgtttctgactgcttgtgcgccaagaatccgagttgggccagcatcacgtactggtgttttcttgtgcattgactgttcctggtggtgcacctgatccctgtggcgtccatctgagcttcatcagtgtccacagagttggattccacactggaacttggttccagctgaggtgtatgcaggtctggcaggtgaatgccaatgcgacggctataatatcagccaacatggatgcacagccaatgatgccaacaccaaatataatagcccgagctgcccagatagtaccgggagaagatccggcagctggggagtgcggccctggctaggcaatggcaactgatctaatggactagacaacatgagtagtgccgtgcctaatcactacccacagagaagaaggactctgataacattcacaagaaacaagagtcaaccccctgacggggatagcagcaagacaaatgagcctggcaagtggaccccagcagaccaaggcaccggacgcacagagagcagagggacttgggaacagccggagccatgggcgcacaaaacaagacctgggcattgaacacccgtccaccccgagaagcacgtcaacgcgtgcatgcaggaaacacggctccaagtcagtggggcacaagacaagaaagccaaggcagcgaagatacggaaaacgggtgctggggatgcgcgcaggaaggagggcctaaagggaacccaggcaagggtcacgcagaccaagcagccatcagaagacgagtgcagcggaaagggaacacagaggggaagggagcataaggtatcgcgggaaagagaaggtagggtaaggccgagattgggcagggaagtgatggctcgcggggacattgccactgtgagaacagcagcgggcacgattttggcactgatcacagagaaggatcaacgcgatgactcggaagagaagggaaggaaacagaagaacgagaaaagatagggacaggtaaaggaaggaagagaagacagacaggtgagagaccggggaggggaccagagaggaacggcgagagggcgggaagagaaggggcaaagggggggcgcaagagaagcacagagaggggaaggaaggaaagaagaggcggagagaagcggaggaaaggggggagcggaggaaaggggaagcggaggcgaggggggcgggagagaagtcagagcggggagagacggg

SEQ ID NO: 532085 - DNA, 870 bp, Homo sapiens
taaggggctgtaagcatgactttattaaagtttaggaggtcaaaaatactgaagtcaaggggtgggcaaaggccagtcccttcgggaggcctccagggattgtccttacttgtgttccgtgcccagctttcttccaggcgtgcctgtggtgttcggggcagggccgcgttcttcaaagcgtggcgtggcttcgtggcccgtgttctgtgaaagcccgtgtgtgagtgactgtggggcgatagcgtggccaatctcgaggaactcaaccttctctccagagttctgtgtgaaaatattattatttatgtgtggaaacagagggagttctctcgcttctgtgttacacccagagggtgtggcaagtgtgcggtgtgcgaggtggggtgcagaaatctttcggctctcacacgtgcaaaagctgtggtcgccctccgtgtggttctcaccaccacattatctatcgctgtggcctttcagcctctcccatagtaagcgcgtggagacacagacacggggtgtgccacaccacacaccacacacccgcgggcataattatcttgtgggatatatattataagtataaaaagatgtgggggctttcacaccacagtgtgtgtccgcgcacagagagaatggtggttctagaagagtctctctcttgagacctctccagtgaagaattctgcgcgcacacctcttgggaggctctacgcacaaaaagtgtggtctgagggtgtatacacaggcgtgtgtgagagcgaccaccacagacacccacaccgcaccacaggtgtctactatctctcaaaaggagaagaccaaagagtgtaacaccctctattgggtcgtgggggagagaagtgtcccaat

SEQ ID NO: 532086 - DNA, 271 bp, Homo sapiens
tgatttatttcatataattggagaccttgttatcaaataaaatagatgagtttctgtgcctgtaaaaaaaaaaaaaaaactaaggtgaagtcatccttccccaaagggaccctggggagatgttcgggccctcggcggactacttccaggaactcagcacctcagggactattggacactgtcggtggctctctaatggggtcaccttggagactccgtaccccggctggccaactcttctcttctggcccggggtacgtcggctggtgcg

SEQ ID NO: 532087 - DNA, 448 bp, Homo sapiens
tatcattgccagcttcagtgcagctggagcagccgctggagcacccctgtgacgggcgagccagccacgtggatgaccttcctcatctcctactggtgtgtgagcagatcggacagaagatccgcaagatcacggactgcttccactgccacgtcttcccgtctcttgcatgcatggatgtgatggccctgcctcggtgccctgcagcagctgcaacatgcagagccaggagctgcaggagttcctcggggacacatgagcggttcctgagccacgtgctagtgcctgagattgctgcacctgctgcctgccattggcacgtgcaggtccacaacaatgaaggccgcgctaccctggccctgaaccaccgcacgccgtgagcacccacccaccagtgccctccatagcgacgcctgtcgcctctgcgccagcaccccgcccgcccccc

SEQ ID NO: 532088 - DNA, 1412 bp, Homo sapiens
cattgctcttcttcttgctgcttttgttctgtgtcttttccggtctactttctcttgactcgcttcttgttatgctcatctctctctatttcccgaacctcgtcttctttcgactctttcgtttccattctgcttactcatttatgtcatcagcctattatctcgtatctgctcttccttctctctactcatttgtctcgttcttgcgtatatggtgcactttcttttgagtttctctgctgttatcgtggtcgcttgttgtttttgtttttgtttttgtttattttgtttgtttgtttattgtttttttttttgttgttttgtttagttgttttgttgtttttgttttttgtgttttttgtttgttttagttttttttgttttgtatttttggtagtttagttgacacacacagaagctgagcgcaggagacggggaagagaagtatcattctggcgcctccatgggttttctgtatttttcttttgcgtgtgcctcatggtgtcggcgcttttggtcacaagcaacaccacggctggggtcccgacactgacgacccactccaatgccaggagggttccctgcgataaccccagggttctccccggaacccggtttctggcttagatcccgcgctcctggtcctggcaaacgctcaccacaaaaattagggggtgtcgcaacgccatggagaagggaccagcatggcgccaaatccgtggcgacagcgggggagggactggagtcccgtgatccttagtggacccacccccagaggccaggaaatggaaaccccataagagggaaataccagggtggttctacctggacacgccaagatggagaccagggacacacgggctcacaaggcgagaattggaaaaccagacactaccgggtcaccaatgtttctctgctacattggtgtctaggccccacataggaccaagggtctccccaacccgcccaggctgccggacaccggtaccatggcctattggaacccgggcccaccgccagccaggaagtgaacaccggtgggccgggccattctctgcctgagcgtgccaccatctcatgtctcagatcagccactgccattagattctcccagcgcacagcacagcgcgcaagggatcccgagctgcgcgctctctctatgaccaatctgaatgcctgatagatctgggggtggtacaccacattttaatctcctgaaacaccattctcccggtcacaccccaggtcttatggaaaaattgtctttccgccaccaaaaacccgatccctggtgcccaaaagaagctggggacccctgccctagaaggccaattgcctacgttaccccgggtaccctgtggccaacacgcaccctgtacccccgagtttttaaattaaaatttttttaaaaa

SEQ ID NO: 532089 - DNA, 550 bp, Homo sapiens
tcgtcatagctgattccttgaggtaacccctttatactctgatgctttaacaacatataaagattgtagagtaactataggtgattggcatacgaaagacgttaacacaattatatcttcatcaaatgtaacattgtttattgcagattcttccgtcttgtgcagagaacaacagcagtacatccacaaatctgtcaagctggtgggacctaatgtcaccttaattctgacttgaactggaagcattttaagaaatcttgttgcttttctaacaaattcccgcgtattttgcctatgctgctactttttctagttagatttcaaacttgcctgtggacttaataatgcaagttgcgattaattatttctggagtcatgggaacacacagcacagagggtaggggggccctctaggtgctgaatctacacatctgtggggtctcctgggttcagcggctgttgattcaaggtcaacattgaccattggaggagtggtttaagagtgccaggcgaagggcaaactgtagatcgatctttatgctgttattac

SEQ ID NO: 532090 - DNA, 909 bp, Homo sapiens
ccgttcatctagtctaccatcattcgcaggtacattcatctcagtgctatagtctcgaatctgattttttatctgagtaggtctataaataaacatgtctagctatgtattccagttctaacgcaaaaaaaataaatcctcgttccacagaatctgccatcaagtatttcctcacgcaagcactgcgaatccataatccttctaattagctatcctcttcaaccaatatactctccgcgacaagagaaccataattcaatatctaccatatcaattactcatacattaattaatctactaatggctatacgcaataaaactattgaatagcccccgtttaacttctgagtcctcagagcttacccaagtgcaacccctctgaaatccgggctgtcttcttctcacatgctcaagaaactatgccccacatctcaatcagtataccagatcctttcccttcacattaaaacgtacacgccttctcctcactctctcaatcgttagtccatcataactcatgcagttgcacggctggcattaaatctcaaagaccagctacgcaaaatcttaagcatactcctcaattacccacataggatggataatagcaattctaccgtacaagcctaacataaccattcttaatttaagactatctatattagtcctaagcatactaacgattcctactactcaacttaaactaccagtgagccacgacctactactatctcgggactgaaacaagctaacatgattaacacccttaattacatccaccctcctctccctaaagaggcctgcccccgttaacggttttagccaaatgggccttttcgaaattcccgaaaaattgctgtctcccacatttgcgcattacctcttaatttattacaggaaatattccga

SEQ ID NO: 532091 - DNA, 391 bp, Homo sapiens
ttggcacggcgatacggcaaaaatctggcggcagtattaccgctatctggtcaaagtgtatgttcccgggaaaggcatcgtcagaaatctggtcacggacccttactccgtcagcctgaacaccgattccgggcgcagctatatcgccaacctgcaaaatgcccgtctgaaacccgatggctgggatcggcaagaccgtcctgaccgcgttcgtcagcccacagacatggcggtatatgaactgcatgtccgggatttttcgatcaatgatgccagcgtaaggcctgcataccgtgggaaattcatggcgtttaccgagaagcagtccgatggcatgcgacatctggaggcgctcagcaaggccggcatcaccgacatccatttgctgccg

SEQ ID NO: 532092 - DNA, 914 bp, Homo sapiens
ggaattcagtccgacgtggagagatgcgcagctgagtgtgtgtgttgtggtcgcagtctcggaaaccggtagacgctttactagacatgggcatggacctacatgtgtacttgatagagtccgtatcgacggatacttcacatagcaatgcattgtcttcagctgatgtgtgagcaacaggatggatggatggcacacttatagagcaacgaaaggaagttagggcacaggctgtaatgcagatctcgttgggtcaggaatcggccacatgaagcgagaagatgacagcggacatgaatgtaatgcaaagttagcatgctgaatggtcaggatggccacgaagtgtggactctcccctgatatgtatctgtagcaatggatggcacacgcacagaaatggaatgcacaacagacagctgagaggaacggaaattcagagcaaggcatctcccgctgatgtatcgataatggatggctacatggatgatatgagtgctgcaagaaccttcagacatgtgatgacaaagcttggagagaagttaacgagatgaataagttgatgaaatggatccagggaagcgagatattgatggtgatggtcaaagtaaacatactgtaatgatgtcagtacaaatgatgacgagcaacatgtgacgaccgttgtacagacatgtgtcaatgcctcgtgcgaaagtggtcaattggcctttgctttgtaggtagactccatctgatgaacacaggctttctaccctcaggtgtcaggacaaactaatgcatgttcatagtaattgaggcactgcatgactccgatgttctgcttgcactgtatctgaacgggtcatgggtccttaaaagcttactgtcagaaaacttgatcgacgtaccgatgtgcagtgtggcctagactcagg

SEQ ID NO: 532093 - DNA, 385 bp, Homo sapiens
gatctaatgatgtcacaagtaatggcatatcatgctatctcttaaggataacatatattctgcagtccaaaatatcttttcttatatctctcctgtctgtaccttcagtctccaccccaagctctgagtcctttacaatctctctctttctctgtgcaactctatccgtacctctccccgtcctcacccacaaccgctaccctgcacccaggccaagacgaggtcccacgttcttcctgcagcttccactctcccacccatataatccgttgtatcggcctcgccccactcacaacgcggtccatgcttacagcttttgtgtccgtgactcagccctccccaatcaatttcctcttagagaggtggctggaccgatatttagggg

SEQ ID NO: 532094 - DNA, 126 bp, Homo sapiens
ccgttggtgttatttttttttaaccccccttttttaattaataattttttggcacttggatcgtatccttggaacgagagaaaaaagaaacccaaactcacgcgtcagaaaatctcccccccctaa

SEQ ID NO: 532095 - DNA, 194 bp, Homo sapiens
aagctggtgccatgcttgaggagtggaaggcaggaacccacgtggcaggtgaggggatctcttcagtccattatgatgaccactgtaacctcctggcccagtggttcccagtgatactgagtacaggggcccaaagactataaacccagctgtgagaatgcctgatagctgggcctcatcaaggcctccaggac

SEQ ID NO: 532096 - DNA, 423 bp, Homo sapiens
  misc_feature (7)..(7): n is a, c, g, or t
  misc_feature (18)..(18): n is a, c, g, or t
  misc_feature (119)..(119): n is a, c, g, or t
  misc_feature (218)..(218): n is a, c, g, or t
  misc_feature (236)..(236): n is a, c, g, or t
  misc_feature (343)..(343): n is a, c, g, or t
  misc_feature (391)..(391): n is a, c, g, or t
  misc_feature (422)..(422): n is a, c, g, or t
ctctgcntcccatgttcnggcaattctcctgcctcagtctcccgagtagctgggactacagatgcatgctatcacgcctggctaattttttgatttttaatagagatgaggtttcaccnatgttggccaggctggtctcaaactcctgacctcatgtgatctgcccacctcagcctcccaaagtgctgggattacaggtgtaagccactgcacctggnaatttttaaatataggtnattaaaaattaataaaaaacaggtatttgcaagtttccattttgttatatgcttattattctttatctttatgtcaggttgctgtgtcaatacacttaggagatcanagtttctaaattgaaatacaaataaatatgtctgaaattttttctttnttctttttttttgagagggactctcaaaaana

SEQ ID NO: 532097 - DNA, 570 bp, Homo sapiens
gaagaaacttgtggccaccctccttggtgtcctggtgacgcagccctcgtgatggagcaggaggagagcccaccagaagaagacacagagaggacccagatcaacgtcctggctgtgcaggccatcacctcactggtgctcagtgcaatgactgtgcctgtggccggcaacccagctgtaagctgttggagcagcagccccggaacaagcctctgaaagctctcgacaccaggttgggaggaagctgagcattatcagagggatcggtggacgcaagagattcaacgcaactggttctcaaacagacgaccaatattcgccacccatcacctactatcacgcacttgcggatccctgctcccttctctgtctccggctactacacgctgccctcatcagccacgagaagctgctgccacacgactcaaccccgaccggcgagccgcggcgcctgagctcccacactcggccacggtgtccataccctccgcgtgcctgcccccccccccccccccctcggccgccccggcccccgcccccgccgccccgcccccccgcctccgcccacca

SEQ ID NO: 532098 - DNA, 249 bp, Homo sapiens
cctggccgactacggtgcccgtactacgctggtgcccttggacgtctccctcagtgggccttcagtcccagtcttgtcgcagtgttgcgggcagcccgtcgtgggggtggcagcatgtctcacgccgcagcatccaggctgcacgcaccagggtcgtcatgggcagccgccccagccagcaggcacccccatgtcatcacaccgcccaagcagcgcactcacacagggtccctgacgctcgacacttcg

SEQ ID NO: 532099 - DNA, 249 bp, Homo sapiens
cgttttagcaccgtggtatgaatggagaaattcaggctgggtcgagtggctcacacctgtaatcccagcactttgggaagccaaggcaggtggatcacgtgaggccaggagtttgagaccagcctggccaacatggtgaaacccccgtctctactaaaagtacaaaattgagctgggcattatggcaggcacctgtaatcccagctacctgagaggctgaggcaggagaataactggaatccgggagat

SEQ ID NO: 532100 - DNA, 433 bp, Homo sapiens
aaaactaggttttattaatttgtggcggatagaaataatggaaagtgaaagagaataagaaataaggtagtttttagtatgcgaataattatttttataataagagtctgattagattcagccacctcaaccctgttatgttgaagtggcagtgcgatcaaagcttatttatgatttttattgtgttcggacttatcttgctggtccttggtgtttttgccttgatcctgtttagactggtctgcatcagattctgaatccttatctttggcagcctcttttttatcagacgtattctccttagaggtgtcatctttagcgtcttgatctttagatgaattctctttcattttagtcatcgtatcggtggccatctgtttcagctcagccagtttgacagaagcttcattcaccaattcagtaatctgtcgac

SEQ ID NO: 532101 - DNA, 290 bp, Homo sapiens
cgaaacatcgtttcactacatatagctggactctcggtaggtgtccaacaatagcagaattgtcttgctgatggcacaccatgtgctttgtagatgttttcaatcacggctgtcaatgcctttaggacctccatctatacaccctcttgtcggatctgaggccatctggtatctggagggcctgaacaataggcctttgttgaaatgttgttccacgaaaaagatcaggactttggctgcacccttttccagctcctccatgttacagatcatatggacacgaatgttca

SEQ ID NO: 532102 - DNA, 350 bp, Homo sapiens
ccccctttcccccccttgttttttaggggcccccgggtcccgtttgttttcaccctccccctccggcgggaaaaagttttccccaggggccccgctcttttaaattatgttcccttataagttattggggccccaggaaattttccttttttgtccaggggccgggctcccccgggggtgcaaaacccccaaacctggggttttaggttttgttgagccccctttcccgggggggcttccaagggggggcccctttaaaagtaaataaatgggggggttttggaagggccagggtttccctgtttgggtttttttggggtttgaaaaaaaacttttttttttgcccccca

SEQ ID NO: 532103 - DNA, 201 bp, Homo sapiens
  misc_feature (193)..(193): n is a, c, g, or t
atacttgccaagaaaattgcctttaaaactcgaaaataaggcaggtgtggtgactcacacttgtaatcccagcaatttgggaggctgagacaggaggattgcctgaggccagcagtttagagacaattggccaacaaaaccagcctggccaacaaggtgaaaccgtcgctactaaaaatgcaaaacttagatnggcgtggt

SEQ ID NO: 532104 - DNA, 437 bp, Homo sapiens
tctcattaataaattgatctttttaataataatcctgtttctaacaatttcctaaatgtggcccaccactgtgagctcaattataagctgtttcagaagcaacataaacagacataaatgaggggtatatactttattgaaaactttaaatactcttcagagagaacatcacatcttcaatcaaggctcttgtgtggcctgcatggaaggaaacctgagctctcgcttgatatggagagatcagttgcagtgctgcctttggctggagtccctcacgacccgtgctcttctgccagcttatcagcctttgccacggcttcttcaatgggtcccaccatgtagaaggcttgttctgggagatggtcatattcacctgctaaaatctgctggaatcctttaatggtctccttcaagggcaccagcttccccatgtgacc

SEQ ID NO: 532105 - DNA, 336 bp, Homo sapiens
tgtttcagcagaggcaaatggtagtggtttgaggaatgagtggaaggtaaaaaagtgggaggaggctgggcacggtggctcccgcctgtaattccagcactttgggaggccaaggcaggcggatcacctgaggtcaggagtttgagacccgcctggccaacatggcaaaaccctgtctctactaaaattagccgggcgtggtggcacgcacctgtaatcccagctacttgggaggctgaggcaggagaatcgcttgaacctgggaggtggaggtcgcagtgagccaagatcgtgccactgcattccagcctgggtgacagagcaggactccatcgt

SEQ ID NO: 532106 - DNA, 387 bp, Homo sapiens
cccttggttttgtagacagagtctcgctctgttgcccagactggagcgcagtgccgcaatctctcggctcactgcagcctttgcccaccaggtttaagggattctcctgcctcagcctcccgagtagctgggactataggcacgtgccaccacgcccagctaatttttatatttttagtagagacgggatttctccttgttggtcaggctggtctcgatctcccaacctgagatgatctgcctacctcggcttcccaaagtgctgggattagaggcataagccaccacgtgccctgggcagtttctaaccctctgccactgatttcctgtgtggccttaggtaagttactgtccttctctgagcttcagtttccccatatataaaat

SEQ ID NO: 532107 - DNA, 606 bp, Homo sapiens
cggcgcgggaggcgcccagcgagccagagtggtggctggtcccgcgacgaaaattctgaagctgtacacctctaggaaatgaccacactagttcagaagaagcctgtacactctcttacaaatacatttggttattcaccatgaggttagcaaagcctaaagcgggtatttctcggagctcaagccaaagaaaggcctatgaggaacaagcgcaagaacaggccggcagcggcagaagtggggctatgactattcgacttggactcaagcttcagtagactcagacagaagcttggatgacaaaccctataaatgtactgaatgtgacaagagtttgcatgtcagtagttcaactcttttttcaaacaccagtaaagatcctattactgtcaatacggaagatcccataatgtgtgctgatgtgtgggcaagaagtttcttctcagagttctaatctcattcaggcatcgacggatccatacgggggaaaagccctacaaactgtgatgagtgtggagaagagcttcaaagcagagctcaaatctcattcagccaccagagaattcatactggagaaagaagcctatcagtgtgatgagtgtggcc

SEQ ID NO: 532108 - DNA, 247 bp, Homo sapiens
ctatctctgaaaaagaaaaggagaaaaaaaaaaaggaaggggttttagtccattcttccattgctataaagaactgcctgagactgggtaatttgtgaagaaaagaggtttaattgactcacagttctgcaaactgtacaggaagtgtggctggagaggcctcaggaaacttacaatcttgatggaaggcaaagaggaagcaggcacatcttacatggcataagcaggtgaaagagagtgaaagggg

SEQ ID NO: 532109 - DNA, 314 bp, Homo sapiens
aaaaccaccaatatcatacccataaaacagatggtccacccccagaagcagataataccggacagctctgtggggaacaagcacggggaaaacacctgttcaacctgcccacaagacacagtggtttcacctaccacaattctcagtgtttgagaggcacaaggaaagaaaggacatatgtggatcccttgtgcctatgcaaatacccacctcacagagttgtgtgtagaacactggtggtttggttcaacccttgtgattaaagagtttgtcaagcattttattcttttgaataaacgccacatatctaacac

SEQ ID NO: 532110 - DNA, 1331 bp, Homo sapiens
agcggctttcttcctcctcctcctcctcctcctcctccctcctcttccccaccttcctccactccctcccttgccccctccggcgttcctaccgcgtccctccatcgagactaggcttcagcgtggcgacgcattctgtgtggggaaccatggtcaccattatccggagcatgggagaaggcgtgctaccgatgccacacgaggatgggtagcggggacgtgagccagaagagagccccacacagcacaaacgctgcctgagcccatggaatgcatcaggtatgactcactgtagtcaaggacaccaggggatggacacgatagactggacaggtcgaccggcttactacaccctaggtcaatgctgaccgacgcaggttaggtgacagggagctcactggggagatgaaatcccttggtgggcgtagaaaatgcctagcgggaaagcgagacctttcatgaggcgggacatcagacggaccccggggccggggcagttgacagaaacttcggacaggacaagcgtggccccagtcactggggcgagcacaacacggacacgcagagggggagatgtaccaggcaacgcagtggtcgccaccgaaaggagaaactacgccgcgaggcagagaagcacgggaggagtcgaaagtcgtggccagcgggggcaggatggccacgtagccccaggacaacggctgcggaagcgaaagacgccacgaggtaccagcagtacaaggccatggggacgagcaagagtccaagctacagcaaggcggtacccctcgtgggcgagacatgcggagtaggtccgcaacaatgggccgccgcgaagggcacctgggcgaaaagcaagggaaggcacagaccggcacatgacagagacaggcgcatgacatggttgcgcccataaggagccgagctacatgacccagaagaggtgattccgacaggacagagcagcctggggaccagacgaccacagaacacagtagcgaaaagaagagggagaaaagagcatgcgaacagacacatatagcaatgcaagaaaggacgcagccagcatgcaatgtggaaccagacgggcacacataagagaaccaaagagggcacaataccgaagggagcgaccacagcacaaaagctggacgagcagcaagaacctaggctggagacatgagaggggacaacagtcagcgaagggaagccacagaacagaagagagaggcagcaccagcaccgaggacaagcgatgaggaaaggatgtgcgcacagcggagcacaccaacaggagggcaggcacagcgcaaaggaaatgaggatcgacacag

SEQ ID NO: 532111 - DNA, 174 bp, Homo sapiens
  misc_feature (132)..(132): n is a, c, g, or t
ctgattcactattagagaaacaaacaaaaaattgtcaatatgtcatctgatgtagaaatacttataatagtccgaaagtaaattacagaaatcttcatcagatgtacgaatacttttttgaaatacagtgcncgtcttaaatattcttaacaattttttccttcttgaaattac

SEQ ID NO: 532112 - DNA, 139 bp, Homo sapiens
gaagtgcgagagcctggatttgaacccaggcggtctgactccaaacccttatgaccactaagccccactgcttccccagccattcctgagccaaccgtggactagtagccaaccgtggactagtgggttccggagctcg

SEQ ID NO: 532113 - DNA, 178 bp, Homo sapiens
ctcagctcctattgaatcctgagtttgaggctctgcagccaggcccctgtgggggtgagctgggaggcaccgtgggagacagaacgcattgtggcgggaagggggggtcctgacagaggccgtggggtggaccaattcaagcctcttatagcccaggagcaccctcactggatccggt

SEQ ID NO: 532114 - DNA, 328 bp, Homo sapiens
ggctgcatgacagcaggcgtccttcgcggtcgcgtacatacacgggaacgggcatggcatggttcaaggtttgcagaaactccagctgatcattcagggctttttcagctgcgacccggcgccggatctgacggcgcagttgcacgattcggatgatcgaaatcagcagcaccagcaatgcgcagcagatgatctgcaggatgaccagtttgtagtcgcgccagttctggccactcatagccgcattagcgcgccagcgaatggtgattgcattaagctcgtcaggtgggatgctcagcaggtcgacgcggccgcgaatttagtagta

SEQ ID NO: 532115 - DNA, 253 bp, Homo sapiens
tggatacatattattgtagcgccattagccttaagctagtggatgactcagccagaatcatcgtcgagagtcatgagtgcgatagatcagaagcagtgtgatgctgtctggtgagtagtgcaaggttagtcatagtcgtgtagtgataagaagaagtaggcaggccacaaggagtaagtcggaatttcatcatgctaccatgttggatcaagtgggtatgccgctgtgttaagggcttgtaagaacaagtaat

SEQ ID NO: 532116 - DNA, 232 bp, Homo sapiens
  misc_feature (214)..(214): n is a, c, g, or t
tacttctgcttcatagagtaggtgacacatgagcagttatcaaggatgagtaggtcttggtcccttgacctaacggggtcagaacattccagcagaggcaatagcacgtgtcacgggccggcatgggacatgtggcttgaagtgctgcaggcacgtgggaggccggtgttacggcatctcaagggaatgggggtctgtacccgatgtacagggnctgtgaagggtgatccct

SEQ ID NO: 532117 - DNA, 364 bp, Homo sapiens
  misc_feature (47)..(47): n is a, c, g, or t
  misc_feature (52)..(52): n is a, c, g, or t
  misc_feature (146)..(146): n is a, c, g, or t
cccccctcgaagggtgaggcccttatggccggatccttatgggcctngtggnctgcttcattgacatcgcggtggaaaacctgtctggcctcaagttcagggtcatcaagggcaatatcgtacaagtttccgtgggttcggactgnccttctccctgttgctgggggccacgctgaacgccgccttcgtgctcgtgggctctgtgattgtggctttcctacagccggcggctgctggcagcggaatcccccagatcaagtgcttcctcaacggggcgaagatcccccacgtggtgcggctcaagacgttggcgaccaaagcggccggggcgatcctgcccggcgccgcccccccccccccgcgc

SEQ ID NO: 532118 - DNA, 222 bp, Homo sapiens
  misc_feature (8)..(8): n is a, c, g, or t
  misc_feature (192)..(192): n is a, c, g, or t
ctccaggntccacctggtccccacatcaataccacttgacaatggaaaccactccttccttcatgaaactgccacttggtggtttgtgcccccacgcccaactcacttccccatttcatgacagccaccgtctctcagattccaaacatgtcccttgctgccagctcctccctgggcctggccaccgacagngaccctctgcagcctgagctccgccattgg

SEQ ID NO: 532119 - DNA, 147 bp, Homo sapiens
tatattcacaggtcaaagcagcatcttggtgtcttgcaaaaaacttcatacgtttttctactgtgcatttgtatgaaaggtcaacattaaatcaaggcacatagattcagtcacagtccagtagtgttccagtcacagggggcatcc

SEQ ID NO: 532120 - DNA, 198 bp, Homo sapiens
  misc_feature (151)..(151): n is a, c, g, or t
acttattgaaatagcagacatttcgctagacactccaattaacctgatatgaggcgctaatcaataaaaaaagttaaacatttgcatgactctactatgggaataaattacctgtttaatacctcgactttttatagaaaaataatgatgnccaaggtaaaccaggtaacccaggcctgtgaactatatgcctggaac

SEQ ID NO: 532121 - DNA, 165 bp, Homo sapiens
gtgatgttgagtttctcacttactctttctgaggtccagggtccttatatgaagagattcatatatatgaagagattcgtctagagcagtcgtcctcaccgctctcggtctcggggggccctcaacgaccctttcaaggcgtattctaggtccaagcttgttttc

SEQ ID NO: 532122 - DNA, 199 bp, Homo sapiens
ctgagattgcaccattgcactccagcctgggcagtagagcgagactccgtttaaaaaaaaaaaaaaaaaggaacaaaattcagatttgaccttaggttgatcaatagcaacatggattacagtaagataaagggaaacattatttttaaagtattgaaagaaaagctcattgagccccagaaatcttatctagcccatg

SEQ ID NO: 532123 - DNA, 1263 bp, Homo sapiens
ggctcttgtgctggcaatggtgttcttcggatttgatttcgtgcgaaaattgatcgtaagcagcactggtgaatgaggagatgtctccgatatatgtctctctatggctcaccacgtaacacaccctggctgttagttgccctactggctcgactattgtcctgcattaggtctagtatagaaaggagttgtctaagtccgtgatcatgatctacggggaggtggagatactggtttgctggttcatgcgatatttgaacaccatcattgtgttacacacttggctgtgttgctcgcgcaacgagatcatatcaattgctttaccccatcgaatgcgtggctagagcaagtagtttagtgaaaccatccaaactgccaaggggcgaatgagttcgttgtcctagtgaggatattcaatgttcctgttcttggatacgaccatgtgagtcaactactaaactaaaacgcagaaagaataggcatgtgacttgggagacgtcgatttgaaaggaatttcctggattggtaatcagagcccgaaggccgcaaccaataagacgtgctaggcattggagttgtgcggtctataagacggcctgacttagatgcaatctcagatgaagcggacctttttgttgaatcaattctcgcaattgagtgaaagcggggtactcctcgtatgccgtggacatggagtacacccttgatttacactcgtaatcgtacactcctcgaatggggcactagacttccggttggtgacttgaaccgaactttttggattaaccctgagatctccaaggtggcgtttccccaaggatttccaaccttggacaaaaacattgggcgcggaaaaggttgttggcccccagtgttggggcgtgggagagaacgccttgggccaggtgggagtaaccccaattctaaaggcccttggatttgtctccagagaggacggacggccaagaacgaaaataatttttcgttcccagatggccacgaaataggttgaaagccggccttgagggcctggattttagtaaagcatgccccagggcgctgcagggaatgggggcacgggcgagtttgataaaccacaaaagcccttcattactggtgcttttggggtgtcccacgttaggcttgtatatcacgcaaggacccttccaggagagtttagccgaagagtgtagggatgggtgtgtgcacaacacaggcgagaggggagtttccactacacggggggggaggagagacaagcta

SEQ ID NO: 532124 - DNA, 349 bp, Homo sapiens
atcctgacacagtcatgcttccggaatatggagacgaggctttcaacaaaaaaaaaagttctgatggccaggcatggtggctcacgcctgtaatccaagcatttttggaggccaaggacagtggatcacctgaggtcaggggttcgagaccagcctggccaacatggtgagaccctgtctctactaaaaatacaaaaattagccaggcgtggtggtgcatgcctgtaatcccagttactccagaggctaaggcaggagaattgcttgaacctgggaggcagagattgcagtgagccaagactgcgccactgcactccagcctgggcaacagagtgagactctgtttcaa

SEQ ID NO: 532125 - DNA, 171 bp, Homo sapiens
tatgtgctcatcccctcccttattaggtcttcgttccaactgattttaggtgatagttaccctctagtcttaggtcaatttaaaaaagcacaaacattccaattaaaaataccataaattatttcattctatacttaggcaaggtacatggatttctgtgctaccacatat

SEQ ID NO: 532126 - DNA, 482 bp, Homo sapiens
ggcggggcgcggttggctcacgctctgtaatcccagctctcagggaggctaagaggcgggaggatagctgtgagcccaggagttcgagacctgcctgtgggcaatatagcgagaccccgttctccagaaaagggacaaacaaaaaaaaaaaaaaaacaaaggacaaaaaaaaacacaaaaaaaaaaaaaaaaacccgtgtggggggggcccgggcccccggaaacacgttccaaaacccacccggggggcccgcgggccccaagtgagcaaggaacagggggcaaaaagggtgacacagaggaacaccggggacagacaaaagggcgaggagatcccacacaaataaaaaccgcgccggggggacacccggacggttttgagaacaaccccagaaggggggaccccgggaggaacaacagggggcaaacaaacaaggggacccagggggccccaatcacaaaaacccgggcgggggggggga

SEQ ID NO: 532127 - DNA, 244 bp, Homo sapiens
gctagattgaagcgtatgcagtgagcgattttaggtctgtcttgtcgtaggctgattgcgcttgtaataattctgcctcatagggatagtacaaggaaggggtaggctatgtgtttagtccgggggtcaagaatgagtgattaggcgtattataccatagccgcctagtctcaagagtactgcggcatgtactattgacccatgcatgggggcttcgacatgcgctatagtggagtcataatgt

SEQ ID NO: 532128 - DNA, 194 bp, Homo sapiens
atgtagaggatacgtgtggagtgatgttagtgtaggagtatacatgcctggcatatggcaaaacctgttatataaaaatacaaaaatatagccgggcgtagtggtgggagccctgcaatcccagctactcaggaggctgagtgcagtgagaatcactcgaaccaaggaggctggagtgttgcagtgagctgagt

SEQ ID NO: 532129 - DNA, 304 bp, Homo sapiens
agttaaatagggagaatgagttaagaatacaaattgtctgtaatttgaagttctatgtacatgttataggagaagaagaagaaaactttgttctgagttcaatgattcactgggtgtggtagctaatgcctataatcccagcactttgggaggctgaggtaggaggattgcttgagcccaggagttcaagaccagcctgggcaacaaagtgggactccttctctatgaaagaaaagaaaagaaaagagaaaagaaaagaaagagaaaacaaagaaaaaagaaagaaaaagaaagaaagaaaaag

SEQ ID NO: 532130 - DNA, 253 bp, Homo sapiens
cctgggcctgtctctcccctatcttcccccagcccctcggccctgctctgagagtgagttcgtcctgtgccaatggtcgctgcatcgccgggcgctggaaatgcgatggggatcatgactgcgcagacggctcagatgaggtgggcggggagaccagaaggagggagagatggcatccaaagagttggggcagagccacaggggccctcagatctgaccaggatgcctgcttctgtgccgactaggccgatcg

SEQ ID NO: 532131 - DNA, 184 bp, Homo sapiens
tctgtaaaatagttgaagatgggggatagcctatgggtcttcagaaagcctctgggtttctagagagtcgttctggtaacaggttagcgaggatgagtcaagtttagaatggaagaggatagatgacagcttgcacttggtacctaaaaaccaaggtatgaattgtgctgaggccatgatatat

SEQ ID NO: 532132 - DNA, 104 bp, Homo sapiens
cgctcacaacgggcgcgggggaggggaataacatggcactttataagcacggtatggtaagggggaccaggcaaggtcttaaataaaactatttagagatgggc

SEQ ID NO: 532133 - DNA, 977 bp, Homo sapiens
  misc_feature (352)..(352): n is a, c, g, or t
  misc_feature (362)..(362): n is a, c, g, or t
  misc_feature (387)..(387): n is a, c, g, or t
  misc_feature (417)..(417): n is a, c, g, or t
  misc_feature (436)..(436): n is a, c, g, or t
gcaaaaacggccccgtgcagggagcttgctctgatgtattcggacttcctgctctacaagtcagtgatgtgtaccagcacgtcaccggagagatgatgggtggccatgccatccgcatcctgggctggggagtggaagcaatggcacaccctactggctggttgccaactcctggaacactgactggggtgacaatggcttctttaggaaactactcagaggacagcgtatcagctgtggaaatcgaaatcacgaagtggtggctggaattccacgcaccgatcagtactgggaaaaagatctaatctgccgtgggcctgtcgtgccagtcctgggggcgagatcggggtanaatgcatttnattctttaagttcacgtaagatacnagtttcagacaggtctgaagactggattgncaaacatcagacctgtctnccaaggacggaccaaggtcctgagctacatcccagcctgtggtgacaggtgcaggacaggccatgtgagccacgctgcatgcacataacgttcttccccccatgtagactagtgccgtaaggggaagtacctgctgcccagctgagtgtggcccctccgtgatccatccatctccagggagcaagacagagacgcaggaatggaaaagcggaagtcctaagaggactgaaaaggttccccccaatcaaggttccccagtaaccttccaaagcaaagttaggctgttccccagtgttgtcccagacaatcagagcgaacagattggtggttggggagccctttgggaaaaacggccagtctcgcaggcccctgcattctgtggagttggcacggtcacaaccttctggaattgtgccaggcagaatcttttatacacgcatcaattttcgcgccgcgccaacactgtggggcccagtgacaccggaccgtgtctttaaaagtgcctagtgggaaaaaaacagggcgtgtgcccatattaacg

SEQ ID NO: 532134 - DNA, 880 bp, Homo sapiens
tggatgttaaatttttttattttaaaaataaaatggattcataaagggcaagaagaagtcatttcttccgggtagtctatatgcttcttcaacaagcaacacctccaggaagagccggccagtggcaggcggggacgtgtgtggcaagccgggttcggggcgccgcgggaccggggctccggcgcggacagtggcaacgggtggccatgagggggacacgaagtggggcgagaaggcgcagagtctcaggccaggtccagcttcttctggggctcagctctcggcgcagggcccagtttccctcaaaatggtctactggttcacagaaatccttgtgacaagctcagcctgggagggtagatacactctacacccccaaggggctatatgggtctgtcaaagcctatcctaacttggaatgtctgagcggggatgcttggaactatcgaacacgagccatcagagaaccaaaggtgtggatgaggtcaccatggtcacacttttggaccaaccggagcaatggcaacaagagacgggatcatcggccttcagcgcctaccagaagagggaccaaacagggcacctggcatccagccactgacagtcagccttaatctgggcccaccggggaagacggtagataaggggggcctaatgggaaagcacaccgggggcacagataaagacggctcctgggagcactaaaggcggtaccccagcggacagggggcgtggcgaaacccggaacgaagggcctcctcggccatgggagaactcccataggcttcccaagaacccagcacaggaagcttgaggggcaaatttacgcacagaggcacacaggggacactgcttacaagaagtgacccgggacaaaggc

SEQ ID NO: 532135 - DNA, 1725 bp, Homo sapiens
acgccacctcatagtcccccacgcgtccagccgtcagctcctgggccccaatgcagctgccctctccagatacctggcagacctcatatatcagccaaagcctggctcgagcaggcaggggccatggagggaggggcccccgacagacatccacggggctcctggtccatctgactcccacgtcacgggcattctttcgccgaaccacagcagcacccagacagacaacataccacgaaaaacaggccgcgctcaagacatatagccacgaacgggctaacattccaacgaatgaggccagggcgagatggagccggactagacgggaccaagcccacagagcccagcgattcccggattgcaacacaaccatggcatctcctatggccctccaaacaacagcgaaatctactgcgggccatatatcaacagcggacccaaggggaggcctccttgaatggcccacacacatgtcacaaaatgtgaagacccaacggaacaatgcacggctatcccgtgacagacaagggactctacacagccaccatggccaactaggacaccgctgcagacacatttgaagccttgggacaaggtcccaagaacgacgtggcagacggcaagcgcccatcacacaacctaggcattagaagagcccttcccccgagctcccctggggatacatcttggacattcgcgccacgaacacttgggaaccatatcctaggcccttagaattcccaccaaggggcattccgcgggcaacgcgcgacaaactgggcgaatataagagtgtagcaaggagaaaacataccgtcgactctccgacaccacatgacacgccaccatacacacaaacacagacaagaggccacagaccgaccacaaaagaagacaacaccccatcagcacaggcagccacacacaaacgactaacaccagcagccacacccaaacaaaaacgagagcacacacaaccgagggccacctaattagaaccagaggcgcgagaaatctacaacacgaaaagggacaactgagcacccgcacgcatgataccacaaccgacaccagggacacccagcggcacacaaacagcaggcagcagcatagcggcaaacacacttaggcgacagacgagaccactaagcaacactacagaggacgatggcacacaaatacaacggacgaacaagcgacacagaccgacgacgactatacacgacagccaaggcgcacaaatcaacaagttcaccagcacctcaagtaacaacacgaagccgcgagaacaagccgggagcaggcagcgcgcgaacggaggcggacgcgagacgcctcagcgcgagcggcaggcaagcccacccacaagagagggcgcgcagcaaagagcacagcccaacggagcagaagacagcgacaggagcagcagcacgcgcagcacgcgacacaagaacgacgacaacgacaggcaacgaagaaggacaaggcagaaacgggacaaacggggcagtgcgggcgagaaggaagagagcgaacggagagacgagacggacacgagcaggaggacacgaagaagacagagaacggaacggaccgcgcagacgacaaacagaacgacgaaccgcacgacggacgagcagcgaagacaagaagagcagcaacaggccgagccggcacagagcagggcacgcaagagacgcgcaagcggcagaaccagagcgagaa

SEQ ID NO: 532136 - DNA, 1155 bp, Homo sapiens
gttgacaaaaaaaaaaaaaattccaggaaaaaaaagtgtgcaaattttttataggctcctaattctctttggttggcctaattgaagttgtctcccttcttatttttatgggtttttattattgctacaaagttcccattcttctgcagttatggaaacagtgtggctgtatgtgttagtaattattctcataatctcgggtagcacttttctcacttttaagtgtgcaatgtgaattagtctccagctttcattctcacgggtatttactaaatacgctttcccttattgaacttttttctttcttggggagaagggaagtttccgcctctgtgtgttggcgccccagggcttggagagtgtgcgcagggggcgggcgcgagactctctcaggcttatacggggaatctctctcgggcattcccccggggtcccggaggtgagattctctctccgggccttcaagggccctccctataggataggggggggaggttacaccgggggcgcgcccctggttcacaccacacttttctgtagccttaattttgtgggggctactattttctgagagtctaagacaagagtggtggggggtttttctcccacccagtgtgtgtgggcgcccagagtctcggtgggtgtgtcttcgaacactctccctgtggagcctctcaggggggtggaaattcccccatgtgtggccttgtggggggccctcctcccccagaagaagaggtctcccgggtgagggacttattcacaaccgaggggcggcgttgtgagaggcccaccgccgcctgggtgccccccccaggagggtgggtgcgcaccccccccagaacccttgttgtttttgtttatattatattcattagtagggaagagcgggcgaaaaagaaaagtttatcttccaccacacttctgccaatatcatcccccccaaggggcgggggtcttacaataaagatgtcgtgcacacgaggcggcggggcggagagacaaaaattgtgagtggggggcccaccacactagatgattgacgccccccctcttggttgggccccccccccaccgcagggggtgtttttcaagcgacccacatattcttccgccgggggtgtgtcgttataacaacacccccccaagaaaggg

SEQ ID NO: 532137 - DNA, 279 bp, Homo sapiens
cacagcctctcacagaggcatctaatgtaacctacctaccattgcgctgtgtaaaacagattctacctctgagctatgtggacattgccatcccatgcaacaacaagggagctcactcagtgggtaaactgtggtggactgctggctcgggcacgttctgcgcatgcatgtcaccatttcccgtgaacaccccatgagcggtcctgcctgatctgtacttctacagagatcctgaagacattgaaaacgaagagcaggctgctgctgacacgtgcaagt

SEQ ID NO: 532138 - DNA, 141 bp, Homo sapiens
atgagggccctcatccgcttatccaatgagcccctcatccgcttatccaatgaccctcatccgcttatccaatggccctcatccgcttatccaatggccctcatccgcttatccaacggccctcatccgcttatccaatgg

SEQ ID NO: 532139 - DNA, 193 bp, Homo sapiens
cgaaaaatgggtgaaaatacacaaaaatgcaagacttgttcaaaagtatataacgaaaaaatgtataaacaaggaagatagggagtagaagatacgtgtacagcaaggacagcaatggatcattcaaaagagaaatcttaaaatctatgcgagcaagatatggtttagtacgcattagatcatacaccaattt

SEQ ID NO: 532140 - DNA, 235 bp, Homo sapiens
cggggaaaaaaaaaaaaaggttttttttttccctgtgaaaaaaaaaagccggggcccctttttgtttttgaaaaaaccaggggttcccaggcgggggggtggggcccccccggtctttttaccggtttttgggattaaaaccccgggttggcccaaagggggggattttttttcgggcccccttcccccccccttttgggggaagggtaaaataaccccccggtttttttgttta

SEQ ID NO: 532141 - DNA, 331 bp, Homo sapiens
  misc_feature (12)..(12): n is a, c, g, or t
  misc_feature (83)..(83): n is a, c, g, or t
  misc_feature (93)..(93): n is a, c, g, or t
  misc_feature (112)..(112): n is a, c, g, or t
  misc_feature (119)..(119): n is a, c, g, or t
  misc_feature (138)..(138): n is a, c, g, or t
  misc_feature (146)..(146): n is a, c, g, or t
  misc_feature (161)..(161): n is a, c, g, or t
  misc_feature (165)..(165): n is a, c, g, or t
  misc_feature (168)..(168): n is a, c, g, or t
  misc_feature (170)..(170): n is a, c, g, or t
  misc_feature (180)..(180): n is a, c, g, or t
  misc_feature (197)..(197): n is a, c, g, or t
  misc_feature (260)..(260): n is a, c, g, or t
  misc_feature (321)..(321): n is a, c, g, or t
aagggagaatanaagagaccccctgataaacgaaaaatcgaggggcgcatcaaataccctcccaaaaaaaaaaggaaaaaagnccctctgggncggaaggggaagggacagnctaaatncttcttgctcccgtgccgntgactgtnaaaattgtggtgcanaaanctnanggtggtgaanaaattgcagaggaaaangagaaggaagggaaagccgcacataagcacttggaaatccttgcaatgagggtcctgggcaangttgaaaaacgtaagcgcgttaaaaaactgcaaaaagtgtccaaagaaaaaaaaaggcagnaggaaggtga

SEQ ID NO: 532142 - DNA, 1788 bp, Homo sapiens
  misc_feature (838)..(838): n is a, c, g, or t
taactgggtacataccatcttttatttatattggtgtatctatggtcacattggtgttgatccaatataagaaaaaatcatgaatacattcatacgtatatctctttaaatttgggtaattccacattggtcaaatattggactggtggttcgattatggggtggtcctaacccatatttaaaaaaaaaaaaagagagaaaatatggactctgtggccaaacagtttcttggtgggtcgcgcctatggtgttatgtggattataacaacaggcatattatcctatatatatatgtgtctctcttattttaaaacacactcatatagatttgtggaaaaagagacacccaggcgagatatctacacactatacagtggttatcagcgtggggccctcgcgggggcacacagtgtctttctatacagacacaatctccgacagaccttccacatctctcaattctccttatctcccgccgaagagacaatacacacttttatagacggtgtcagcacaccactctcctgtactaaacacacaccactctttcagaagtgtgaaatagaaagaggggaggagaaacacactattgctgtggctcatatatcgcctctataacacacagagggggcgtctcccagagggctggccctagagacaagagacaacacaacagagcgtggccgcctgtgggcttagagaaacccatcccagagtgtggtcacccacaacacgggcgttgtccctgttggcgaaccccacaagaacagacagaaaacacgacatgtgcgcaggtgcacgccccataatcatcttgcaacaccacgaagataagcanctgaccacgctcgtgctgcggcggaagcgcaacagcacagtcgatacatcaagaacggcgcgcacacaacacgtgacttctaaagagacaaagcgccttcacgcgaggcggactccgacctcatagttcagtacgacacaaaacacgcaccccctggctggtgtgtacacccacaacagacctagcgagaacaccccagacatgcggcagtacaatcataagctgcgctccgaagaaaggcccataacccacaccggcgcgggcgccccaacgaaacatccaccgacgaaacagcactcagcggggtcgcctaccccacaacaacataaccacgggacgacatagttgccgccccccaatatcccacaccatttcaaagcgactggggagacaacggggtcaagcccccaatagtctacacgggccgaagaggaaccatacgtacacaccaacaccacatagtggtcagctagcgccaaatcacacatccgagcgagtaaaccacaaaacaagcagctgggtgtatcaaacagacacacccagcaaaacaacgagcgggcgtagaaacaacaacaggtgtggccgagaccaacgacgagggccacaagagcgcgccccaagaaagagaaaacagagacgccccgcctcagatgacgattgggcgacgaagtattcctagccacagcaaacaaatatcggtgtcgagcccgacaaacatgtgtccccaccagatgatgtgtcgctagataccgggtgcaccgaagtggggacaaccagagacgtaccaccacgagcgctacaaccaaccagcaggtgtcgtctcgacagaggcgcgcacaaaagactggatgctgacatatcgacatacgaacacacagccactgctggtgcagacagtataagcagcagcgatcacaacacgatcgtagcacaatgcgaacgtaatctga

SEQ ID NO: 532143 - DNA, 209 bp, Homo sapiens
tctctgtgaatgaaacgcagtcctggcttgacctcaccatcagtccctctttatttaaaattgatttgattgaggtatagttgatttaaaatgctttattggagttccctgaaagccaagtgggttaaagatctggtgttgtcactgctgtggctcaggttgttgctgcggcacaggttcaatctctaccttggaacttcctctgcacg

SEQ ID NO: 532144 - DNA, 677 bp, Homo sapiens
  misc_feature (58)..(58): n is a, c, g, or t
cggcggggcggttctcctgggttcaggaattggcccaagggatatttaggctgaggancttgggccaaggccggcgagccgtggctccctcccaggccgggccccgaaggcctgctcgtggatgacccaggctgtttttaaggggtgaagagggtgcgttttcaatcagatgtttttggaacgtttaaattgtcttctttggaaggacccgtcccctctttgggcttcaaaggccccatttcaggcgcattgatgagaggatgtggtggtctactctgatgtcaatcttaagggctaggtatgtcccaagatctcttataactgctgttgatgatgattctaatagctaccatttgtcgagtacttcttgcccgcctggcattgcacaaagcaggttacacatacggtctcatttaaaacgtgtgaggtaggcacctgttgttatccctattgcctatgtgggcgcttgactcactggcttgaataacttgggctcacactgctaggcagtctgggggaggggagttcaaaccatggtttatctggaccgcttcccggccatgtagattaagaaagcattcttgggtcctctggagaaagcccgtatttgcaaagcaagaaaaagcttaatgccagtgaaccctctctctcttggttggagcacgcataaagactgt

SEQ ID NO: 532145 - DNA, 887 bp, Homo sapiens
gagtatatattgtcgacccaggcgttcggcttccgcagagtcccggtacgtggtccccgaaattgtgaatagttaaacaatcgggacacttctgttgaaaatgttccgcctcaagtacagaaatgttaacttgtccaaagagataatacagggcaggaagttttcagaaacttattatacacggattctgccaacactgggtgaaacaaacgcactaggatccctgggttacgttgtagttcaaccgtcaaagagattctgctggtatttggtcgtatagttgcaaactcgttggggaaggaaaaagaagtcaactgacaaaaatgaaaagtgggatgcaaaagattgggcacacagttgtatcacagtattcctgtaggtagaaagcagtgcacagcacaagatggacaagtgcaccagtcgaagcaagtagctggtctaaggtaacgtcagagaagattcaacccacactccgtggcatcgtggagcgcgcgagccaactacaagcggcgtcagtgggcatggcgtggccaggaaaccgcccacggaatgaagtcattggacaccccctggaggcagaacacagtggacatgggggggtgcgacggatgcggcagaggtaaccagcggtgaacttaagtaacgcgatggaagggtccggagcagacatggggcccagttggcagatgaagacccgaggcaacatacgtgcacgcaatgtgagctacgaagcaacagagacgagaacactgactcacacgggacaacagaaaggggccagaaaacgacaagcgcagacgagtggagaacaggatcctacgagcataagcgagaaagaacagcatggcgcagacaaggagacacgagaggacaaataaaaggaagag

SEQ ID NO: 532146 - DNA, 391 bp, Homo sapiens
tcgccgaacaaaagagatctttagttcaagaccagcctgaccaacatggggtaaccctgtctctactaaaaatataaaattagctgggcatggtggcacatgcctataaattctagctactcaggaggctgagcaggagaattgcttgaacccgggaggcggaggttgcagcgagccaagattgcaccattgcactccagcctgggcaacaagagcgaaactccatctcaaaaaaaaaaccaaaaattcaaaaaaaccaaagaaggtaaatgccaaacgtatgccaattactgatgaatggaaggaaattattcacatttggcaaaattagttcaaaatgaataaatcacagaaattctcctcccataagaaaatacctaatttgtatctt

SEQ ID NO: 532147 - DNA, 226 bp, Homo sapiens
acgaaaccccttctctacaattgatgaaaaagatgatctgggccgggcacgctagctcacgcctgtcactccggcactttgggaggccgaggcgggtggatcgcttggggccgggagttcgagaccaggctggccgacgtggcgaaaccccgtctctctgaaaaatagaacgattagccgggcctggtggcgtgggcttggaatcacgaccgctcggggtcgacgc

SEQ ID NO: 532148 - DNA, 136 bp, Homo sapiens
aaacttaaaggggggcccttaaatttaactttttttaaaaactgggggggcaaaaaaatttaaaccgcttaactatggaaaagaaaatttgaattttttacttggaaatttttataaaaacagctgagttttttta

SEQ ID NO: 532149 - DNA, 643 bp, Homo sapiens
  misc_feature (399)..(399): n is a, c, g, or t
gttagaaggccatcttcatactgttcttgccagagacttgtattcccatttctacgtatgtctcagaacatgaacttatggatatatcaccttctcgtgggtgtcagctggtgaaaggggccccacacagaccatacgctcaagaaaataggctatgggaggaagaacagcacacagtaccaccccatcccacccccaaatatgttattaactgaaaaaaaaaacatgctagtttctaccaggctagtggtgtaccagcgctctcgatttttaagatctgctccccatatactgggttttgccttctcatcaggttgtacaacacatgtcgcagattggctctagtctgtccttatgccttcggtcttgtctgaggactgcgatacaggccttggtccnttgagcattcaataccagtaagattctacagaaaagctggaagggaccaaaatactgattgtaataaatatttgtgggcctccttgtactgactgggcagccgatgaagggggtggggaaaggtctctgagaggcaccaccgatggcttctaggtctacacaagagacaggtactgccattagctgtgcgtggagacatcggaggaggagctgctgttgctgttggtggtctgggccctcttta

SEQ ID NO: 532150 - DNA, 371 bp, Homo sapiens
caggcatgcaccatcacgccctgctattttttgtatttttagaagtagagatggggtttcaccatgttggtcaggctggtctcaaactcctgatatcaggtgatccgcccgactcggcctcccaaagtgctgggattacaggcatgagccatcgtgcccggcctttttgttttttttgtttgtttgtttggtaagtttttttgtagagatgggggtctcactgtttcccaggctgatctcaaattcctgggctcaagcaatcctttggcctcagcctcccaaagtggtggaattataagcgtgaaccatggtgtcctgcaagtttgccttttgagtccaaggacaaggaaattatcagcctagaaaggcca

SEQ ID NO: 532151 - DNA, 977 bp, Homo sapiens
  misc_feature (31)..(31): n is a, c, g, or t
  misc_feature (835)..(835): n is a, c, g, or t
ctgaagcagatcaaacaaatactaatatttngccgagtttataatttgtgtgccgcggacgatgtgtgcacctattctcccactgtcgacattgtcgcggcacacctggtgtgttctccttgttggtggtttatatcccccattttgtggtaccccaatttgtcggggttttccacaagtgttcgcaaatcttcatagctggtgtccatcataaactaagccgttgtacccactttacaagatcggcctctcgcggtgaaaggattccaccatctgcatccaaagaattgtcagatggcttgcacccaacacctgggggccaaatgtagggtttccctccacccccggcgcgaccaaattacttcccccaaaatcaggttccacggggcacgcaaaggagcagcccctcttcctggcggaaaaacaatggcgatgggccctcccacacgcgcccataggcttcggtggccaccccacttcttgtatgcacaagttttttttatattagctcgcgggtagccaccaactgctgagctgtcagagtgtaaacatcatagagggggcaagagcacaatggatgtacaactgttctcgcctccccaaataatactggcgaaaatctttcctcatgtccagaccccagctcatcaaaatggttgcgaacgtatcgtgcatccagcatggtgccaaggcccatagcgttagggatgcccccgatattagccctgcttgtggcagaaaccttccatgtcttctgccaaagagtcagggaagcaccaatattttctgatatataaaggcgtccgcggctgttagtttccccacgtgttcgtangcacgctcggtgtatcaccgcagagagaaaggattaaacaaggggacaaacaacaacaacaagacatggcttttccttgggaaaacccttgctatacagccgcaaaccgcccaaaaacaaaaatttgaacaccccacataca

SEQ ID NO: 532152 - DNA, 211 bp, Homo sapiens
ttttttaagggggggggggggttttccccttttttaaaacccccccttttttccctttttggcccccattttttttttaaagggggaccccccaaaattttttctttttggaaatttttttttagggtttcccccccccccccccccccggaatttttttttttttttttcccaaatttttaaaaaaaaaacccttttttcccccccccca

SEQ ID NO: 532153 - DNA, 421 bp, Homo sapiens
ggctactatacggcaagtgaccatggagttgtagcccttggattcgttggtgctcagggaatacccattacacccgttggctggcatgtctatcgtgctcaggaagatgatgcaaagcacgatgtgtatggagctgatgctgattgcactgtaacgttcttgcacatccttgactacaatagacgtccaggatgacatatgtcactacactggtacacgcgcctgggttggccgccatccagaaggaatgatgatatctatatatgactgatagaatgctagtgggtcagcggtgctactgatcccgagcgtttttacacaagaacggtgggtgtcacaaggctatgactggacaggcacagggcagcggcttgacagctgagctctgtgtcgacaggagactgatgattggtgcgtgttt

SEQ ID NO: 532154 - DNA, 150 bp, Homo sapiens
ccccgggatccaagcttgatcctactggcaggatcaaccaggttgtcgtctaattcggactggcaggatcaaccaggtggtcgacgaattcggactggcaggatcaaccaggttgtcgacgaattcggactggcaggatcaaccaggttg

SEQ ID NO: 532155 - DNA, 150 bp, Homo sapiens
gacaattaaacgagataaccgcttgtttctcagaagcaaatgtcagacagacgcgaaaatgacatgtctccaagcaacaatgtggtcactatcatgtccaccaccactgaaacaagcaagggtgcagtgctgtcagacatcgagggtttc

SEQ ID NO: 532156 - DNA, 715 bp, Homo sapiens
agcgggacggggctgccggaaggcgggtctggagcgggcgagacgaccaggccggcgagcgcagtgcagcgccgctgcggtgcgcggcggccgagatgggggcgtcatggagtgatgagcggagctactcggatatctgcggcggcgcctggcgctgcagcgccgcgtactactcccgcgtcctgccgggaattctgcctcagctgccctcggctctctgctgctgttcgctcagcgcctggtcacctgcacggtgtggctggcggcctacggtagcttcttctagcctctgctgagaacagctatgatcctctcgtgttgccatcttctttcacccctcttaggtctgcttggttatctccggtgttgcgtgcaagattgatcagggagacgtctgtcaatcattgagttcccttggcattcaggattgacttcatcttactgcttcagcgcgatagaaagcactgaccttcatagaaatgggcaaggtcaacggatattgtcaatcaatgaggccatttatcatgcaggaaggtgatttactaccatctgcatcttattgaaagatccagtggaaccacatgggatatcccaagtagtacccgtcttccagagtgccaatgccccggctggacgtgttgattgaagtatacaggagctgccaggagatcctggcacaccagaaaggcacatcaacaagtcccatgagccccag

SEQ ID NO: 532157 - DNA, 436 bp, Homo sapiens
  misc_feature (5)..(5): n is a, c, g, or t
gttangaggtacaggaagaggttggcgatggggtcctggaaagatgaagggtgtgttacccaccgtgctctacggaacacattggctgaccatttccagtgccgtatgatgctgggcaagctgctgcagctctctgagcttcaattttctcagctataaggtcccttctggtgccgcagttgaaagtctacaaatacatcaaaatcacacaaatcccctggcccaaatcagaagcaaggggtacgcctttcctcatactccagccacagttttctgatgccacaagccacccagatcccaaagaaaacaaatgcctctgtacaccttcctcctctggatcacccacagtcggctgcactgcagacctaggccatgttcacagccccaacacacacacacacacacacacacacacacacagtgggttaagtaagca

SEQ ID NO: 532158 - DNA, 147 bp, Homo sapiens
ccgttcatctactctgctggggtgatggccttccctggtctcgggtagcttcctcacacgcctgtgctcaccagtagtcgtagtcctgctgcacactggaacgggagcctctgtggcatatccagtggttctttcccatgtgcagct

SEQ ID NO: 532159 - DNA, 668 bp, Homo sapiens
agaatttgaaacgacaggggaaaggaggtctcagtgggcaccgtcccagcatcgcggacaccacagcggcccttcgctccacgcagaagaccacacttctcaaaccttcactcaacactatacttacccaaagccagaagatgcacatggaggaacatgaggtggctgagctgtaagcacccacgagcaccatacttccaaggtccaccgtgatcaacatccacagggagacctccgtgcccgaccatgacgtctggaccctggtcaacaccatgttcttgaactggtgctgactgggcttcataggatacgcctactacgggacgtctagggacaggatgatggccggcgacgtgaccgtggcccaggcctatgcctccaccgccaagtgactgaacatctgagccctgaagctgggcatcattatgaccattggatgcatcctgttactgggagatgactctgtgacagattaccatactatgttacagatgatacaggaagaaacgtgttactagaagccgaccatagcctgcactcttcgcactcgaatgtgctgctgactcttgcacgctgaggctgttgcccactggcccattagtcctgcccctagatacagccagttatacccacacacctggatgacagggacattgcactgtgccgct

SEQ ID NO: 532160 - DNA, 225 bp, Homo sapiens
ccagcatacttctgggaactcaggttaaatgcttgctggaaacctgcctgtattagtcggtgtcaggctgctaataaacacatacccgaaagtgggtagtttataaagggaagaggtttccttgtatagttccacgatggcttggggcgggctcacaagtcatggtgagacaggggaactgataacgcaagtagcgcccccacttttacacggcgtgcgcatgga

SEQ ID NO: 532161 - DNA, 1650 bp, Homo sapiens
  misc_feature (831)..(831): n is a, c, g, or t
  misc_feature (834)..(834): n is a, c, g, or t
  misc_feature (840)..(840): n is a, c, g, or t
  misc_feature (846)..(846): n is a, c, g, or t
  misc_feature (848)..(848): n is a, c, g, or t
  misc_feature (851)..(851): n is a, c, g, or t
  misc_feature (855)..(855): n is a, c, g, or t
  misc_feature (858)..(859): n is a, c, g, or t
  misc_feature (861)..(861): n is a, c, g, or t
  misc_feature (867)..(867): n is a, c, g, or t
  misc_feature (876)..(876): n is a, c, g, or t
  misc_feature (885)..(885): n is a, c, g, or t
  misc_feature (1227)..(1227): n is a, c, g, or t
ggagccaaagataggctagtacgaggctgggtgtgaaggtttctctccgctcccgtgagtaacttggctccgggggctccgctcgcctgcccgcacgccgcccgccacccaggaccgcgccgccggcctccgccgctagcaaacccttccgacggccctcgctgcgcaagccgggacgcctctcccccctccgcccccgccgcggaaagttaagtttgaagaggggggaagaggggaacatggacatgaagaggaggatccacctggagctgaggaaccggaccccggcagctgttcgagaacttgtcttggacaattgcaaatcaagatgatggacaacacttgagggcttaacagctgaatttgtgaacttagagttcctcagtttaataaatgtaggcttgatctcagtttcaaaatctccccaagctgcctaaattgaaaaagcttgaactcagtgaacaatagaatctttggaggtctggacatgttagctgaaaaacttccaaatctcacacatctaaacttaagtggaaataaactgaaagatatcagcaccttggaacctttgaaaaagttagaatgtctgaaaagcctggacctctttaactgtgaggttaccaacctgaatgactaccgagagagtgtcttcaagctcctgccccagcttacctacttggatggctatgaccgagaggaccaggaagcacctgactcagatgccgaggtggatggtgtggatgaagaggaggaggacgaagaaggagaagatgaggaagacgaggacgatgagggatggtgaagaagaggagtttgatgaagaagatgatnaanatgaanatgtananggngatnagnncnccgatnaagtcagtnaggaggaanaagaatttggacttgatgaagaagatgaagatgaggatgaggatgaagaggaggaagaaggtgggaaaggtgaaaagaggaagagagaaacagatgatgaaggagaagatgattaagaccccagatgacctgcagaaacagaactgttcagtattggttggactgctcatggattttgtagctgtttaaaaaaaaaaaaaaggtacctgtgatacaaaccccaggacacccacccacccaaagagccaaagaatagtttcctgtgacatttccgcctttcctttccatgttagctccctctgtggataatttaccaccaaggcttgtggactttcaccccanacaaaatttgtaagccgtttgttaggtttctggtgttaagaattcttgcctgtagccgttggatagcctgtgcattggtgaagttcaacccgtctggtggctaccagtttacactgagaattgtaccagcattttttacctttctgttacaacaaaaaagcttgtgtacattaaaatcttaccattttggaaaaacaaaaaaaacaacaaaaaacaaaaacaaaaaaaaaaacaaaaaaaaaaaaatcgcgggcctatttttctcggggcggcaaaacagcgagtcatagggggcctgtgcgctaacaaggtgttctcacaaaaccatcatttcttaccaaaggggaaatactcgggggtccccaaaaagagccttaaaatcctacaaaacgcgggtcactgataaaacccaccaaacgagga

SEQ ID NO: 532162 - DNA, 180 bp, Homo sapiens
  misc_feature (24)..(25): n is a, c, g, or t
agcagttttggcccgtgggccccnnctgttttccccctgcccaaggaaaggggacctggccggggcccattttcccctaagtaacctcaggggccggccacggccccgctcccgagccccgccccggccacggccccgtgttttgcactttcatggcccctccaggccaaaaactgcttt

SEQ ID NO: 532163 - DNA, 119 bp, Homo sapiens
agcaggtggaaggagcccccattcaaatgaatctatcaaactgggaaaatactgcatatcaccaccatgtagaggataagtagcaaatggactaatttagtatggtaagtaactattca

SEQ ID NO: 532164 - DNA, 387 bp, Homo sapiens
gatacatgaactcgatggtgtgaatagtgacaaaaacgggggggggtagtcagtatttactcctacagagcatattttactgagctagaataatgctaggctctaagtggcataactaaaaagctggcaggacgctggtttgcacattctctactgttaaaaccctctcgtcaggcaaagcctgcaaaaccctcaacaggacagaagaaaggatcaaggacttcagccatggacgtggagactgtccattcacatagaattctatgtgcattaacataggtacaatcagagtagaacttggggccacaggctctaaactattatgaaaagggaataaaatataataaaaatgtggctggagtagctgtttggaaaatcatagtatca

SEQ ID NO: 532165 - DNA, 335 bp, Homo sapiens
gtttgctgactttggggtaaacaactttgttataaaccagtttttgccccaaaagcatgtgcccttttcaggggcccaaagtggctgaggaaggaaagcttcaagctggccatgggggtccccaacagtcattccaggcttaaatgatgactagcctaggtcatcagagccccgactccccagagactaaaatcagagctctgtcttgttatgataaatttcatttgcttggaaaaaaaaatgctgaaagcccgtgtttaaaatttttgggcaaatgccccaaccaattgacttggcccaaaaaaggtaaggtaaataaacctttttccaaatga

SEQ ID NO: 532166 - DNA, 135 bp, Homo sapiens
cgatctggggtcgaggatatccaaggatatactatcttagcccgctcatcactccattcgaacaaactcatcataagattgattcttccgcagcaaaatcctggatgcggctatatccacactaggccctggatg

SEQ ID NO: 532167 - DNA, 281 bp, Homo sapiens
ttgggggggggccccccctcctatttttcaagaggagtttttccttttccgcttttttaacccgggggggcccctccccaggggggccctttttttttttgtgccccccccctgtcccttttttccccaaattggccctgttatttgggggttcccttcccctcctggggttttaccggccctttttgggggggcccggggtttgggggggtccccccttaaaaaaccccccccccccccttttttttgtttttcctttttgggggttttcccccccccca

SEQ ID NO: 532168 - DNA, 1296 bp, Homo sapiens
  misc_feature (75)..(75): n is a, c, g, or t
ggagtctgagctggtgctgatgtgcggctgtgcggtgtgctgtgctggtgcatgcatgcatgctgtgtgggtgcntgctgtggctggtctgtgtggctcctgtgtgcctgggggctgtgctgtgctgccatcgtttgttgccctgtggtgcctggtgggtgatgtgcctggggatgtggtgtgcccctgtgtgtgtgtctggcatgggggactactgtgtaaactggtgcctgggagtcttgagtgaaacgttgtgatgccttgatgggatgcattgcttgctttgggatgcccctgatgccctgggatagccccggatgccccgacagagatgggatgcactggcccctggaacccctgatgcatcaccccctgagagaatggctcccggggagcccgttgggggccattgagagttacaggaggagggccccgcctggcaaggcacaagcgaatgggacgtgggatcggggaagcgtggaggcactggtgggaacctttgggggttagagaacgtgggggtttgagccccccttgtgagggtgaaacatgagcatggcccagcctttttggacggtagaaagccgcatggtgagtgcgtttggagaagaagcattaagttccaagaagaggcattcccaggcatgttcccagtgggggacatggaattgtgcgcacggcggacaggacaatgctttagagagcaaacgggcattagatggggtggtgaggccttagagccgagtacacgagtggcaaggggcatgagaggagaaaggccagtgtcattgtgacgctctattgggaaggtttacccagaagctttccccggagggacgaaagattgagtctttggtgaaccccggatggtgttggagtatcccacatgtgctacccaaatttgtgtcagagaggaagagccaacgagggcactctgtgcgaggttgatcgttgaaattgtcgccgccgcgtttggcgcaagatgctttaaaatgatatgtggccgacagtttgctgtgtacagcgtaactataggcgtctacgccacacgtacagtggcgacgggctaaggagacggcagtgtgtagagcgcaattccagacgttttatacacgtatgggccttttggactggagtattaccagaagtcacaagagccagcagagtggatagaaagcaccagattaggcttgggtatctggagcagaaagcaattgacaaggagtggcagcgcagttaccgccgcgagaggggggcatattagtgggggatcatatgttaaggagaggcgattcg

SEQ ID NO: 532169 - DNA, 399 bp, Homo sapiens
ggcaggttccctaacagtcaggattccggttgcagtttttctcccccgccccaaagatacgtggttgcagacggagaaatggaggccagagacaaacaagtactccgctcacttcgccttggagcttgggccagaggtattttgttgaaggccttggtcttcagttcctcttcccagggagggaatttttacgggaaaccatattaagggagtcatttctcaacccacaggccttccgggaaaccattcccccctcctggatatcctccctcccagggccctaaagaatttgatacatactagatccctacaggggttccctgggtcagggagatgctaaggaggcaaggaaggacgccatcccccccctccctacagtcacatatctactgggctccc

SEQ ID NO: 532170 - DNA, 1292 bp, Homo sapiens
cgtatctttgcgtatgagcccgaggctgtcttctctccgtgagttggttgacctctctgcgtttttgtgtggttctgcctcttccccagatgttctgtggctctctcgtcttgtgagacgtgatatgtgtgtggtgtgcctccccgccgcgccaggttcagtatattgatttcttttgtcaggcgcggtgtgcttctttcacccccccgcggtgcttcgctttggtgtacgctgcctcctctcggcgtggagggtggatgtggtctttcgttcttgttctgttcgctctgtcttctcttctttaagcggcggggcggggagtggggatgcgtgcgcgccggcaggtgtgtgtgtgtgggcgccctctccccgcgggcgggtgtgttgtgcgctatggtcccccgcccttgggttggttcgtggggttgtggtcttcgttagctgtgcgtctatacttttggtcttttggtcttgggctgggtgttcccctcgcccctgcgtggtgtggtgtgttctctgtcgcacagagcgcagcgaggggtgtttgttttgtttgctcctgcaccggccctctcgtcactctctgttttgtccgttgtcgggggtggcctctctctcgcgggggagcgcgtgtctgttttctctctctctctgcgcatgctgctcaccctcgcgcgcggcgtgctctctctcgccgcgtgttttctctttcccgcccctctcctcgcacccccccctcacactcacccatcaagtgtcccgcctccttgtttttctcccccccacacccgtgacagaggcgcgcgcgcgcgcgccgtgaaacacttagagagggtgtgggtgcttctctcgctccttcttgtgccgccacttttcttgttcctcctccagcgcggaccaccctctcgcgaggaggcgccacgccctctaatactctctcctccccccgcgcgcgcgcgccccacccgcgccgcctcccccgcgcgcgcgcggttgtgtgggagagcccgcaccgcctctcttctctctctctgtgtgtagaattttttttatgtgtgtgtgtgctgcgcgcgcgcgtgcgctgcctcttctttcttgttgtgtcgacagatattttttgtgtgagagagaagtttttctcccctcctcgcgcggcacccccccctcccctctctctttacaaacaccccctcttctttttcgtgctgtggtgcggcgccccccctctctctctcctccccctctctcttttttttttttaaaatatcaccccccctcctcccccccaccca

SEQ ID NO: 532171 - DNA, 821 bp, Homo sapiens
tggggccccattggtttaaatgggaccttttaaaagcggggggtccccccaaccccccaggtaaaccgcggggggttttttttggccagccaacaattccagtggggggttccaaaatttgtccagtggcccagagggaaaagggggggtggggcagcaaggaaggggcgggagacagataatcagttctcccaaccaacccgggggggggccctccggtgttctccaaaagagtgtggcccagaggcgcacagtcacagtaccacccacaaaaatatccagagggccacggggggggggcacccctcttaagaggcgcaggccccaccccggtgttatgtgtggcgctgtgttgtgtgtgtgcgccttgtgtgtggggtcaaagccgcccgtcgccacctcggcgttcttagaggggcgcccaccacaggggggggaggggtggcgcctgggggctcctcacagggttgcggcccccgtgctttatatacgcctgcgaagagagtgtgtctctctggggggccgcgcgcggacacactctccctctcacaggggggaaggtccagaggagatctctctttactccaaacatcacatatcaaacagataaggggcgctctgtttctccccaaaattagggtgggggcgcttcttctcattatcagatagagaaaagctgctatataaaagaagagatattgtgcggcgaccaaaataatgggggggaggacataaagacagcccagaagaaaaacaccgtgtttgttgcgccaaaaacaaactcgttgggaaagacaacaatctttacagaaaagatgccg

SEQ ID NO: 532172 - DNA, 142 bp, Homo sapiens
gggcctcccggccaaatcccccggcctgggggttttttaaggggcccccccccccagggggggccaaatttttcggttttccccggggatttttaaaaaattttttgttttgataatgaaaaaaaacccccccccgggggca

SEQ ID NO: 532173 - DNA, 894 bp, Homo sapiens
cgcgttatgtggttgggctccctgttcgcgggcccctgttttaataatctttggggggccaacacctgtggagagtttatttccgtgcccgcacccggtgctgtgttatgtgccgctctctttttcccacgccgtcagtttttcttacccgtccaaatagctggcgtcatccggttgtaaaaacgcacccgtgggttgggttaacaaattgcgttgaagcccctctcctgccgccgttcaagccgtccgccacacgcaaccccaggcaaggagtaacgcaaaaaccacgctcctgttaatcgtagtgaaatgggctcgcagggcccccgtggttcctccccacgccgagggggagccattacgtctggctggtctccccaacgtggtattccccacttgttctaatcatttctccccggcgaggaattaacccttgcttcccactgtatccaagaataattgtataacaccccacaccacgtaccctcccccttttggtaccaacacacgcatcaacacacgccccctctgtgcactacgcaacaccaacaccccggtggctttctaatcccgcaacaatgtaccaacccacccccgtcgttgtatggccgcaccaatttgccaaaaagtgttttctcccatcgtgcttatttcaagacgcgtcttttcacacatgtgcccacggcgtaaacccctcgtctttccacagagcgagtaaattcttccgagtccccctacacaataatttattactcatctggacgcccttggagcttatttacagggcagacgccaccctttgggagcttaatctgggggagtaccccgtctaagcccgggaggttattccccgcccgcgggcacccaaaggggacccccctttccccacaaaac

SEQ ID NO: 532174 - DNA, 957 bp, Homo sapiens
tgaatacgtgccactgggctcctaaattctgcccgagcatgtataattgccactagattaagcacatggtttgtgaatgaagtagacaggaagacgatggagagtgtgatgccctaagacagactgcacggttctaactggagtccctggatttatccagtaggtacatgtgcatagaatggacgtagtatagatgctaagactatgttgaaggaacaagaaaatgacttgaggaatgaactaagagctgactcggataaaataggtcacaagttctgaagagagagtggaacgaggagggggttccagtcaatggtccgtaatcgctacaatggtgagcgcatggatgggatttgatctcctggtcagctactgggaaagaaaattactttggcaaatttggctgtacaattatattaaagatggcactatcaatgtcgggggggtttaggcttaatctagcagaataagtcttaaaacctatgtgtgtaaatggttgtgccctttggtgtctagttatctttgaagatagaatgtaaaaacaagtcatgagataagtggattttgatcccaataaaagcatgggtataaggcgatatgtgggatgaacagtctggggcaatggtggcttaatgtgggtataaaatgtacttattgcggatactattttcatattgagggtgggagaacactgttgggggactatggctttgatgggaggtgttgtcctatttgactgaaggttgtaccgagagtggagcttagcttggcttggatcattaagaagcccgaactcggttataggagattggtaggcgacagtggagaggggaaaagtagtttggagagtttaagaaggtctcaaagacgtattcaggaaacggagttaatacgagaaacaagagagagcgtgaaaaagagacaaaagaccctacgaaaaaggggaacaattgtagg

SEQ ID NO: 532175 - DNA, 426 bp, Homo sapiens
cggatagtagaatgcatgtttacaataattaggagacagagtgtctggccacttctcttcgtgtgaacagtcctcaagtgtctccccaaccgccgccttcagacgctgcgataggtcgtggcccatgaagtgaaatgtggaatagagtagcaagaagttttccggagagaactagtgagtttaattcggggcatgtgacattggacgaggctacagactgggaagcacctcagacgggtctgtgcatgcctgaggcttaagagtaaacatttgtcgagattacggaaaccatccgaaaagagctgacctaaagctataagagacaggcccagtggctcccgcctgtggtctcagctactagctactcgggaggctgagacaggaggatctcttgagcccaaatttgagtctacagtgagctatgat

SEQ ID NO: 532176 - DNA, 255 bp, Homo sapiens
  misc_feature (84)..(84): n is a, c, g, or t
acttagtaggatccccccaacaccagtcgtagagtcacgttccgcacgtatctagtctcatcgccctccatcctacgcatcttnacataacagacgaggtcaacgcatccctcccttcacatcaaatcaattggacacccaatggtactgaacctacgcagtacaccgactcacggcgagactaatcgtgcaactcctaacatactatccccccattattcctcagaaccgggcgacactcagggtaccgcagct

SEQ ID NO: 532177 - DNA, 214 bp, Homo sapiens
gtttttgttgggggcaggttcctcttcccccaggcccgggagcctcccccaagtttcttgaagccccgacctttcaggttagaccctgggccctggaggttaggggattttccccaccccagccccacccctgctccttccctaatgctttgaggtttttttggttggaagctgcagctggcccaagaaagaaaataaaaaaccacccttttga

SEQ ID NO: 532178 - DNA, 559 bp, Homo sapiens
atgtcttacgtagatggttgtgtgatcgcggtgcccaccgcaaaccgcgaacaattcatccggcacgccaaggccgcagccgtggtgttcaaggagcacggggcgctgaatattgtcgagtgttggggcgacgatgtgcccaagggcaggtgacctcgttccccatggcggtcaagctcaaggaagatgaaaccgtggtgttttcctggatcctgtggccatcacgcgaggtgcgtgatgccgggatgagcaaggtgatggaagacccgcgcctgaaggcggacgccaatccgatgccgtttgatgggcagcggatgatctatggcggatttgagctgatcctgaacacctgaggccaggtgttcacggacggccgctgtagtctgatcgcctgttgcagggtaggaccgacgacagaaccgatgcaggaccgctacgaaaactccgcaaaacaagggcatgacgcgatttgtctgacagaaccgtcgggtagacaacccggctgggtgggctaagttcaaggtcgacgcggccgcgaatttagtagtagtagtcgacc

SEQ ID NO: 532179 - DNA, 1015 bp, Homo sapiens
ggtccattgcttaccacctgtagcacccctctactcaatagtctcccccaagctttgtgtgctggtctcgcgggcttcatggatgatgaatgggccggaggggagttggtgtagtcactcaagagattctgtgcttccacgaggcttgccgccactcctctggtgctattccctgaggaagaggccagcaatggccgggatcgtggctcctgctgcttcagttcctgcggcatcctgggcgtatccaagatgtggtacctagaacgtcttatccactgcaagttcagagatcccctggttctctgatgacaggtgtcagatgcctcctgggtctcagaactgctgtggtcacttctgttcgtccctttcgcgggggtatcaagtaaggtggcttcgtcctgttcatcgcgcaactaggggaagcgaatgaggagtcagcactccgtgtacatacagttggtggccaagggatattgggccagaacagggataacgggtcacttccgggtgaacgaagtagagcgacggtgaaggcgagaaagaatatcccggtattgcggccccaggcatgacgagtcttctgtttgacctcgactcaccctgtgtacctttgtcctgatgtggcaactgggaagatctgagctcggcaggagtcacggacgtttaggcccatgtgcatttggagtgtcactcccgagagacctgccgatgacctgggtgagcagactgagtatcactgatctgattgaggggccgagctttcatgctgagaccgtacaagggaatcagtgcgtacgacaggctatgctcaagttcagtctggccgtgaccctaagaaaaggctagattggaggttctgggccgggaagctggagcgagaagctttgatccagaagggttcgagacacagagggtggtagaagtgcagcgcggatggggcccacaggtggggaggaagccccctgctgcaacagtggcaagggcagggaaggtacaagaggatggagtctaaacg

SEQ ID NO: 532180 - DNA, 775 bp, Homo sapiens
aatgtgaataaacagcctttgttgcttacacaacagcctgtataggtggtcttctatacggacacgcgtgacacccaggagttcgagacgagtctgggcagcatatactgaggggaaaaaaaagccttctttccttgggaaagtgcacggaaggccacgttcaaaggctggtcctgtgatgtctcctggatgccctgccaatggatggctgcgattggcgtgctgcatgaggagcgctgctgtcaccagcttggaggagcctagggaactgtgtgtgctgctgtgctgcgagggcgacagcgaggtgacccaatggctgggggtttctctagctatggatcaggcagtgctctgggggacttgggatcgctccaatccgtggtgcgagacttccagaagaacgctctcatgggacgtggctgctgctgcttattgtgggcatgcggcctactcgactagacgatatcttgggaagccgggagcgtaagtcggaatgactcatgtctcacactgcactccttgaatggaatatcaggggggaagactcaggtactgggccgtcacgtttggcatgagcaatgtatgtcccggggactcgtgtggaccttcgcaggacgtggcagtgaggtttcaacagacgaggagtggaccctgcttggacccagctcagagggaatctctacagagaacgtgatgctggaaaattctaggaaacttggcattcatagattgggcaacttcatgtaaacaaagaggcaccctaggcggaatacta

SEQ ID NO: 532181 - DNA, 1137 bp, Homo sapiens
  misc_feature (430)..(430): n is a, c, g, or t
  misc_feature (525)..(525): n is a, c, g, or t
  misc_feature (552)..(552): n is a, c, g, or t
  misc_feature (582)..(582): n is a, c, g, or t
ttatagccgcatatgtccaatggcggagatggacccatgtgtgccttaatatattcttgcaaattggcaatgttgaattgagcgcctctctcgattgtgatgtgctcgtgctggaacatagctgggttagcagggaagaccccctagttgttagatttgtagtattcaggagtgtactggccgtcgctgttgacagccgatacaatgtctgtttgcctcaagctaaatgagtcttagcgtctaagtgagtagcacccctttactaacttagctagtagtataaaatcattttatttagttaattaccagagagatttagcataattttgttctggattcagtaaatcaagtcagcttggatcattcaccttaacttttcctttagcagccatttccactagtttccattaagtagtgttctataaacttngatccaaagcagaatcaatgtcttttccatctcgtgacttaaagttctgtgactgtgatgcatgtgagtgttccgacttcatctgttcctcttanctacggtgtttcccttaccatggcatncataggatgaaatgaatgactgcccagaangagaatttgtccagattattcagataacatcataaagcgaatactattataaataagtagaatatgaataaatagaataatacaattccaaaatagtcaatgggaaagtgactagtaatataggcttgcaagagttggtaccttttagctatatttgcagattctctgggattttaaggaagtgagaaaacagcagagttgactaaatttgatatttcttgtcctctaaatatttgataagtttcgtgggattgatgcagtgatgttgtagtgcgcttccgtatttataaatgaaagcacgcgttatgttttagtgtttctaaacctaaaagtgtactgggtttgaaatcaacgtggttggaacactgttgtgactgttatttgaagcatgtcgtcgattgaagaatttcattgaggaagttttcaactcagtgtgatcagtttgattctgttgtgagcacagcacctaatatttgaggagctctgtttgaggacccgtgcttacgggggctttgttcgtaaacaatatcgcatagattgtgacttgaggtccgg

SEQ ID NO: 532182 - DNA, 965 bp, Homo sapiens
gctcctattaagtggtggacgtggcatgtccaagtgcatttctgaaaattctgctaaggggtcattcagtttagaatacatttagttggatttaatgggatgtgtgcctgaagtcactgtcacttcttgtacagtgtgcagtttaagctatgctggcaggggaaacgcacatatcctaccttgagtattttatttgatgccaaaatgcttctttaaattttattctattttattttatttagagacaaggtctctaaaacaatatgtttcctgggctggggtgcactggctattcacagacatgatcataggctcactgcagctcttgaactcctgggttcaagctatcctcccaaggagctgagactacagacacgcaccaccatgcccgattcaaagtgcctctcatatccacagggaagaaatgctgagttatccataaacttcaaagcctgagcatggctgtgggaggcagctaatagacaactctgcaaagaatgggaatcatttgaaaagaagcgtggagctttcacaaaagagaagagagctagagcaataaacaatttctatctacacaaagaggagcagacacgttcctgtctggaccctttatttggactccggtgggtctgaattgaactgctttagtgggagctacagaaggctgggacctggggatcacaatggatgctgtaccgtgagatgaagttggggggcgtgtcatcacaaggatgcgggtgagacgcagaataatgctggaaagccgtgcatgaaacaggggggtggtccgcgagtgaggctgcgagcaggcaatatcatggtcaaaacttatcattcgggtagggcgggaacccagggacggtattttaccgcaggggcacgtacaatgtgttaatcggtggacacgggggtaaacgtgaaggactacacagtgtcctcttcttagatgtgactcaagtcgtccg

SEQ ID NO: 532183 - DNA, 888 bp, Homo sapiens
gtagggccccttccagaaaaacttttcaagggtcttccaggggacccgttgagaaaaatacctcgcgtttgctccccctggaattccccccggggcccccccgttaggttaaacccaatatcgtgcgcagaaagagttgacaacaccattgtcgcatcgctgcgtggcgcccactctccttgttgtgaaatacatttctcagaatagcgccgtgatagagcgccatctttttatgtggtcgcatctcgtctcatgctcgctggcagtcttgagcgcatctcccttctcacacacgatggggacacacaaggggcccctgttagcttggcaccacacatggggggtaataaatttcatctaccacagtgtttgtcccccgtttctcacccattccgcccgctaaaagtgcgtcattccgttcacagctgggtgagactcgtatatccccacgccacgcacatatgcgcccagtataagttccggtgtcacgattttatgtcgcttgggggacatagaaatgggtggaggcgctcgtccaacagtccgccagcgtaccattgggaggggtaaacccacgttacaaggggctgcacacggagagctacagagaggtggacacctgcacattcacgcctcgggtggaacaagagatgagaatacctcggcacccaaaaaaaaaaaaagtagccacggcatggtggcgggagcctgtgtgtcccacgctgttcacgtaggctgaggcacgagagttcaacttgaaacctgggaggtggaggttgctgtgagctgacaccacgccactgcactccagcctgggtgacagtgagactctgtctcaataaataaaaaataataataaattgctcagatttctttggttccttttta

SEQ ID NO: 532184 - DNA, 106 bp, Homo sapiens
  misc_feature (23)..(23): n is a, c, g, or t
  misc_feature (100)..(100): n is a, c, g, or t
ttttatattccgtgaatgtatantgtcttgtaatgttgcataatgttcacctttttatagtgtgtcctttattctaaacagtaaagtggttttatccttntcacac

SEQ ID NO: 532185 - DNA, 738 bp, Homo sapiens
cccgccgtactttcctccagcttgttcctggatcggcttttgaccggtagacatattaaaaaggaagccattctcaacctgaatgcgttcaaccttgaacgtcaacgaaagcaatgaaacttaatatctattatggccggactgtgcaggcatgtgcactgagtgcatggcgtggcaggatgcatacaaggaggcccctctggaggctattatcaagcgagccaggtctatctgtcagcgctccgaaggacagtatgttgaccggagttcttgtggggggctctagtctcagtcgcttttgacagcaagctatacctattagggtccaattgccgccagcctagctacagagcatgtagtagagtggctgtcagcgaacttcttctcctacaatcatgatgatgtgtgacaattagatctgatcttctggaaagacgacccatgttaaatattaagttcaagggggagcaaattagtcagttcttgtaacattacaatgtatagcaagcaagtggtcagatttcacacagcaggttccttggaacactttcagctcccgatgctcctaaatatccaaccaataaaacaataggctttgaaacaatatgggctcctcatccaaaggacaactgctgcattgaaactcgtctttagctgagtgtagaaaagtgcatcttatgaaacagtgttagcagtggtaggttggggaggagatagctgcaccccgtctcgaaataa

SEQ ID NO: 532186 - DNA, 5228 bp, Homo sapiens
ggatccggattcggattagcagcccgggaagagtgccgtggcacaggcgccggagggagcgcgaccctcggaccccgcctggcccgcggggctgggacccggccccggcctgcccgatggggcgcgcggccccggagatgcgccctcgcccggccccgcgcccccggccccgcgcccccggcccgcccgccccggcccgcgcctccgcctgagtcccccgcgccttggcccgccaccccccgccccgcgcccccggcccgcctgcgccatggagcccggccgcggcggcacagagaccgtgggcaagttcgagttctcccgcaaggacctgatcggccacggcgccttcgcggtggtcttcaagggccgccaccgcgagaagcacgatttggaggtcgccgtcaagtgcattaacaagaagaacctcgccaagtctcagacgctgctggggaaggaaatcaaaatcctgaaggaactgaaacatgaaaacatcgtggccctgtacgacttccaggaaatggctaattctgtctacctggttatggagtactgcaacggtggggacctggccgactacctgcacgccatgcgcacgctgagcgaggacaccatcaggctcttcctgcagcagatcgcgggcgccatgcggcttctgcacagcaaaggcatcatccaccgcgacctgaaaccgcagaacatcctgctgtccaaccccgccggccgccgcgccaaccccaacagcatccgcgtcaagatcgctgacttcggcttcgcgcggtacctccagagcaacatgatggcggccacactctgcggctcccccatgtacatggcccccgaggtcatcatgtcccagcactacgacgggaaggcggacctgtggagcatcggcaccatcgtctaccagtgcctgacggggaaggcgcccttccaggccagcagcccccaggacctgcgcctgttctacgagaagaacaagacgttggtccccaccatcccccgggagacctcggccccgctgcggcagctgctcctggccctactgcaacgcaaccacaaggaccgcatggacttcgatgagttttttcatcaccctttcctcgatgccagcccctcggtcaggaaatccccacccgtgcctgtgccctcgtacccaagctcggggtccggcagcagctccagcagcagctccacctcccacctggcctccccgccgtccctgggcgagatgcagcagctgcagaagaccctggcctccccggctgacaccgctggcttcctgcacagctcccgggactctggtggcagcaaggactcttcctgtgacacagatgacttcgtcatggtccccgcgcagtttccaggtgacctggtggctgaggcgcccagtgccaaacccccgccagacagcctgatgtgcagtgggagctcactggtggcctctgcgggcttggagagccacggccggaccccatctccatccccaccctgcagcagctcccccagtccctcaggccgggctggcccgttctccagcagcaggtgcggcgcctctgtccccatcccagtccccacgcaggtgcagaactaccagcgcattgagcgaaacctgcagtcacccacccagttccaaacacctcggtcctctgccatccgcaggtcaggcagcaccagccccctgggctttgcaagggccagcccctcgccccctgcccacgctgagcatggaggcgtcctggccaggaagatgtctctgggtggaggccggccctacacgccatctcctcaagttggaaccatccctgagcggccaggctggagcgggacgccctccccacagggagctgagatgcggggtggcaggtcccctcgtccaggctcctctgcacccgagcactctccccgcacttccgggctgggctgccgcctgcacagcgcccccaacctgtctgacttgcacgtcgtccgccccaagctgcccaaaccccccacggaccccctgggagctgtgttcagcccaccacaggccagccctccccagccgtcccacggcctgcagtcctgccggaacctgcggggctcacccaagctgcccgacttcctgcagcgaaaccccctgccccccatcctgggctcccccaccaaggctgtgccctcctttgacttcccgaagacccccagctcccagaacctgctggccctcctagcccggcagggcgtggtgatgacgccccctcgaaaccggacgctgcccgacctctcggaggtgggacccttccatggtcagccgttgggccctggcctgcggccaggcgaggaccccaagggcccctttggccggtctttcagcaccagccgcctcactgacctgctccttaaggcggcgtttgggacacaagccccggacccgggcagcacggagagcctgcaggagaagcccatggagatcgcaccctcagctggctttggagggagcctgcacccaggagcccgtgctgggggcaccagcagcccctccccggtggtcttcaccgtgggctctcccccgagcgggagcacgcccccccagggcccccgcaccaggatgttctcagcgggccccactggctctgccagctcttctgcccgccacctggtgcctgggccctgcagcgaggccccagcccctgagctccctgctccaggacacggctgcagctttgccgaccccattgctgcgaacctggagggggctgtgaccttcgaggcccccgacctccctgaggagaccctcatggagcaagagcacacggagatcctgcgtggcctgcgcttcacgctgctgttcgtgcagcacgtcctggagatcgcagccctgaagggcagcgccagtgaggcggcggggggccctgagtaccagctgcaggagagtgtggtggccgaccagatcagcctgctgagccgagaatggggcttcgcggaacagctggtgctgtacctgaaggtggccgagctactgtcctccggcctgcaaagtgccatcgaccagatccgggccggcaagctctgcctgtcgtccactgtgaagcaggtggtgcgcaggctgaatgagctgtacaaggccagcgtggtgtcctgccagggcctgagcctgcggctgcagcgcttcttcctggacaagcagcggctcctggaccgcattcacagcatcactgccgagaggctcatcttcagccacgctgtgcagatggtgcagtcggctgccctggacgagatgttccagcaccgtgagggctgcgtcccacgctaccacaaggccctgctgctcctggaggggctgcagcacatgctctcggaccaggccgacatcgagaacgtcaccaagtgcaagctgtgcattgagcggagactctcggcgctgctgactggcatctgtgcctgacctttctggcctggctgggccccccgtcctgccgagccctgcagagtgggctctgtgtgctggctggactcctcgggacaagcccatggcgctgatcgctggtgctgagccctgccctgggccccacggacagtcagcctgccggcctccctgcagctcacggggcagaaccagcacatctggagccacacagcttggggggtgtctcccatcttttacaggtggggatcacagaatttctgcccctccagctgcctggctcagcaggcgtgggtgccaccaccctctagccccagggcagccccggaggacaggcaagggcctgagaccactgccgactcaaagccaaagcgagctcctgcttagggcaggtcagcaggcactgtgcccaggaagagcctgcggcctcggcgtcccccagtctccaggagcctctccctccgagatacccacccagctttgtcaatcacccaagcactttatgcatatagagacagaacctggacctcaccagggactgctgggcagcgattcctggcagtggcctggtgtttgtacatacacatatgcagacacatgccagggccccccaagcccgagcaccggaccacgttgctgcccaggtctggacctcagcgggagaactggctccggggggagtggggccctgcgctagaggcagaggcagttctttgttcaagcgttcctctggggaccggcagcagaggcaccgtgttctctcagccctggatacgtcttgtaatctttcacactttattcctaaaacgtgtcttatttttatgcagctcattttttctttaaaggagaaaacttgtaggtgtttaagaattggttttgggagggcgaggactgggccaggttagaggcagatggcacaggggcgtgtggcgggcgggtgaggctgctttgcacacctgtgttggtggctgtcccctgccgcccctccctgtggcagcagcaggacaggtgtgtgcccagcaccctccctacctgggcctggaagcagatgaggggaatacttcatgcaaagaaaaaagtaacatgtgcaaaagctccccgtccagctttgacagtcagttttgatgtcagctcctcggcagggtaggcctgatgacagccctgtccctccctgcctctgccttgcccaaggccacggagggcgtctgcagagaggcctgccttccggattccaggcgggcatgccctgcaaaccccgcctgggcctcccttggtctgcccagccctcggttagccctgcctgaatcagtagatacttgaacgagtccccagtctgcgggaggcagtggtggggccatggacccatgcggggggttccagggtcacacgccacataacagacaaaaatacacacacgtgtgtttttctttgcaatacttgaaatattgccactgtgcttggacttagaagaagaaaatccccgtgacttcttcctcatcaccttgatggctttattctcaccttgtggggcatgtttgtatttattgcttcatggccgactggaatcctgagtcctgggaagctggcactgcggggatcttgcccggtgtcctggtcctcttgcttccgtcgcggccgcatgtgcgtgtgtccaagcaggtcctgggcgcctcaactgctgcccctggttgaatgttctcttgatagtgctggaccctttgtctattttaaagcgaattttgtgtgatttcctgccctttgcgttatattgtataataccaacgtaaggaaataaacctttggaattgttgggctggtgtccccccta

SEQ ID NO: 532187 - DNA, 170 bp, Homo sapiens
tggggctttcgaacgtgcgttatggcaggggttttatattgataattgttgtgatgaagttgatggcccctaagatagaggagagacctgctaggtgtaaggagaagatggttaggtctacaaagtgagttccaggcaactcgaaagccccaagcggggtaccgagctcg

SEQ ID NO: 532188 - DNA, 1557 bp, Homo sapiens
ggatccggattcggattagcagcccgggaagagtgccgtggcacaggcgccggagggagcgcgaccctcggaccccgcctggcccgcggggctgggacccggccccggcctgcccgatggggcgcgcggccccggagatgcgccctcgcccggccccgcgcccccggccccgcgcccccggcccgcccgccccggcccgcgcctccgcctgagtcccccgcgccttggcccgccaccccccgccccgcgcccccggcccgcctgcgccatggagcccggccgcggcggcacagagaccgtgggcaagttcgagttctcccgcaaggacctgatcggccacggcgccttcgcggtggtcttcaagggccgccaccgcgagaagcacgatttggaggtcgccgtcaagtgcattaacaagaagaacctcgccaagtctcagacgctgctggggaaggaaatcaaaatcctgaaggaactgaaacatgaaaacatcgtggccctgtacgacttccaggaaatggctaattctgtctacctggttatggagtactgcaacggtggggacctggccgactacctgcacgccatgcgcacgctgagcgaggacaccatcaggctcttcctgcagcagatcgcgggcgccatgcggcttctgcacagcaaaggcatcatccaccgcgacctgaaaccgcagaacatcctgctgtccaaccccgccggccgccgcgccaaccccaacagcatccgcgtcaagatcgctgacttcggcttcgcgcggtacctccagagcaacatgatggcggccacactctgcggctcccccatgtacatggcccccgaggtcatcatgtcccagcactacgacgggaaggcggacctgtggagcatcggcaccatcgtctaccagtgcctgacggggaaggcgcccttccaggccagcagcccccaggacctgcgcctgttctacgagaagaacaagacgttggtccccaccatcccccgggagacctcggccccgctgcggcagctgctcctggccctactgcaacgcaaccacaaggaccgcatggacttcgatgagttttttcatcaccctttcctcgatgccagcccctcggtcaggaaatccccacccgtgcctgtgccctcgtacccaagctcggggtccggcagcagctccagcagcagctccacctcccacctggcctccccgccgtccctgggcgagatgcagcagctgcagaagaccctggcctccccggctgacaccgctggcttcctgcacagctcccgggactctggtggcagcaaggactcttcctgtgacacagatgacttcgtcatggtccccgcgcagtttccaggtgacctggtggctgaggcgcccagtgccaaacccccgccagacagcctgatgtgcagtgggtgagcccccatcccttacctctgtattttaggggagagaaactgtggccttggaagtggcccgtgttatttacaatgagccgagatcgcgccactgcactccagcctgggtgacagagcgagactctgtct

SEQ ID NO: 532189 - DNA, 431 bp, Homo sapiens
  misc_feature (37)..(38): n is a, c, g, or t
gcaatctccgcctcatgcagtttcgaaactgacatanngcaggatttttgtctctccttctatagctgaaccccacagtccttaacagggcctggcatgtgtcagtgaacaaacgagcctcagtttccttacctgcaaaagaggatgaatacattgtaaaggagatgattcgtgttgaggatgagcctccgtgcctggctggttgtgagtgggcgggtggtgttagctgccgccgcgtgtataaagcctgccacgtagatcccagtctaggctctttggcaagctgagctcatgggggtggactaacctgtctgctggactcgggcagtcgggggttggcccggatgagctcctcctgctcctccagtcagtttgtatctgcagggctcagcctctggcccccttccagcttcctggtccgacagcgcctt

SEQ ID NO: 532190 - DNA, 256 bp, Homo sapiens
ctgatcgtggtatcttggcaccccagcgtctagcacagatctaggcataaggagggcattcacatacattggtgatgtgaagttaatgtggattgagatgtagtacaggaccaagttatgagaaacaagagaaccatgaactttagctgttccttgggcactcgactccggtcatgtgttgtacggaccagtgattcgacatgtaccttccttccccagaggtacacagtacaatatctctgataaaaagtggtgc

SEQ ID NO: 532191 - DNA, 4309 bp, Homo sapiens
aagacgttggtccccaccatcccccgggagaccaacgtcttgttcttctcgtagaacaagacgttggtccccaccatcccccgggagacctcggccccgctgcggcagctgctcctggccctactgcaacgcaaccacaaggaccgcatggacttcgatgagttttttcatcaccctttcctcgatgccagcccctcggtcaggaaatccccacccgtgcctgtgccctcgtacccaagctcggggtccggcagcagctccagcagcagctccacctcccacctggcctccccgccgtccctgggcgagatgcagcagctgcagaagaccctggcctccccggctgacaccgctggcttcctgcacagctcccgggactctggtggcagcaaggactcttcctgtgacacagatgacttcgtcatggtccccgcgcagtttccaggtgacctggtggctgaggcgcccagtgccaaacccccgccagacagcctgatgtgcagtgggagctcactggtggcctctgcgggcttggagagccacggccggaccccatctccatccccaccctgcagcagctcccccagtccctcaggccgggctggcccgttctccagcagcaggtgcggcgcctctgtccccatcccagtccccacgcaggtgcagaactaccagcgcattgagcgaaacctgcagtcacccacccagttccaaacacctcggtcctctgccatccgcaggtcaggcagcaccagccccctgggctttgcaagggccagcccctcgccccctgcccacgctgagcatggaggcgtcctggccaggaagatgtctctgggtggaggccggccctacacgccatctcctcaagttggaaccatccctgagcggccaggctggagcgggacgccctccccacagggagctgagatgcggggtggcaggtcccctcgtccaggctcctctgcacccgagcactctccccgcacttccgggctgggctgccgcctgcacagcgcccccaacctgtctgacttgcacgtcgtccgccccaagctgcccaaaccccccacggaccccctgggagctgtgttcagcccaccacaggccagccctccccagccgtcccacggcctgcagtcctgccggaacctgcggggctcacccaagctgcccgacttcctgcagcgaaaccccctgccccccatcctgggctcccccaccaaggctgtgccctcctttgacttcccgaagacccccagctcccagaacctgctggccctcctagcccggcagggcgtggtgatgacgccccctcgaaaccggacgctgcccgacctctcggaggtgggacccttccatggtcagccgttgggccctggcctgcggccaggcgaggaccccaagggcccctttggccggtctttcagcaccagccgcctcactgacctgctccttaaggcggcgtttgggacacaagccccggacccgggcagcacggagagcctgcaggagaagcccatggagatcgcaccctcagctggctttggagggagcctgcacccaggagcccgtgctgggggcaccagcagcccctccccggtggtcttcaccgtgggctctcccccgagcgggagcacgcccccccagggcccccgcaccaggatgttctcagcgggccccactggctctgccagctcttctgcccgccacctggtgcctgggccctgcagcgaggccccagcccctgagctccctgctccaggacacggctgcagctttgccgaccccattgctgcgaacctggagggggctgtgaccttcgaggcccccgacctccctgaggagaccctcatggagcaagagcacacggagatcctgcgtggcctgcgcttcacgctgctgttcgtgcagcacgtcctggagatcgcagccctgaagggcagcgccagtgaggcggcggggggccctgagtaccagctgcaggagagtgtggtggccgaccagatcagcctgctgagccgagaatggggcttcgcggaacagctggtgctgtacctgaaggtggccgagctactgtcctccggcctgcaaagtgccatcgaccagatccgggccggcaagctctgcctgtcgtccactgtgaagcaggtggtgcgcaggctgaatgagctgtacaaggccagcgtggtgtcctgccagggcctgagcctgcggctgcagcgcttcttcctggacaagcagcggctcctggaccgcattcacagcatcactgccgagaggctcatcttcagccacgctgtgcagatggtgcagtcggctgccctggacgagatgttccagcaccgtgagggctgcgtcccacgctaccacaaggccctgctgctcctggaggggctgcagcacatgctctcggaccaggccgacatcgagaacgtcaccaagtgcaagctgtgcattgagcggagactctcggcgctgctgactggcatctgtgcctgacctttctggcctggctgggccccccgtcctgccgagccctgcagagtgggctctgtgtgctggctggactcctcgggacaagcccatggcgctgatcgctggtgctgagccctgccctgggccccacggacagtcagcctgccggcctccctgcagctcacggggcagaaccagcacatctggagccacacagcttggggggtgtctcccatcttttacaggtggggatcacagaatttctgcccctccagctgcctggctcagcaggcgtgggtgccaccaccctctagccccagggcagccccggaggacaggcaagggcctgagaccactgccgactcaaagccaaagcgagctcctgcttagggcaggtcagcaggcactgtgcccaggaagagcctgcggcctcggcgtcccccagtctccaggagcctctccctccgagatacccacccagctttgtcaatcacccaagcactttatgcatatagagacagaacctggacctcaccagggactgctgggcagcgattcctggcagtggcctggtgtttgtacatacacatatgcagacacatgccagggccccccaagcccgagcaccggaccacgttgctgcccaggtctggacctcagcgggagaactggctccggggggagtggggccctgcgctagaggcagaggcagttctttgttcaagcgttcctctggggaccggcagcagaggcaccgtgttctctcagccctggatacgtcttgtaatctttcacactttattcctaaaacgtgtcttatttttatgcagctcattttttctttaaaggagaaaacttgtaggtgtttaagaattggttttgggagggcgaggactgggccaggttagaggcagatggcacaggggcgtgtggcgggcgggtgaggctgctttgcacacctgtgttggtggctgtcccctgccgcccctccctgtggcagcagcaggacaggtgtgtgcccagcaccctccctacctgggcctggaagcagatgaggggaatacttcatgcaaagaaaaaagtaacatgtgcaaaagctccccgtccagctttgacagtcagttttgatgtcagctcctcggcagggtaggcctgatgacagccctgtccctccctgcctctgccttgcccaaggccacggagggcgtctgcagagaggcctgccttccggattccaggcgggcatgccctgcaaaccccgcctgggcctcccttggtctgcccagccctcggttagccctgcctgaatcagtagatacttgaacgagtccccagtctgcgggaggcagtggtggggccatggacccatgcggggggttccagggtcacacgccacataacagacaaaaatacacacacgtgtgtttttctttgcaatacttgaaatattgccactgtgcttggacttagaagaagaaaatccccgtgacttcttcctcatcaccttgatggctttattctcaccttgtggggcatgtttgtatttattgcttcatggccgactggaatcctgagtcctgggaagctggcactgcggggatcttgcccggtgtcctggtcctcttgcttccgtcgcggccgcatgtgcgtgtgtccaagcaggtcctgggcgcctcaactgctgcccctggttgaatgttctcttgatagtgctggaccctttgtctattttaaagcgaattttgtgtgatttcctgccctttgcgttatattgtataataccaacgtaaggaaataaacctttggaattgttgggctggtgtccccccta

SEQ ID NO: 532192 - DNA, 2938 bp, Homo sapiens
gctgtacggtccatcgtaatctgctgcggcagcgagaccatggccttggctgtcttcagcaccagccgcctcactgacctgctccttaaggcggcgtttgggacacaagccccggacccgggcagcacggagagcctgcaggagaagcccatggagatcgcaccctcagctggctttggagggagcctgcacccaggagcccgtgctgggggcaccagcagcccctccccggtggtcttcaccgtgggctctcccccgagcgggagcacgcccccccagggcccccgcaccaggatgttctcagcgggccccactggctctgccagctcttctgcccgccacctggtgcctgggccctgcagcgaggccccagcccctgagctccctgctccaggacacggctgcagctttgccgaccccattgctgcgaacctggagggggctgtgaccttcgaggcccccgacctccctgaggagaccctcatggagcaagagcacacggagatcctgcgtggcctgcgcttcacgctgctgttcgtgcagcacgtcctggagatcgcagccctgaagggcagcgccagtgaggcggcggggggccctgagtaccagctgcaggagagtgtggtggccgaccagatcagcctgctgagccgagaatggggcttcgcggaacagctggtgctgtacctgaaggtggccgagctactgtcctccggcctgcaaagtgccatcgaccagatccgggccggcaagctctgcctgtcgtccactgtgaagcaggtggtgcgcaggctgaatgagctgtacaaggccagcgtggtgtcctgccagggcctgagcctgcggctgcagcgcttcttcctggacaagcagcggctcctggaccgcattcacagcatcactgccgagaggctcatcttcagccacgctgtgcagatggtgcagtcggctgccctggacgagatgttccagcaccgtgagggctgcgtcccacgctaccacaaggccctgctgctcctggaggggctgcagcacatgctctcggaccaggccgacatcgagaacgtcaccaagtgcaagctgtgcattgagcggagactctcggcgctgctgactggcatctgtgcctgacctttctggcctggctgggccccccgtcctgccgagccctgcagagtgggctctgtgtgctggctggactcctcgggacaagcccatggcgctgatcgctggtgctgagccctgccctgggccccacggacagtcagcctgccggcctccctgcagctcacggggcagaaccagcacatctggagccacacagcttggggggtgtctcccatcttttacaggtggggatcacagaatttctgcccctccagctgcctggctcagcaggcgtgggtgccaccaccctctagccccagggcagccccggaggacaggcaagggcctgagaccactgccgactcaaagccaaagcgagctcctgcttagggcaggtcagcaggcactgtgcccaggaagagcctgcggcctcggcgtcccccagtctccaggagcctctccctccgagatacccacccagctttgtcaatcacccaagcactttatgcatatagagacagaacctggacctcaccagggactgctgggcagcgattcctggcagtggcctggtgtttgtacatacacatatgcagacacatgccagggccccccaagcccgagcaccggaccacgttgctgcccaggtctggacctcagcgggagaactggctccggggggagtggggccctgcgctagaggcagaggcagttctttgttcaagcgttcctctggggaccggcagcagaggcaccgtgttctctcagccctggatacgtcttgtaatctttcacactttattcctaaaacgtgtcttatttttatgcagctcattttttctttaaaggagaaaacttgtaggtgtttaagaattggttttgggagggcgaggactgggccaggttagaggcagatggcacaggggcgtgtggcgggcgggtgaggctgctttgcacacctgtgttggtggctgtcccctgccgcccctccctgtggcagcagcaggacaggtgtgtgcccagcaccctccctacctgggcctggaagcagatgaggggaatacttcatgcaaagaaaaaagtaacatgtgcaaaagctccccgtccagctttgacagtcagttttgatgtcagctcctcggcagggtaggcctgatgacagccctgtccctccctgcctctgccttgcccaaggccacggagggcgtctgcagagaggcctgccttccggattccaggcgggcatgccctgcaaaccccgcctgggcctcccttggtctgcccagccctcggttagccctgcctgaatcagtagatacttgaacgagtccccagtctgcgggaggcagtggtggggccatggacccatgcggggggttccagggtcacacgccacataacagacaaaaatacacacacgtgtgtttttctttgcaatacttgaaatattgccactgtgcttggacttagaagaagaaaatccccgtgacttcttcctcatcaccttgatggctttattctcaccttgtggggcatgtttgtatttattgcttcatggccgactggaatcctgagtcctgggaagctggcactgcggggatcttgcccggtgtcctggtcctcttgcttccgtcgcggccgcatgtgcgtgtgtccaagcaggtcctgggcgcctcaactgctgcccctggttgaatgttctcttgatagtgctggaccctttgtctattttaaagcgaattttgtgtgatttcctgccctttgcgttatattgtataataccaacgtaaggaaataaacctttggaattgttgggctggtgtccccccta

SEQ ID NO: 532193 - DNA, 184 bp, Homo sapiens
ataggctgggggttattgacgagtacttcggctggatcactagtgcttatggtctccaaggaaaaagctttttcctgtcttggacgggttttagaggtattcactggaacgtcttctctaatctcttctcctaattcttctgtgtcctgtgcagtagagttatcttcaccctgcttcttctttt

SEQ ID NO: 532194 - DNA, 2186 bp, Homo sapiens
  misc_feature (25)..(25): n is a, c, g, or t
gcaggctgtaccgcctccgaggtangggatatcgtcgacccacgccgctcggtacaaggccagcgtggtgtcctgccagggcctgagcctgcggctgcagcgcttcttcctggacaagcagcggctcctggaccgcattcacagcatcactgccgagaggctcatcttcagccacgctgtgcagatggtgcagtcggctgccctggacgagatgttccagcaccgtgagggctgcgtcccacgctaccacaaggccctgctgctcctggaggggctgcagcacatgctctcggaccaggccgacatcgagaacgtcaccaagtgcaagctgtgcattgagcggagactctcggcgctgctgactggcatctgtgcctgacctttctggcctggctgggccccccgtcctgccgagccctgcagagtgggctctgtgtgctggctggactcctcgggacaagcccatggcgctgatcgctggtgctgagccctgccctgggccccacggacagtcagcctgccggcctccctgcagctcacggggcagaaccagcacatctggagccacacagcttggggggtgtctcccatcttttacaggtggggatcacagaatttctgcccctccagctgcctggctcagcaggcgtgggtgccaccaccctctagccccagggcagccccggaggacaggcaagggcctgagaccactgccgactcaaagccaaagcgagctcctgcttagggcaggtcagcaggcactgtgcccaggaagagcctgcggcctcggcgtcccccagtctccaggagcctctccctccgagatacccacccagctttgtcaatcacccaagcactttatgcatatagagacagaacctggacctcaccagggactgctgggcagcgattcctggcagtggcctggtgtttgtacatacacatatgcagacacatgccagggccccccaagcccgagcaccggaccacgttgctgcccaggtctggacctcagcgggagaactggctccggggggagtggggccctgcgctagaggcagaggcagttctttgttcaagcgttcctctggggaccggcagcagaggcaccgtgttctctcagccctggatacgtcttgtaatctttcacactttattcctaaaacgtgtcttatttttatgcagctcattttttctttaaaggagaaaacttgtaggtgtttaagaattggttttgggagggcgaggactgggccaggttagaggcagatggcacaggggcgtgtggcgggcgggtgaggctgctttgcacacctgtgttggtggctgtcccctgccgcccctccctgtggcagcagcaggacaggtgtgtgcccagcaccctccctacctgggcctggaagcagatgaggggaatacttcatgcaaagaaaaaagtaacatgtgcaaaagctccccgtccagctttgacagtcagttttgatgtcagctcctcggcagggtaggcctgatgacagccctgtccctccctgcctctgccttgcccaaggccacggagggcgtctgcagagaggcctgccttccggattccaggcgggcatgccctgcaaaccccgcctgggcctcccttggtctgcccagccctcggttagccctgcctgaatcagtagatacttgaacgagtccccagtctgcgggaggcagtggtggggccatggacccatgcggggggttccagggtcacacgccacataacagacaaaaatacacacacgtgtgtttttctttgcaatacttgaaatattgccactgtgcttggacttagaagaagaaaatccccgtgacttcttcctcatcaccttgatggctttattctcaccttgtggggcatgtttgtatttattgcttcatggccgactggaatcctgagtcctgggaagctggcactgcggggatcttgcccggtgtcctggtcctcttgcttccgtcgcggccgcatgtgcgtgtgtccaagcaggtcctgggcgcctcaactgctgcccctggttgaatgttctcttgatagtgctggaccctttgtctattttaaagcgaattttgtgtgatttcctgccctttgcgttatattgtataataccaacgtaaggaaataaacctttggaattgttgggctggtgtccccccta

SEQ ID NO: 532195 - DNA, 727 bp, Homo sapiens
gggagcccaaacctggagaaggtcatctcgcatgcactcctgaggggcttggttctgggaaaactaggaaaagcaggacataaggcaacgttagaagaagcccgtcgtcggtttaaggaccacgtggaaggaaaacagattctctccgctgatctgaggagctcctgtctatctgactagttaggaagcatggtgatggcactactttagcatataatgtgtgagaaacttcataaacgaagcagatatgcaagaagagaacaaccggaatcgaaagagtccttggtcgctactctttggcctgacctgattcaataagtcctcacgtttgcgctttcagaagaggtacgtccagaggaccactgtatcgtgtaatagagtgagagtagctggaggcatgtaagcgatggtaggaaagctgcttggaaattcataaaggacgaactgggaagaattttataagcgataccaggaggattcttaatatgccagactaataaagctatctagttgagggatttgcagttgatagaaatcggtggagaggttaaggctttcttcgaggagtcagccagtctccttcagctgaagcgtaaccatccagagcaggtcgtgcaaacactattctgctgaatgctgactggcttaaagcgagatgctgagagcatacaacagtacctccttccgcggaaaggcttcaacaccacaagtgtggattcctgaggtg

SEQ ID NO: 532196 - DNA, 3836 bp, Homo sapiens
ggatccggattcggattagcagcccgggaagagtgccgtggcacaggcgccggagggagcgcgaccctcggaccccgcctggcccgcggggctgggacccggccccggcctgcccgatggggcgcgcggccccggagatgcgccctcgcccggccccgcgcccccggccccgcgcccccggcccgcccgccccggcccgcgcctccgcctgagtcccccgcgccttggcccgccaccccccgccccgcgcccccggcccgcctgcgccatggagcccggccgcggcggcacagagaccgtgggcaagttcgagttctcccgcaaggacctgatcggccacggcgccttcgcggtggtcttcaagggccgccaccgcgagaagcacgatttggaggtcgccgtcaagtgcattaacaagaagaacctcgccaagtctcagacgctgctggggaaggaaatcaaaatcctgaaggaactgaaacatgaaaacatcgtggccctgtacgacttccaggaaatggctaattctgtctacctggttatggagtactgcaacggtggggacctggccgactacctgcacgccatgcgcacgctgagcgaggacaccatcaggctcttcctgcagcagatcgcgggcgccatgcggcttctgcacagcaaaggcatcatccaccgcgacctgaaaccgcagaacatcctgctgtccaaccccgccggccgccgcgccaaccccaacagcatccgcgtcaagatcgctgacttcggcttcgcgcggtacctccagagcaacatgatggcggccacactctgcggctcccccatgtacatggcccccgaggtcatcatgtcccagcactacgacgggaaggcggacctgtggagcatcggcaccatcgtctaccagtgcctgacggggaaggcgcccttccaggccagcagcccccaggacctgcgcctgttctacgagaagaacaagacgttggtccccaccatcccccgggagacctcggccccgctgcggcagctgctcctggccctactgcaacgcaaccacaaggaccgcatggacttcgatgagttttttcatcaccctttcctcgatgccagcccctcggtcaggaaatccccacccgtgcctgtgccctcgtacccaagctcggggtccggcagcagctccagcagcagctccacctcccacctggcctccccgccgtccctgggcgagatgcagcagctgcagaagaccctggcctccccggctgacaccgctggcttcctgcacagctcccgggactctggtggcagcaaggactcttcctgtgacacagatgacttcgtcatggtccccgcgcagtttccaggtgacctggtggctgaggcgcccagtgccaaacccccgccagacagcctgatgtgcagtgggagctcactggtggcctctgcgggcttggagagccacggccggaccccatctccatccccaccctgcagcagctcccccagtccctcaggccgggctggcccgttctccagcagcaggtgcggcgcctctgtccccatcccagtccccacgcaggtgcagaactaccagcgcattgagcgaaacctgcagtcacccacccagttccaaacacctcggtcctctgccatccgcaggtcaggcagcaccagccccctgggctttgcaagggccagcccctcgccccctgcccacgctgagcatggaggcgtcctggccaggaagatgtctctgggtggaggccggccctacacgccatctcctcaagttggaaccatccctgagcggccaggctggagcgggacgccctccccacagggagctgagatgcggggtggcaggtcccctcgtccaggctcctctgcacccgagcactctccccgcacttccgggctgggctgccgcctgcacagcgcccccaacctgtccgacatcgagaacgtcaccaagtgcaagctgtgcattgagcggagactctcggcgctgctgactggcatctgtgcctgacctttctggcctggctgggccccccgtcctgccgagccctgcagagtgggctctgtgtgctggctggactcctcgggacaagcccatggcgctgatcgctggtgctgagccctgccctgggccccacggacagtcagcctgccggcctccctgcagctcacggggcagaaccagcacatctggagccacacagcttggggggtgtctcccatcttttacaggtggggatcacagaatttctgcccctccagctgcctggctcagcaggcgtgggtgccaccaccctctagccccagggcagccccggaggacaggcaagggcctgagaccactgccgactcaaagccaaagcgagctcctgcttagggcaggtcagcaggcactgtgcccaggaagagcctgcggcctcggcgtcccccagtctccaggagcctctccctccgagatacccacccagctttgtcaatcacccaagcactttatgcatatagagacagaacctggacctcaccagggactgctgggcagcgattcctggcagtggcctggtgtttgtacatacacatatgcagacacatgccagggccccccaagcccgagcaccggaccacgttgctgcccaggtctggacctcagcgggagaactggctccggggggagtggggccctgcgctagaggcagaggcagttctttgttcaagcgttcctctggggaccggcagcagaggcaccgtgttctctcagccctggatacgtcttgtaatctttcacactttattcctaaaacgtgtcttatttttatgcagctcattttttctttaaaggagaaaacttgtaggtgtttaagaattggttttgggagggcgaggactgggccaggttagaggcagatggcacaggggcgtgtggcgggcgggtgaggctgctttgcacacctgtgttggtggctgtcccctgccgcccctccctgtggcagcagcaggacaggtgtgtgcccagcaccctccctacctgggcctggaagcagatgaggggaatacttcatgcaaagaaaaaagtaacatgtgcaaaagctccccgtccagctttgacagtcagttttgatgtcagctcctcggcagggtaggcctgatgacagccctgtccctccctgcctctgccttgcccaaggccacggagggcgtctgcagagaggcctgccttccggattccaggcgggcatgccctgcaaaccccgcctgggcctcccttggtctgcccagccctcggttagccctgcctgaatcagtagatacttgaacgagtccccagtctgcgggaggcagtggtggggccatggacccatgcggggggttccagggtcacacgccacataacagacaaaaatacacacacgtgtgtttttctttgcaatacttgaaatattgccactgtgcttggacttagaagaagaaaatccccgtgacttcttcctcatcaccttgatggctttattctcaccttgtggggcatgtttgtatttattgcttcatggccgactggaatcctgagtcctgggaagctggcactgcggggatcttgcccggtgtcctggtcctcttgcttccgtcgcggccgcatgtgcgtgtgtccaagcaggtcctgggcgcctcaactgctgcccctggttgaatgttctcttgatagtgctggaccctttgtctattttaaagcgaattttgtgtgatttcctgccctttgcgttatattgtataataccaacgtaaggaaataaacctttggaattgttgggctggtgtccccccta

SEQ ID NO: 532197 - DNA, 1771 bp, Homo sapiens
ggtagtaaaaatccagtctgaacaaacatgggaaaagtcagcctccctcctgccccccttcccgcccaggcaggccaggcagcagcagtaatgacactgactgagcggcgggcactctgttgtcctggggctgggctgagagcgctgagccacacagcttggggggtgtctcccatcttttacaggtggggatcacagaatttctgcccctccagctgcctggctcagcaggcgtgggtgccaccaccctctagccccagggcagccccggaggacaggcaagggcctgagaccactgccgactcaaagccaaagcgagctcctgcttagggcaggtcagcaggcactgtgcccaggaagagcctgcggcctcggcgtcccccagtctccaggagcctctccctccgagatacccacccagctttgtcaatcacccaagcactttatgcatatagagacagaacctggacctcaccagggactgctgggcagcgattcctggcagtggcctggtgtttgtacatacacatatgcagacacatgccagggccccccaagcccgagcaccggaccacgttgctgcccaggtctggacctcagcgggagaactggctccggggggagtggggccctgcgctagaggcagaggcagttctttgttcaagcgttcctctggggaccggcagcagaggcaccgtgttctctcagccctggatacgtcttgtaatctttcacactttattcctaaaacgtgtcttatttttatgcagctcattttttctttaaaggagaaaacttgtaggtgtttaagaattggttttgggagggcgaggactgggccaggttagaggcagatggcacaggggcgtgtggcgggcgggtgaggctgctttgcacacctgtgttggtggctgtcccctgccgcccctccctgtggcagcagcaggacaggtgtgtgcccagcaccctccctacctgggcctggaagcagatgaggggaatacttcatgcaaagaaaaaagtaacatgtgcaaaagctccccgtccagctttgacagtcagttttgatgtcagctcctcggcagggtaggcctgatgacagccctgtccctccctgcctctgccttgcccaaggccacggagggcgtctgcagagaggcctgccttccggattccaggcgggcatgccctgcaaaccccgcctgggcctcccttggtctgcccagccctcggttagccctgcctgaatcagtagatacttgaacgagtccccagtctgcgggaggcagtggtggggccatggacccatgcggggggttccagggtcacacgccacataacagacaaaaatacacacacgtgtgtttttctttgcaatacttgaaatattgccactgtgcttggacttagaagaagaaaatccccgtgacttcttcctcatcaccttgatggctttattctcaccttgtggggcatgtttgtatttattgcttcatggccgactggaatcctgagtcctgggaagctggcactgcggggatcttgcccggtgtcctggtcctcttgcttccgtcgcggccgcatgtgcgtgtgtccaagcaggtcctgggcgcctcaactgctgcccctggttgaatgttctcttgatagtgctggaccctttgtctattttaaagcgaattttgtgtgatttcctgccctttgcgttatattgtataataccaacgtaaggaaataaacctttggaattgttgggctggtgtccccccta

SEQ ID NO: 532198 - DNA, 1826 bp, Homo sapiens
actgaagcctgtggagggagaggggagtgtgagggagacgcccagagtccccagcccccagcccagccgggcactcacacttggtgacgttctcgatgtcggcctggtccgagagcatgtgctgcagcccctccaggagcagcagggccttgtggtagcgtgggacgcagcccctcacggtgctggaacatctcgtccagggcagccgactgcaccatctgcacagcgtggctgaagatgagcctctcggcagtgatgctgtgaatgcggtccaggagccgctgcttgtccaggaagaagcgctgcagccgcaggctcagccccggaggacaggcaagggcctgagaccactgccgactcaaagccaaagcgagctcctgcttagggcaggtcagcaggcactgtgcccaggaagagcctgcggcctcggcgtcccccagtctccaggagcctctccctccgagatacccacccagctttgtcaatcacccaagcactttatgcatatagagacagaacctggacctcaccagggactgctgggcagcgattcctggcagtggcctggtgtttgtacatacacatatgcagacacatgccagggccccccaagcccgagcaccggaccacgttgctgcccaggtctggacctcagcgggagaactggctccggggggagtggggccctgcgctagaggcagaggcagttctttgttcaagcgttcctctggggaccggcagcagaggcaccgtgttctctcagccctggatacgtcttgtaatctttcacactttattcctaaaacgtgtcttatttttatgcagctcattttttctttaaaggagaaaacttgtaggtgtttaagaattggttttgggagggcgaggactgggccaggttagaggcagatggcacaggggcgtgtggcgggcgggtgaggctgctttgcacacctgtgttggtggctgtcccctgccgcccctccctgtggcagcagcaggacaggtgtgtgcccagcaccctccctacctgggcctggaagcagatgaggggaatacttcatgcaaagaaaaaagtaacatgtgcaaaagctccccgtccagctttgacagtcagttttgatgtcagctcctcggcagggtaggcctgatgacagccctgtccctccctgcctctgccttgcccaaggccacggagggcgtctgcagagaggcctgccttccggattccaggcgggcatgccctgcaaaccccgcctgggcctcccttggtctgcccagccctcggttagccctgcctgaatcagtagatacttgaacgagtccccagtctgcgggaggcagtggtggggccatggacccatgcggggggttccagggtcacacgccacataacagacaaaaatacacacacgtgtgtttttctttgcaatacttgaaatattgccactgtgcttggacttagaagaagaaaatccccgtgacttcttcctcatcaccttgatggctttattctcaccttgtggggcatgtttgtatttattgcttcatggccgactggaatcctgagtcctgggaagctggcactgcggggatcttgcccggtgtcctggtcctcttgcttccgtcgcggccgcatgtgcgtgtgtccaagcaggtcctgggcgcctcaactgctgcccctggttgaatgttctcttgatagtgctggaccctttgtctattttaaagcgaattttgtgtgatttcctgccctttgcgttatattgtataataccaacgtaaggaaataaacctttggaattgttgggctggtgtccccccta

SEQ ID NO: 532199 - DNA, 205 bp, Homo sapiens
atctggctccaccgatagtccagctccctcagtctggcacccgactgctacactctagcctctattagccacttcagaccatccaggtgtcttcccgggccctgctagaccctggtcacattccctctgctgatatgtgctggtctcagaaggccagagcgcccgctttccaatcagccaggatccagctgcgtttcacttccga

SEQ ID NO: 532200 - DNA, 920 bp, Homo sapiens
ctccctacctgggcctggaagcagatgaggggagggtgctgggcacacacctgtcctgctgctgccacagggaggggcggcaggggacagccaccaacacaggtgtgcccagcaccctccctacctgggcctggaagcagatgaggggaatacttcatgcaaagaaaaaagtaacatgtgcaaaagctccccgtccagctttgacagtcagttttgatgtcagctcctcggcagggtaggcctgatgacagccctgtccctccctgcctctgccttgcccaaggccacggagggcgtctgcagagaggcctgccttccggattccaggcgggcatgccctgcaaaccccgcctgggcctcccttggtctgcccagccctcggttagccctgcctgaatcagtagatacttgaacgagtccccagtctgcgggaggcagtggtggggccatggacccatgcggggggttccagggtcacacgccacataacagacaaaaatacacacacgtgtgtttttctttgcaatacttgaaatattgccactgtgcttggacttagaagaagaaaatccccgtgacttcttcctcatcaccttgatggctttattctcaccttgtggggcatgtttgtatttattgcttcatggccgactggaatcctgagtcctgggaagctggcactgcggggatcttgcccggtgtcctggtcctcttgcttccgtcgcggccgcatgtgcgtgtgtccaagcaggtcctgggcgcctcaactgctgcccctggttgaatgttctcttgatagtgctggaccctttgtctattttaaagcgaattttgtgtgatttcctgccctttgcgttatattgtataataccaacgtaaggaaataaacctttggaattgttgggctggtgtccccccta

SEQ ID NO: 532201 - DNA, 1403 bp, Homo sapiens
ggatccggattcggattagcagcccgggaagagtgccgtggcacaggcgccggagggagcgcgaccctcggaccccgcctggcccgcggggctgggacccggccccggcctgcccgatggggcgcgcggccccggagatgcgccctcgcccggccccgcgcccccggccccgcgcccccggcccgcccgccccggcccgcgcctccgcctgagtcccccgcgccttggcccgccaccccccgccccgcgcccccggcccgcctgcgccatggagcccggccgcggcggcacagagaccgtgggcaagttcgagttctcccgcaaggacctgatcggccacggcgccttcgcggtggtcttcaagggccgccaccgcgagaagcacgatttggaggtcgccgtcaagtgcattaacaagaagaacctcgccaagtctcagacgctgctggggaaggaaatcaaaatcctgaaggaactgaaacatgaaaacatcgtggccctgtacgacttccaggaaatggctaattctgtctacctggttatggagtactgcaacggtggggacctggccgactacctgcacgccatgcgcacgctgagcgaggacaccatcaggctcttcctgcagcagatcgcgggcgccatgcggcttctgcacagcaaaggcatcatccaccgcgacctgaaaccgcagaacatcctgctgtccaaccccgccggccgccgcgccaaccccaacagcatccgcgtcaagatcgctgacttcggcttcgcgcggtacctccagagcaacatgatggcggccacactctgcggctcccccatgtacatggcccccgaggtcatcatgtcccagcactacgacgggaaggcggacctgtggagcatcggcaccatcgtctaccagtctgcgggaggcagtggtggggccatggacccatgcggggggttccagggtcacacgccacataacagacaaaaatacacacacgtgtgtttttctttgcaatacttgaaatattgccactgtgcttggacttagaagaagaaaatccccgtgacttcttcctcatcaccttgatggctttattctcaccttgtggggcatgtttgtatttattgcttcatggccgactggaatcctgagtcctgggaagctggcactgcggggatcttgcccggtgtcctggtcctcttgcttccgtcgcggccgcatgtgcgtgtgtccaagcaggtcctgggcgcctcaactgctgcccctggttgaatgttctcttgatagtgctggaccctttgtctattttaaagcgaattttgtgtgatttcctgccctttgcgttatattgtataataccaacgtaaggaaataaacctttggaattgttgggctggtgtccccccta

SEQ ID NO: 532202 - DNA, 221 bp, Homo sapiens
cagggcctggagccccatcggccaagaacacttcaacaaacagagtggcctccctcctgtgccatcctgggccactgggcacacagggtgtcaaacattcgtgacctggggactcaggccccggtgctgcaggagtgtcctgcccatgccccccccccccccatctctctcccttttggaaaagattctcttctgtcagtgttaaagattttgttttgttg

SEQ ID NO: 532203 - DNA, 136 bp, Homo sapiens
ctaactcaggagctgctaactcaggagctgctaactcaggggcgagctgctgctggtaaggagactgagcctgtggctgtgagagctaaggtcggggcggggatgtagagggtgatggtaggcagctccccctgag

SEQ ID NO: 532204 - DNA, 166 bp, Homo sapiens
gcagcagcgatctacgcaggacttggtattgagtggcatgtgacgcagagacatcaaggggctgggggtgcagggaggtcaggccactggggcaccagttgaacactgttggagctagtcctcaagggccaaatggtgtcaccaagtatgtaggagtaaggtgtat

SEQ ID NO: 532205 - DNA, 889 bp, Homo sapiens
  misc_feature (44)..(44): n is a, c, g, or t
  misc_feature (65)..(65): n is a, c, g, or t
  misc_feature (70)..(70): n is a, c, g, or t
  misc_feature (77)..(77): n is a, c, g, or t
  misc_feature (100)..(100): n is a, c, g, or t
  misc_feature (116)..(116): n is a, c, g, or t
  misc_feature (119)..(121): n is a, c, g, or t
  misc_feature (126)..(126): n is a, c, g, or t
  misc_feature (130)..(130): n is a, c, g, or t
  misc_feature (137)..(137): n is a, c, g, or t
  misc_feature (145)..(145): n is a, c, g, or t
  misc_feature (147)..(147): n is a, c, g, or t
  misc_feature (175)..(176): n is a, c, g, or t
  misc_feature (186)..(186): n is a, c, g, or t
  misc_feature (196)..(196): n is a, c, g, or t
  misc_feature (226)..(226): n is a, c, g, or t
  misc_feature (263)..(263): n is a, c, g, or t
  misc_feature (301)..(301): n is a, c, g, or t
  misc_feature (312)..(312): n is a, c, g, or t
  misc_feature (320)..(320): n is a, c, g, or t
  misc_feature (322)..(322): n is a, c, g, or t
  misc_feature (340)..(340): n is a, c, g, or t
  misc_feature (369)..(369): n is a, c, g, or t
  misc_feature (372)..(372): n is a, c, g, or t
  misc_feature (409)..(409): n is a, c, g, or t
  misc_feature (412)..(412): n is a, c, g, or t
  misc_feature (427)..(427): n is a, c, g, or t
  misc_feature (465)..(465): n is a, c, g, or t
  misc_feature (468)..(468): n is a, c, g, or t
  misc_feature (477)..(477): n is a, c, g, or t
  misc_feature (503)..(503): n is a, c, g, or t
  misc_feature (528)..(529): n is a, c, g, or t
  misc_feature (550)..(550): n is a, c, g, or t
  misc_feature (644)..(644): n is a, c, g, or t
  misc_feature (695)..(695): n is a, c, g, or t
  misc_feature (697)..(697): n is a, c, g, or t
  misc_feature (701)..(701): n is a, c, g, or t
  misc_feature (706)..(706): n is a, c, g, or t
  misc_feature (708)..(708): n is a, c, g, or t
  misc_feature (714)..(714): n is a, c, g, or t
  misc_feature (724)..(724): n is a, c, g, or t
  misc_feature (739)..(739): n is a, c, g, or t
  misc_feature (747)..(747): n is a, c, g, or t
  misc_feature (776)..(776): n is a, c, g, or t
  misc_feature (802)..(802): n is a, c, g, or t
  misc_feature (824)..(824): n is a, c, g, or t
  misc_feature (858)..(858): n is a, c, g, or t
ggggggggtgaaagggccaggtcagagggccaagttcagacttnagcagcagaatagggtcagantttancaaagtnagaactcgaggttcatgtaagtncttagatcccgctccnaannnctgtntttntcctccntccttctntnctccctccagctcagtgtggacacacgnngaggtctctncctcccagcnaaagctcgggtatcccaagctgggaaatgngtcactcggggctggggtgctgatctgtagcctagtncttcctggtccctcttgaggacagtggggatgggattngaacgggcctnggcccggngncccaggcccattcctggntcccagccccccctcagcagcagtttgangcncgggttggagatggggaccccaagtggaaggttgggnggntgagggccctggganagtgaaagcaggtgagcagtggatgtgcggtggttggnatnttggaagtnggtgttatagttcttggagtattggngggagggagtaggagatcggttttnnggggttttgtttcttcatggntctccctgaccatgcgggctacctcagggaagccagcttcttcagcgagctgagccgcatccctgccactcagctcacagacccccacccaggnagccccacggcccaggagatagctcacagctgccccctggcccgctcgaananaaanatcantngggtcnccagaaggcntcccgggcgttgatnttcccccngctcttctgcctcatgcggttccagagtntctaagtatggaggtcccctcctggnctgcctcagtatccggtgagtntcttatctcagctcaaggatctccttgtcctgtnttctgatgtcttctgcaatgctttgtggtgg

SEQ ID NO: 532206 - DNA, 131 bp, Homo sapiens
tttgttttcagtttctcagaatttgtcttagcgcaaagcagtgagggcagtacatgttctttttgcattaataattattgttatccttttagataatgatgtgttcatttgaactaactacattatcttga

SEQ ID NO: 532207 - DNA, 385 bp, Homo sapiens
ggaaccacgaaggcgggggctggcgccatgattggcagagctagaacaaggaccctgtcaaagctgatgttgatccccctggactcagggttagcattagttagagaagcaggaacagcacagggttgcttacactcagcactcttgtcacaacctaatatttctggtacaaataaggacaatgcatgtccatcctagagttttatattctttgctggctctttaaagtttacagagaaaacagagggcagcaatgtctcaataattctgtatttaaagaacaacatgggtcgggctctgtggctcacacctgtaatttcagcactttgggaggccaagggcggtagatcacaaagtcaagagatcgagcccatcctggccaaca

SEQ ID NO: 532208 - DNA, 197 bp, Homo sapiens
gcggcagatggtcagtggatgagcacatcggcaggtcggagccctgggcgcatagtcgaactggaatccatcggtcatgcgctcgccgaatcagacatgcctcttgtccttgagggttctggctgatgtaccagttcttctgaggccacactgggctgacgtggggtacgcgcaggtctcaccagtctccatgtggc

SEQ ID NO: 532209 - DNA, 334 bp, Homo sapiens
tcgacatcgacggtttctcgctggaagactctattttcttgaagcgcggggaactacgtattcccaccaacaaaaatctgttaaggggcagggcgcagtggcgcacgcctgtaatcccagcccttcgagaggccgaggggggcggatggcttgaatacaggagttcccgaccagcctgggcaacatggcgaaaccctatctctacgaaaaaaacacaaaaattagccgggtgtggtggtgcgtgcttgtaatcccagctactcgggaggctggggcaggagaatcacttgaacccaggaggtggaggttgcagtgagccaagatcgcgccactg

SEQ ID NO: 532210 - DNA, 151 bp, Homo sapiens
aagagatagtcatcaaagccccgcattacccagggatcgggcccctggatgaatccggattcccacagcaattagaccgacagtcgaccggcccaaggactggtacaagacgtgtttaagcaattcacatggtgcacaagccggtgtgcac

SEQ ID NO: 532211 - DNA, 107 bp, Homo sapiens
ctgggcacgtgagggcgcccaggggggctggcaaggagctgccgccggatcccggggaccctcctattgatgcccgtggtcaccacaataaagagccctccaccctc

SEQ ID NO: 532212 - DNA, 438 bp, Homo sapiens
  misc_feature (37)..(37): n is a, c, g, or t
gcacctacactaagacatgtcggggacatgcaggtanatcatgctcgttggttgtgacgattgttcgatagatgcgtgcgtgcaaatacgcgactatctgattcagacaccctagcccagtgtaacgtaggcatccaccagttcctcacgactctgtcaaccagtgaacattcctagagacgctcgcgtctcatatcctgaatcctggctcccactcaagagtcactgcgcattccataggtaccgcaaggtccacagtagctcttgtgagcgctgcctcccatcaacactgtgctccatgtcttttttcttggcaagccccttgttcttttcccaggggctccaaagaactgtcataagtgtttttgcctggtagaaaaatccttaaaacccgggacctaaaagcccatgaagtcttcctggaaccttggattgctc

SEQ ID NO: 532213 - DNA, 159 bp, Homo sapiens
ggtggtccatgccaatacctccaaagaactcaagcaatcagcaagaagaaatctctttaaaaagcttggaaacgacaagaatatacatttctcaaaagaagatatacaaatgatcaacaaatacatgaaaaaatacttaacatcactaatcatcagggt

SEQ ID NO: 532214 - DNA, 120 bp, Homo sapiens
tgggtgcatgatgtggtccaggtatcaggaggcgagtggagattgttgagccagaagttgagactaggtgtgctgtgatcgtgcactccatctgggggacagagtcagggcctgtctcag

SEQ ID NO: 532215 - DNA, 363 bp, Homo sapiens
aataaagagaaagcagagtaaaactgggactctgagatacgactaaagttctgtgtgatacgtgtgccttatttagctcaagacattcctggagcacctataaaaactgacttgtaatccaggctatgtctctctagcttccgtaatctctggcaaggccatttggattctccagctgtacactaaggagactcgatcaggtgattccctttctcagctgtcagttctctaattccaggctgggtagctcgtggcactcaaatgcaattaaacctctataacctcaacctaatcatgattacagaagaggcccatcctcccaaacttgatgtcacacattacagtttaaattagaggcgctgt

SEQ ID NO: 532216 - DNA, 646 bp, Homo sapiens
ggtggtggaggtggaggtcagagtcagagttggaatcagggctacggcaactactggaaccaggctacggctaccagcagggctacgggcctgtgctatggcgtgctacgactactcgccctatgtgctattactggctactggccccggctacgactacagtcagggtagtacaaactacgggcaagagccagcagacgtggtggccatcagaataactacaagccatactgaggcggcagcagtatggctctgggggccgtggaaaaccgcaaccgagggaaccgaggcagcgcgagtgtggtggtcgtcaggtggaatgggtcacgagtcagatgttcggactcacgggctacggcaactacttgaaccaggctactggttaccagcagggctaccgggcctggctatggcggtacgactactcgccctatggctattacggctacggccccggtacgacttacagtcagggtagatacaaactaccggcatgagccagcgaccgtggtggccaatcagaatacttacaagccattactgaggcaggcagcaggagcgaccaaaatgatcgacacatgcttgggtctgcgatctggcgtgcactcaatcatgttccaaatttaatttggcaaactttctatgc

SEQ ID NO: 532217 - DNA, 441 bp, Homo sapiens
tttaagggctacccctgccttgactcaagtttgtgaaacatttcctctgtgttttcttctagtacattcatagtttcaggttttacatttacatttttaacttattttgagttggtttttgtattggtgagaagtagggttctagtctcattcttctgcatgtagatacccaattatcccagcacggtttattgaagagactctcatttccccattgcatgttcttggcagctttaccaaaaataagttggttgtcagtgcatgaatttatctctggactctttattttgttccattggtctatgtatctgtttttataccagacccatggtgttttgataactatagttttgtactacatttttaagtcaattaatatgatgcctccagctttgttctttttgctcaggattgctttggctattcaggctgtgtttagta

SEQ ID NO: 532218 - DNA, 369 bp, Homo sapiens
  misc_feature (102)..(102): n is a, c, g, or t
  misc_feature (203)..(203): n is a, c, g, or t
  misc_feature (233)..(233): n is a, c, g, or t
ccgccacatcatggtttattttttcatttttttaagataagtcaatacattacagtatattaaaaattatcactagggcagcggggggggtaactcccatcnaaggggaataatctatatctttacccctttaaatgaagctggcattgggggattcttttatcaacaaaatgcagcaaaagtaacattgggggatttctaantctttgcctcaaaaaaccgggggggttttncttttattggaacctgagggaacaatgaaaaaccgtgtggaaagagatccagctgtcccacgtcttctagggattccagggggggctcatccatgtaagggaagccaggatgttagatatcaatagccataggact

SEQ ID NO: 532219 - DNA, 148 bp, Homo sapiens
aactgaaaccattaaaaacagaaaacctaaacagaaacataaacatagtacaaaatagggctgggtgtggtggctcacgcctgtaatcccagaactttagaaggctaaggcaggtggatcatttgagcccagcagttcaagaccagca

SEQ ID NO: 532220 - DNA, 848 bp, Homo sapiens
ggggaggagagcggggggcgccggcggcagcgcgcgtggaggcggcacttcgcgaagtggcacttcggggcgggcggcccgccgggtcgcggcctggcgctgcggggcggggagcggctcggacgcaggacgccgcgggccgggcttacaggtgggagaggccccgaccccgccgcttcgcaggccagcttcctgctgtgttccctgcacccaccgatctcacacgcagccctaggacagacgtccactggcctgagttgggtctggggccaacacggagcaggtgggggtagagcagctctgctctcctggtggaaagttgaatggctggaaccaagatgacagatggaggctggcaggcaaacacgggaggcctcctcactccaagaggggagtcagcctggggacagttcttctccaggccctgctgctcccatcagctgcaacacaggagaggtaggcttctccggaaaagctcccacggtcctggatcccgctccaccttctagaagctcccagcgttacttcctgggctggcctgcaccatcgttgcgctactcccgtccacgggggggacatatttcggtgacccgactcaagaaacggcaggctgctttcccgggtgggcagtggctcagcaagtctcggtgcttgaagcctgctcccttccgccaggaggtggggcaggtgcgctggaatgcgggctggaaggcctctccctgagaagaagggttatccactgctgtgcatggaagtgacacaggcttcggccctgatggagaacacacccgcgggcggtgaccagggcagaacaggcaggcgggagtctcaactaggatgggaacagg

SEQ ID NO: 532221 - DNA, 88 bp, Homo sapiens
catggatttgctggtgcagtacaactaggcttaatagggacatgctgtgtgactgactgtgggtaattatcacacctgtcccccaaaa

SEQ ID NO: 532222 - DNA, 123 bp, Homo sapiens
ccggatgccggccggcggaggagttcctgaaccagagctcgcgcttctacttctgttttaatagtgaccgcatcgactccctgctggggagcgatcggcagcagacgcacattctgcacgtca

SEQ ID NO: 532223 - DNA, 857 bp, Homo sapiens
  misc_feature (407)..(407): n is a, c, g, or t
ggcaggttccagaccagcctgctggcctgcgactcttcacagtgcaaattccccacaagcgcctgcgcaagccccctccctgctacctcacagcctgggatggctccaacttctttgcccttcggcaccaagtcctgtggccatgaagtcgtctcctgcctcgatgtcagtgaatccggcaccttcctaggcctgggcacagtcactggctctgtttgccattctacatagctttctctctccagtgcctctactacgtgagggagggcccatggcatgtgtggtgacggatgtggcctttctacctgagaagggtcgtggtccagagctcctgtgggtcccatgaaactgccctgtctctgtgggctcgtggacagtcgttgccagctgcatctgtgtgcctcacnggcggcggtgtccctgtgtggctcctgctccctgcggtgtgtcgggcttattatggtgaccatccgtggtgctcaagagtgcctttccaggtttcctttagcttccgtgttcctgggacatcaggacgcctggacatggcatctctaagagcagagtgggggccgttggacctcccttggtccactccattgcggttcccagctgaggtggctctgacaagatgatgggcatgcttgccttctagtgaaaggttgctatggcctggtgtgctccagtcccagggacttgcttcgcttctgggtcctcagaccgggttttgagcggcgtatctgcctttttgctaccaggtcaggtggtgtctttaaacttggtgccactgggcggtgttctggaagttctccccgtggggctaagaccgttgggggggcgtcttgggcggccaactcttg

SEQ ID NO: 532224 - DNA, 1007 bp, Homo sapiens
gctcagtgggcgtcgcgcgaaggctaagggagtgttggctgggctggctcctgggagccaacatgcctcggtatgcgcagctggtcatgggccccgctggggcagctggggaagagcacctactgtgccaccatgggtcccaggcacctgtgtagcccctcaagcggtcttgtccaaggttgtaaacctggatccaagcagcagaacacttcaactactccggtgcatggtttgacatcctgggaaactgaatcgacggtggactgacttgtacattggacgggactgacttcctcttgacgaatttcgggtccccaagcggagggactctggcgtacttatgtgcatgtggagtaccttttggccaaataacttcttggacgtggctgggacgaacctggtcttgggccattgtaaggacgggacgagctatatccttcttcggcattgtccaaggtcgagattgacgttgtacacatcaacctggctggtgatgaaaccagcttgggtccaggcagcttcgaagcacgctgggaagttccagagtcttgtggagcttcacacctgtgtgggattcctcaagttcatggttggagttcaattccaaagtttaattttctgtggccatcttgggcagcccttgaagttggcccatggatctctctaaggacaactgtccggccaaggttcacagcactccatggccccagacagtggggcaatcctgctgagttacacacacaggcaacaacacagggcgcatgggccgcacaattttaaggcatcccagaaagtggtattcgcaattaacgaggattcaacaagatgaagtataaggaagccaacaaaatttcacggaaacttggagttagagggtatattggtgggactggatgtgatgactaaagggactgggtatggcttttgaactttaaagaatcaggtaaggatgcagcgcaaacaggcttgaacaatgggatgggagcaatatggatgtgggcattcaa

SEQ ID NO: 532225 - DNA, 1324 bp, Homo sapiens
tcgacgcaccactcccggcctaacacagcgcacacaccccgtctcctactaaacacactacacacacacacactcacgcccacggcgctgcgccgcgccacggccgcccgctacgctccccagcctacctcacgcgcacacgccctgcagcgctacgcgcagcaaccggccgctgcacacccctggcgcagcgccgcgcacgcgctctgccagctgtacacccacagcactctgccacccacctgccaccatctcaagcccctggcgccgcaccccaacgcctgaagcaccatcctgaatggccgcaaacacaaaacacacagacacacagacaaacacacaaaaacacacacacacacgtcgcgcgcgcgcggccggccccagcgcgcgcccccccccgcgcgacaacacaccccgccccctcccacccacacgccccctctgcgcgcccgcggccgcgcgtcgcgcgcgcgagccccccttgttcgggcgtctcccacgcgtgtcacaccgctgtggccctactatccaccctgtgtgtcgtgttctctccttggccgctcctacttccctgccggcgcctccctctgccccccctcgcgcgtcgcctcgtggcagccctcttctctctcctactcccccaccctccctatcccactcattccctccccctctgcgtcgccgcctcgcccacactcccgccccccccgccacccgcgcgacaacacccatcttcccccacaatctcgcactcctctctccccccctcgcccctctcctcccccccgcgagcctctcctccacactcctcccccgctccgcgtcccacacccacacgcaccccctcccccaaacatcccccctccccctctccccccacctcccgctcctgctcggccgcaccctccccccattcccccctcttcccccccctcccccccctccccctctccctccgctccaactctcagcacccccccccctcccctctccgccacacgcatccctccccctcctcaccccccccgcgtcccccatcctccccatccatcccttccacccccttcctcctgctgctctcccacttcacaccactacatcacaacctcatccctacccacaacgttggcgccgtcgcccttgtccggttctcgcgcgccacaagcagtgaagatcgggcgcccttcgcctgctccttgttcgttgtgtgtgctggagccgttccctctcctcctcgccgcctctatccccggcgcgcgccgcctcccccctcttgctgcctgcgcttctctgctctctctcgctcccacgcaccggccatctt

SEQ ID NO: 532226 - DNA, 890 bp, Homo sapiens
  misc_feature (59)..(59): n is a, c, g, or t
  misc_feature (130)..(130): n is a, c, g, or t
  misc_feature (628)..(628): n is a, c, g, or t
  misc_feature (819)..(819): n is a, c, g, or t
tgagacatagcagtgtgagcgcttgtgggcggtggcgcgcggtttttcctctcaagcgncgtgctccgggcgcgcgccgtgcgtcatcccgacgtctgccacgttcgctattggcgggtcgacagcaacnacgaagctgaacaccgcacctcaacaacacgaattaacaagagatattaactcaactgtgtacataaacttatctcggtctggggtgcttagtggggggtgagagtgggtgaggggctatcgtggtttcgaagtgggcttgattacttcacactaatgcgtctgccaccccaccgaagaagacgctacgcggagcgacaccctacgctcacgccccgaccccgccacccgaccacgtgcctcaccacccagtgtcctgcgctggcgcgtcgtcgccacgtcctggtgtgtggggatgtagggtcgctcggcaggggcggccgcacatgcggtggttttgttagttgcgaacattgagactcacgcgccgccgccccgacccaagcccaagcgagaactaccactcaccctatatttattgtatcgatgattaagaagaatactgttttagacatttgttatccgtgtgcggattcacgcgtgcgcatctgtgcaatancgttgtaggacgacgtatacatcttatccaaacgacacgcccttcctcccaaccacttcgcacatcatcatcaccgtatcagatgtaaccttttaagatcggcatcacttctactgcacaccgtactccgcggagcagtgtccggatgcggatacaacaggtgctatgtgatggtcacgctgagcgatgcnccgttaatagacaaccacatgagagcccggtgcaacgtcgtccggtagtgtggtcaccctacttacggctt

SEQ ID NO: 532227 - DNA, 292 bp, Homo sapiens
ggtcgacatgcagtttagaaaagtgaattccagatggattatagttctaaacgtgaaacacaaaataataaaacttatagaaataatagctcagtaatatttcagtggggaagatttattgaacaggaagcacaatgaaggaaatgattgataaattgcactacattaaaggacttcttttcatcaagatactataagagaataaaaaggcaagttaaaaaagtgtcaaaaagtatttacaatattttataaagaactcttacaaatcaataagagaaagacaaccctatag

SEQ ID NO: 532228 - DNA, 696 bp, Homo sapiens
  misc_feature (10)..(10): n is a, c, g, or t
  misc_feature (143)..(143): n is a, c, g, or t
  misc_feature (145)..(145): n is a, c, g, or t
  misc_feature (165)..(165): n is a, c, g, or t
  misc_feature (186)..(186): n is a, c, g, or t
  misc_feature (198)..(198): n is a, c, g, or t
  misc_feature (204)..(204): n is a, c, g, or t
  misc_feature (208)..(208): n is a, c, g, or t
  misc_feature (210)..(210): n is a, c, g, or t
  misc_feature (214)..(214): n is a, c, g, or t
  misc_feature (224)..(224): n is a, c, g, or t
  misc_feature (235)..(235): n is a, c, g, or t
  misc_feature (243)..(243): n is a, c, g, or t
  misc_feature (249)..(249): n is a, c, g, or t
  misc_feature (251)..(251): n is a, c, g, or t
  misc_feature (256)..(256): n is a, c, g, or t
  misc_feature (263)..(263): n is a, c, g, or t
  misc_feature (268)..(268): n is a, c, g, or t
  misc_feature (351)..(351): n is a, c, g, or t
  misc_feature (353)..(353): n is a, c, g, or t
  misc_feature (358)..(358): n is a, c, g, or t
  misc_feature (364)..(364): n is a, c, g, or t
  misc_feature (407)..(408): n is a, c, g, or t
  misc_feature (411)..(411): n is a, c, g, or t
  misc_feature (417)..(417): n is a, c, g, or t
  misc_feature (477)..(477): n is a, c, g, or t
  misc_feature (510)..(510): n is a, c, g, or t
  misc_feature (529)..(529): n is a, c, g, or t
  misc_feature (531)..(531): n is a, c, g, or t
  misc_feature (546)..(546): n is a, c, g, or t
  misc_feature (549)..(550): n is a, c, g, or t
  misc_feature (554)..(554): n is a, c, g, or t
  misc_feature (557)..(557): n is a, c, g, or t
  misc_feature (561)..(561): n is a, c, g, or t
  misc_feature (563)..(563): n is a, c, g, or t
  misc_feature (567)..(567): n is a, c, g, or t
  misc_feature (578)..(579): n is a, c, g, or t
  misc_feature (695)..(695): n is a, c, g, or t
taagcccttngggaggaaggaggggaaaccagctcagccccaaatcctggtctctgtccaagccaggccccaggacagagggggactgatggtgtcagggtgggggtggtctcagcatgaaatctagaaacggcatcaggccncncccacacaaaaaaaaagcancaaaatttcatttttttctancttttctttccntctttncacncnttantaaaaatttnaaaacattatnacaaaaangggttntngtagntgccccnagccnaggcgccggaggcccaggccccagccctgccctgccccggacaccgcgtccggcgcggtcgggccctaggccgggaggcctcntnggtgncccgangccggcccgggctcaggcagggccatgtcatcattaaggtgcnnatnaggtanttcctaccctaaacctcatctcagggcttccgccgcccactgcctgcccctggccgaggntctgaactgtgacgctgagcccggggctggctngagggtttgggctgcaggnanggactggagttaganggnngganttnttcntntttnctcccggtctnnggccagttctgcctccactgcatccagctcctcactgcctttccttcagcttgacccgaagcagcgctgcataggtgctgtagcgggatttctcaaactccaggtaggcctccttnt

SEQ ID NO: 532229 - DNA, 340 bp, Homo sapiens
ttgtatattagtatttagaatttttaatgtgacacatgagcttgttttttgtttgtaataacttgttcatgttggattgatgataatgctaatcatgagagatgtttcttatgttttccttttaataacatacatactagagaaatcatttttacaaaggtatgttgatgggaattaaagtagagatttgaaatacattttagcaagttcaggatattcatttttaacttttattcaaaatgaagcaagtgatggtatattttcaaaatttatcttcattccttcatcagtaaccagttcttgcatttgatccgtagagttgtagttaaatttgtctttc

SEQ ID NO: 532230 - DNA, 710 bp, Homo sapiens
attctagaggccgaggcgggaggattgctggggcccaggctacaatgcagtgcaaaatcatggctcatgagcttgacctcgtgggccccagaaaatctccggctcataagccctcgggaatagctgggagaccaccaggcattgtgcgcccattcaaggagctcacgctaataatttctatacaaactttgtgggtaacgagaacgaggtctcccctaaagtgtatctaaaagacgtgccaccccgtgttggtatcaacgctttgtgacaaagggcaaccaaaattatcatggcccaatgacatttcgggaaaggtggtaaattcgacaaattaaagtcttgaaataattcccgtagtgaagcccacacgtttttcaaagattgacgggagaaaaaaggtattgcaatttgagagttaaaagttaaacccggccttgggggtccacaatttattttaagtaaaaccttcaggggtggtgacaatgaaaatctcaggggaaggcctttgctttgaggtagtaggaaacaccaggtaatgcattctgggggcggaaaagaattctacacttttgtattcaaaggtccaggggggaattgccccataactttcattggtcttcgggagccctgaataataggagtctttaaaaagaatacttctagcgtggtaagatattatcaggggaagtaatgggtgaaagtggaattaa

SEQ ID NO: 532231 - DNA, 385 bp, Homo sapiens
atttcaattaattcttttatggggggccaccaaaattcagggttagagtaaatttaggtttgtgggcccatggggccgggtttccaagcccccattaaacaaaaggcttttttttaagcccgaacaggggggttttttaaatcaaatgggaaaaaaattagccaacggaggtcaggcggtttggggacccctcctaaaaagggatcgggaaaaaagattatttttgggcggtgaacccctatccaggggaaagtttaggggcaacttttccaaatcattcaggacttaaaccctgaaaggcccttttaaaggtttcccttaaatccaggggtttactgggacccatgccccccccgtttattgaaaaaaaggtttgcggaggcca

SEQ ID NO: 532232 - DNA, 318 bp, Homo sapiens
caacggctcgaagaggtgtggtaacggtcagacggaacttacgcgcaagtttgaacagataaacaatataggatcatccagatccaggtgttcatctttatgtgagataaatcttgatgatggtattgattatgaacgtctccggaaagagttttctccatttggtacaatcactagtgctaaggttcttatggacggtggtcgcagcaaatggtttggttttgtatgtttctcctccccagaagaagccattatagcagttactgaaattaacggtataattgtggtcaccaagcctttgtatgtatcttttgctca

SEQ ID NO: 532233 - DNA, 290 bp, Homo sapiens
cccctcatacatgagtgcccagtgactgttcttcattcatcgcgccctgtcgttttgcactaatcatatggttgtcattgcgcattatctgtgaagagtccagactggaataagcaaaacttgtccgcacagacagatccatttctacaactgatagcctgttgtaggagcatcacctgtttcaggcggaccaccttattcattcgagacaccattgtatgattcggggccatggcaagatggcagcttctagcctcagccacaggcttccgtttgccatcgaggcacag

SEQ ID NO: 532234 - DNA, 392 bp, Homo sapiens
gtcatatccggactccacgacgcttaactgggaccatgctcataggggtcggaaaccggtgccgccttgatggagaatcccttggcattggcgccatcgatcaccaaacttctcgtgtttaccggtacagtttcggttacgccacctgtaccgaacctcgaagatcggcgtacaaggtggagaaactactcgatccgacaaggatacggtgtacaactgtcagaggagttccagcttcaatcctggccagtccaccgacgccttcgtcgtccatcacccggaggcaaactatttcaatgccacgtgagacgcaaacagcgaccggcgaccgtttaatcgccgctttcttgtgggatttcgacggtactctcgtcgaacctgagtcccggtgg

SEQ ID NO: 532235 - DNA, 145 bp, Homo sapiens
ctgatctgagtttaccgagtggagagtaaacgagggggtattgtctacatgacggcagctggatctcgagcgtgtgctccgaagatcttcgcatcttccggatctttgaggggacaaatgacattcttcggctagtttgtggctc

SEQ ID NO: 532236 - DNA, 190 bp, Homo sapiens
tctaagcaagttagcattattatgattaggtattcagatacccgtgcaatcaagcactcaaggagagatttgtgggttgtgtgcaaatcatatattcagggtaatcaacagcgtcatgtagtaagaagtaacgcttcacattgtgttatgtgatgtgaacaaccggtatcatagttattccaggggggtt

SEQ ID NO: 532237 - DNA, 635 bp, Homo sapiens
  misc_feature (1)..(1): n is a, c, g, or t
  misc_feature (96)..(96): n is a, c, g, or t
  misc_feature (101)..(101): n is a, c, g, or t
  misc_feature (116)..(116): n is a, c, g, or t
  misc_feature (120)..(121): n is a, c, g, or t
  misc_feature (127)..(127): n is a, c, g, or t
  misc_feature (156)..(156): n is a, c, g, or t
  misc_feature (165)..(165): n is a, c, g, or t
  misc_feature (179)..(179): n is a, c, g, or t
  misc_feature (182)..(182): n is a, c, g, or t
  misc_feature (184)..(184): n is a, c, g, or t
  misc_feature (192)..(193): n is a, c, g, or t
  misc_feature (281)..(281): n is a, c, g, or t
  misc_feature (317)..(317): n is a, c, g, or t
  misc_feature (354)..(354): n is a, c, g, or t
  misc_feature (360)..(360): n is a, c, g, or t
  misc_feature (365)..(365): n is a, c, g, or t
  misc_feature (371)..(371): n is a, c, g, or t
  misc_feature (378)..(378): n is a, c, g, or t
  misc_feature (388)..(388): n is a, c, g, or t
  misc_feature (409)..(409): n is a, c, g, or t
  misc_feature (448)..(448): n is a, c, g, or t
  misc_feature (466)..(466): n is a, c, g, or t
  misc_feature (472)..(473): n is a, c, g, or t
  misc_feature (479)..(479): n is a, c, g, or t
  misc_feature (481)..(481): n is a, c, g, or t
  misc_feature (506)..(506): n is a, c, g, or t
  misc_feature (509)..(509): n is a, c, g, or t
  misc_feature (554)..(554): n is a, c, g, or t
  misc_feature (560)..(560): n is a, c, g, or t
  misc_feature (564)..(564): n is a, c, g, or t
  misc_feature (573)..(573): n is a, c, g, or t
  misc_feature (612)..(612): n is a, c, g, or t
ncccattgttctagattcctctgccccatctaaaaacatgggacagccagcttgacttgcaaggcctcagttgaaggcccccatgtacatacaggncagtncggcagtactaggcnaacnngagggntctcatccccatatgggggctcatttcangtctatggntgactaccttcatngcngngtgcgagnnggtttcaccccttgaaaatatggtcacttcagcataaaatagttaaatctttataatggtcaattcatcctacctccttttacatgcngctgaaaaatgacaggctagggacatagaatattgngaactttatactgttagaatcaatgtccattaaatgntcactngctantggtcnctaaatnaccaaattanggaaattatatatggaatacngcaaaaacacagtaaaaagactgaagttcgcccatttcngatcaggaagtctcttcnctcctnngcttcntntgttgtccttctggcttcaaaattnctnctattattcctgtttttcctccttttgatcttccttttgttcccnagtgcnagancttccaganccttctcgctcagatgccatctttttgtatgccatttcnaacagcttcaaaaaagcctgccg

SEQ ID NO: 532238 - DNA, 143 bp, Homo sapiens
gtacctgcccatgtgggtctgtacaacaggaaatggtagaacaacttattttttaggatttaacgacaaccggttgaacaaaacggtagggtgtcatgctcacagagaataaacgatttgtacgaaaaggtgctgaactgcca

SEQ ID NO: 532239 - DNA, 717 bp, Homo sapiens
agcggaggggagtggggtcggacggggagctcatgcagaggtgagctatcgtgcgctatgtcagtcggattgcgaggacctggactcggatccaagatggcgttacgggaagcgaactgcaggaggacggtcgcagcactcatgtgtgatcacaccagagtcacgtaggaggctcatccgcacgaggagcatcacctcgaggatcaccagtctgtatactcacggatgtctagctattgtcgctgatcgcggtgactcgccttggcggcaaccagatgtacgtccaggtggctggatatccaagcctctcaggttcggagaatggagtcttccatcaatcatatctcacagacttgttggatattccataacggacgaaacgtggcacgaacgagagattggtattttgacaacaaataagaatacatcaaggacttcacaataataatagcagcctgtcgaactatggcagcgccctgtaaggtatattcggaaacctatcgattacgacagttctggatgatgtgggccatggtgtcaagttggctaaaagccaagcatggaacataaccagcctgcagaactggcacactgtcgagaacaaatcctcctactcagaaaccgtcaagtcctcccatgtcaggccaggggaacactgggacggaatactccttattaaaccctggacctggtaaaacccccaacagttcctaatga

SEQ ID NO: 532240 - DNA, 510 bp, Homo sapiens
  misc_feature (110)..(110): n is a, c, g, or t
  misc_feature (173)..(173): n is a, c, g, or t
  misc_feature (227)..(227): n is a, c, g, or t
  misc_feature (296)..(296): n is a, c, g, or t
  misc_feature (318)..(318): n is a, c, g, or t
  misc_feature (325)..(325): n is a, c, g, or t
  misc_feature (372)..(372): n is a, c, g, or t
  misc_feature (401)..(401): n is a, c, g, or t
  misc_feature (403)..(403): n is a, c, g, or t
  misc_feature (409)..(409): n is a, c, g, or t
  misc_feature (499)..(499): n is a, c, g, or t
ctctggggtcccaggctcccgtcctggaccttggcaccccgccccccgtgcattgtcgtcttctgagtctggctttgtctggcacatgaagttggatgggtagactctgnagcgtcagaccagcttgcgatgctgatgaataagctgattttgatggggtgtgtgaaacgganatccagcccaggggctaacttgctcgtgctctcatttaaaagcagaaaatagcnacttcattctcggatccgttgccagccccaaaggattaattatctacacacccagaagcagtggagcanaatattttggcaggaatttcangaattgnggcatcggtgcttaatatctggttctttacagtccggtagaaatttnaagggatttgaatactgcaagctatctgngnatagangctggggattcggctggaccatttgcaagtgccatttattttattttaattttaagtttttgagacatatctgactcagctggcaacagnaggccttgctt

SEQ ID NO: 532241 - DNA, 865 bp, Homo sapiens
gtctgagagtgtgaccctctcctgtaaagtatttatcccacccattaatataatttctgtataataaacttgacctgaaattatttcattctttatattaaacttttaaaaatgttttttattttcacccttagatatgggaagagtttttttttttttttttttataacagggataactggacgcagggctaggccctctttaaaaaaaaattggagcgctaaaacctcattttctcttggggaatttcctttccaaggtctctttataagcaaaggtccactccattgtggtacgctgggggtccaacttatattttccaccggggattaatatcccatggttgggaagggtagtactacttttatttatcaggcttcgatggggggacattgggatcgtatctacttctggactatttatccataaggctgctaggaccttctggtgtactgagtgtcggggtggccatatgtttcattcctcttgggaatatgccggggagcagattggcgggatcatatgaacctctattacccctggggggactcccaatggtttccactggtggtgccacacttctttttccccatcaaacgggcgtgagggtctgagtgacccaaatccccaaggcttgaataactactttaactagccacctcaaggggacaggcacccagggagcgggtgatcgccgaggcgaggatagaaactcttcaggaactatggcctaggctactcagaagcacctggcaggcctcaagggagggcgaaagaggagagaaacccagagcggaagcctgggagataaaacgggacacaggagaggtacactctcacacaacacagtccaaaaatcgctctc

SEQ ID NO: 532242 - DNA, 560 bp, Homo sapiens
tccataatgtgtgccaggctgtaatgcagtggtgcgatcaaggctcactgcagcctcaatctcttggctcaagagatcctcccacctcagcctcctgagtagctgggactacaggtacaggccaccttgcccagcttttggtttttgctgttgtagagacagggtttcgccacgttgcccaggctggtcttgaactcctgagctcaagcgatccaactgccttggcctcccaaagtgctgggattacaggtgtgagccaccgcgcccagcctaagatatttttttaaaaccacgtttagaggtcctacaagctcgggtcatctgggctgccctcgccttactgaattttaaatttacataaattaaaaagttatatatcaactccccaaatccttgtgacttaagcaaggatggagctcatctatagtagaacagaataaggtcaagacagggagaagaggagagacagtcaacccgtaatccggcccctgaatcaagtcatttctgagtcaaaatctccctctgacctttactagaggtttctcttcctcctaaacagg

SEQ ID NO: 532243 - DNA, 861 bp, Homo sapiens
  misc_feature (291)..(293): n is a, c, g, or t
  misc_feature (295)..(295): n is a, c, g, or t
  misc_feature (328)..(329): n is a, c, g, or t
  misc_feature (361)..(361): n is a, c, g, or t
agcggggtgctgagctggagtgggactgacgggtgcggacgatggccgtgtgctgtggcacgcgtgcttgcgtggccatggtgacgtgggtgcggagcctggagccggagccgacgggcggtggcctgcactgggaccccggaatcccgcgctgctgcccacgattctgcttctgagtgaacctagaaagattgtacaatgaatggtgattctcgtgctgcggtggtgacctcacacacccctgacacagcccctcacaaggcagaggtacttcgaccgagtagatgagannnanccagagtacttgagggagaggaacatggcaccnnaccttcgccaggacttcaacatgatggagcanaagaagagggtgtccatgattctgcaaagccctgctttctgtgaacgaaattggaatcaagtgatacaggagcaatttacgaaggggcaagaagcccacaggcctattggcattacagcccgattgccagattcttatgaccacgaatgtaccaagatgtctacccaggcagctccgcaaggaggggatggctgccttaaaccatgagtcttggtatggtgactcctgtgaacgatcttagaggatctgattctattgcgtatgacagaacggacgagcaagttattaccgcgtgtaaagttggcagcggtctaatagactaggcagaatcttctattggagtggtcctcagccttatctagcgagatcattctaacaaacgcgaggtgaaaccttcgaagcaaggaacagcgttcctcaattgatccctaatgggccttctttagcgttgaagttgactgcgtccaggatgggtaaagatccagttaacagggaagaac

SEQ ID NO: 532244 - DNA, 955 bp, Homo sapiens
gtctctcgccaggtgtcctcgtggaaggaccgggaccgcggagtatggagtgtgcgagtgtgagcaggcctgagcatccctgttctgctccgtcagatgacatccgtctataaaccacttggcgatggtcggtttcaccatgtatagcaacgtactgtgatgcaccagggagagacagggacgagctggaatgtcctaacatatttcccttcaagcatcattcatctcattggcaatgatggagtccgaggtggtgttatgtcattgtggcgcagcacgacggatggtggggtcgtccgaaagacaggatgcaagacagtaattcagcagtggtgccctgtcgctggtgaagggctgttgtgtgccctggcatgggccacagtagcaaccccattgatggcagcgtaaggaccataccaggggggcacaccttggggataatacaaaaacactttagacattcaatgggaagtagcattgttggctttcaatgatgcctgggggtaggggtgggcgtatgggttgtgccatcctaacggttgcgaccctacccaattgtaccgatttcacgtggtacccatcgtttgcctcgtggcaaatttacatgcgttgccgagtgggttcgcccaggtggcttgggttggacaatattgcccacgatttgttggttacgtaccacttgatagacgcatggctcacgcaagactagtggggatctccgcgaggcccccgcaggcaacaggacacttccgtatttatggcacagggcattttaagtggtggatgcaggccacttaaatttattcttccctagggtggctttcatatggtggtttcctgacagttgttctgggagccctgacttgtactcaatgaaattaggattaagcgactcgtggtgtgaaggccagaggataatgcggcagtcatgttgaaacagtgcttcatagatatc

SEQ ID NO: 532245 - DNA, 224 bp, Homo sapiens
aggcatttttctctttgtctgttaagggggaactacagcgcgtgtgagaagaggcaacccatatgagcagtatctagctattgggcgtggacagaaggcttgtgacattatatttaccatgaatgtgcattgctgtaacctatgatgtgaagagaatcctgtgggtgcacggggtgagtaagggcgtgagccacgagggtgctgttgagtgtatcaggttaccg

SEQ ID NO: 532246 - DNA, 451 bp, Homo sapiens
gacgacttcgcaggtgtacatgagaattcctgaattgggcagcagaggtggcagtgagccaaatctgtgcctgtactcaacctgggcgacagacagactctatctcaattaaaaaaacataaaaaaaaaaaacacacgaaaactgtggtaaatatccattaacataaaaatttaccatcttaaccattttcaagtggcattacatacattcgcagtgttgtgcacccattattaccatctaatttccagaactttttcatcttctctaaatgaaagttagagcccattaaataaataactccccctgctccctccctctatggtaaccactgctccctccctctatggtaaccatcattctactttctgtctctgaatttgactatcccaaagttcctcatataattagaatcacacggtatttgtctttctgtgtctggcttatttcact

SEQ ID NO: 532247 - DNA, 611 bp, Homo sapiens
ccttgtggaatcccgcccctttgcagagtcccggcatgcactctgacagtgccaagcctcgtcttgttgactgatgttcacaggaaccttgagccaatctgctgcacagagctccgtgcgagagaggcaagagagactgctcttcaagtagttgcagggtcaggagcatgagggacagggatacatgctctaggtgagagcagagtgccatgggacccatgggaagtatggttgccacacttcgggattcgttctgctttaaattggtccacatgccctctgaggtaaaagaggcacactccacagcccgagacacagtcccgtttccttagaaagtcacacacacgatctagatgcaccctgtatttccttgacacgttctttatacccctgggcctgtgggctcttccttacgattagaatccctggacacctctcttctgaagaactgacactcttctttcaagacttagctcactccgtcactctctgtaggcatatgcagaggactagcttggatgaagccggtacacagcctcgcggcacacatgcacagtgctgctgttctccttccacatctctctccatgcggtacaggacctgcttggttt

SEQ ID NO: 532248 - DNA, 505 bp, Homo sapiens
  misc_feature (155)..(155): n is a, c, g, or t
  misc_feature (162)..(162): n is a, c, g, or t
  misc_feature (164)..(165): n is a, c, g, or t
  misc_feature (169)..(169): n is a, c, g, or t
  misc_feature (199)..(199): n is a, c, g, or t
ggcttttcaagctctcgtgctggggtgggtagcctggaaaagaatcggtgctggtagctcaatcacgatgttttaggccatggccttggggccaatctgttagtcgccgctgagagtctgctctggcacaatcagcggcatgatttcttcgaccnacctcgncnnggtncccccagaacagtttcgcgccatggcgaanggggcatgcagttgctgttcctagtcgatgccaccggcaagaagaaccaccgtctgaaacgagtgtgaatcgcgacgcttttccgaaagaattgactaataagaaacgatttatgagcgaacgagcccaacgcaagtcaaatagccacaaactgaatgagatccccgaagctgtgatcctgcaactcggcaagcgctcggatcgcgatctttcggttgaatgtggtatttcggcttacttcttgaagcagaagcggcttgcctggggtatcgaccagttcaaacgtggtgtatacagaacgaccca

SEQ ID NO: 532249 - DNA, 288 bp, Homo sapiens
  misc_feature (177)..(177): n is a, c, g, or t
gcacgaggcaaaaccctgtctctgtaaaaaatacaaaaatttgccatgcatggaggtgtacgcctgtagttccagctactcaggaggctgaagtgggaggatcacctgagcctgagaggtcaaggctatggtgaaccatattgtgccactgtactctagcatgggtgatggagtganaccctgtctcaaaaaaaaaaagaaagaaggaaataaaagggtattgaatatggttaccagtattattactagaaaaagaaaggtaacaagttaaatctaataattataaag

SEQ ID NO: 532250 - DNA, 99 bp, Homo sapiens
gggactcgagactttccggcctgtaatcacttaagaaggtacaaatattacactgatagcatcgtcaaccctgatggctttggtggattcccctgtgcc

SEQ ID NO: 532251 - DNA, 694 bp, Homo sapiens
tttgtatttgtagcagagacagggtttcaccatgtggccaggatggtctcgaactcctgacctcaagtgatccgtctggctcagcctcccaaagtgctgggattacaaggtgtgagccactgacctggcctatataggcgttatttcttaaaggctattgtaggtaatgtatgaccaaggtttattgttgatgtataagtgtttatgccgcacaagatgtatattgtactatttaggttgtcagtggaaaaatggggtaagcttagcgagtttcgaaatattgaagactgaagtttaaaagaaattaaagtacaagggtactgaagagaatgcgagtatagaaaagtaggctcaagcacaatgattagagacgaagagtaccaaagcggatgtgtgtatgtgtgtgtgtgtatgcatgctatgtggctgggaaacaactatgggagactgattactattcacattatatatgtgtcacagtgaaacacgtatccatgctgtccatgctaacagcatcaaccgacatagcctacacgtaacggaagggtccgcgactgccacacacccgacggcaaaggaggaaccaaaagaaacacgagcaacgaacataacgtagcacagcagagatgcaggccacgactgcaccacccccgcaggcaccatcgcgcatcaatcagcccaacgaaccgaccaa

SEQ ID NO: 532252 - DNA, 314 bp, Homo sapiens
gcgtaatatctaatagtgggtgtggtcccccactctgggttcgattctcaaccgtctatacaacttggggatattttatctactttagtacctatgatcttactctcttaattagatctttactctccccaaagagtatgagtaaaatgtatagacagacccctccatataagataggcatatgaggcatagctgccattaagtgaaaaaatagctgagtctgggtgcagtgtctcatgcctatgtaatcctaagcactttgggaggcccaggcaggcggatcatttcagcctaggacttgaagaccagcctga

SEQ ID NO: 532253 - DNA, 104 bp, Homo sapiens
gcacagtaaaaacacacttaatggattgctgtggcttatgcctattatcccaacactttgggacagactgagtgcaggcggaggtaccttgagcccaggagttc

SEQ ID NO: 532254 - DNA, 91 bp, Homo sapiens
acccaaggtgctgagagatctccagcctgctacacgcacgccccaggcgtggccgctgttacagaaacaataaaccctgatgggcatggaa

SEQ ID NO: 532255 - DNA, 115 bp, Homo sapiens
cattactgtacatttatggttctccagtgtttgttcatcattttttcatttttcatcgtggctttccgtctgtgtgtcacctgctgctctgcacattctgtcacatccatggtcc

SEQ ID NO: 532256 - DNA, 668 bp, Homo sapiens
  misc_feature (258)..(259): n is a, c, g, or t
  misc_feature (621)..(621): n is a, c, g, or t
ctccccccgccggaggggagggggaaaaaaaaaacacacccccccccccccccccctttattaatataaaaaaaacccgcccccccccccgcggggggggggggtttttttataaaataaaaaaaaaaaaaaggggggggggttttttttttgggggggcccccggggccccaatataaaaaaaaaggggttttttttttttaaccccccccccccttctttttatgtaaaggagaaaaaaaaaaaaatatttttttnnaaaaaaaaaaaggggggggggagggttttttttttttttgagggggcccccccaaaagaaaaaaaaggggggcccccaaaaaattattttggggggcccgccccccccttttttttttaaaaaaaaaaaggtttttttaaaaaaaaaaaatggggaaaagggggtgggcccccccttaaaaaagggggggggtttttttttttaggggaccctaaaaaattcggccccccaaaaaagggggccccccgcgcagggttaaaaaaaaaatgggggggggtgggaaaaaaaaggggccccgagtccccaagaggttttatttggcccaataaaaattgtttaagggattcctaggttaaaaaggnccaggggtcggccccttccagggttgtggtctcgtgcccgaatttcc

SEQ ID NO: 532257 - DNA, 119 bp, Homo sapiens
ggcacaggtcaaaaagaccctttattactttttatgattgccactaatgctttcttgccaaatgcctttgaagcaggtgctttttgggctgaagctttttgacccttctgtggtctctc

SEQ ID NO: 532258 - DNA, 182 bp, Homo sapiens
aagggtgtggcggaggcactgtaatcccagctactgggaggcgggggcaggagaatcgctggaacccgggaggcggagatgcaggagccacgatcgtgccactgcactccaaccggggcaacagggtgagactccgtatcaaaaaaaaaagaaggaaactaagcaataaaggaagggaaaat

SEQ ID NO: 532259 - DNA, 152 bp, Homo sapiens
ctgaccgagaagattcccgagagtaaatcattttttcaatccagattaacaagcatgtctctctgccaagatccaggtaaactggagtgaccctagcagacccagcttagagttcttctttctttcttaagccctttgctctggaggaagtt

SEQ ID NO: 532260 - DNA, 342 bp, Homo sapiens
tgctatgcccctagagtccctctgggtgaattctgaccctaaaccagatttcccaggatcccatctgcaggctccacagcaaatgggatgtcccacagatcccattctcattgccagaattgtaggggaagaattataattttctctctactttttgcgagttatttgctgggaccttccccttccccgtaacaaaagacagattaataagataaaaacacatagaggcttattaacatgtataccttatgtatacatgaaaataaactctaaggaaggggttttgagttcagatttaaatatcaccgtcagctgaaacaaagaaacattttggaaaggtta

SEQ ID NO: 532261 - DNA, 174 bp, Homo sapiens
atccaaagaattcggcacgaggctccaccttaccaccagacaaccttagccaaaccatttacccaaataaagtataggcgatagaaattgaaaccttgcgcaatagatttagtaccccaagggaaagttgaaaatttttaacccagcttatatagcaaggtctaacccctatac

SEQ ID NO: 532262 - DNA, 556 bp, Homo sapiens
ctgacacacagggcagacccacgggccgccaccccgagcaccaccccaagaccggagctgcagcatggcgggcgcaagccggagctgaagctggagggacgccggccggtggacagcgtggcgccagaacatctgacttcagacaacgtggacatcgtcgagagctcagcagcgaggctcatgggcaccatggacgccgttcgacgtccacgagttctgaccaggtacctgcccctgggcggccccgcccgcacaccgagccggagcaggcctaatggggagcgccctaccttccacgaccggaggcggtcccacacgatgtgggcacacagagacgtgacacccgatcggaactccgaccgatagacccacacgagacgagagtcaccccacggcaccgccggcactcacagacggcgacgcagaccgacgaaacccgggacacaatacagggagaacaagacccccgaaggaactcgaccccgaaccaaacggaaacactgccacagagacacaatcaacgagaccagcccgcgacagcaccacggcagggccc

SEQ ID NO: 532263 - DNA, 1237 bp, Homo sapiens
  misc_feature (136)..(136): n is a, c, g, or t
  misc_feature (147)..(147): n is a, c, g, or t
  misc_feature (173)..(173): n is a, c, g, or t
  misc_feature (196)..(196): n is a, c, g, or t
gtaaggacatggttggactaaggactacgtgatctgtaggcagcagcattgtgcgttctccagcctttgcgtactggggtcactcattgttgtcgtacaggagacagctttagatgaactatgtcatcactcccanaatcttctgcnatgtgtagaaaagcagcaaggactanattgcctaggggaaaagacttcnttcactttgggagtgaaacaatctgatcaagagactggacgtgtacttctgtttctcagtttatctggatgttatcagatcacagaccatggtctcagggttttgactctgggaggagggctgccttatttggagcaccttaatctctctggttgtcttactataactggtgcaggcctgcaggatttggtttcagcatgtccttctctgaatgatgaatacttttactactgtgacaacattaacggtcctcatgctgataccgccagtggatgccagaatttgcagtgtggttttcgagcctgctgccgctctggcgaatgacccttgacttctgatctttgtctacttcatttagctgagcaggctttctttcatgcactttactcatagcacatttcttgtgttaaccatccctttttgagcgtgacttgttttggccccatttcttacaacttcagaaatcttaatttaccagtgaattgtaatgttgtttctcttgcaaattatacttttggtttagaaagggattaggtcttttcaaaagggtgagaacagtcttacatttttcttttaaatgaaatgctttaaagaatgttggtaatgccatgtcatttaaagtatttcatagataattttgagttttaaagtccatggaggtgattggttctctttacacattaacactgtaccaagctttgcagatcttttccgacacacatgtctgaagacttattttcaaagacagcacatttttggaaactaatctcttttccgtaatatttcctttatttcaatgattctcagaaggccaattcaaacaaacccacatttaaggttctttaggattatagaataaattggcttctgagtgttagctcagtgagctaggaaagcaccaatcgatatttgtttcctttagggatactttgttctcaccactgtccctatgtcatcaaatttgggagagattttttaaaataccacaatcatttgaagaaatgtataaataaaatctactttgaggactttaccaagtaa

SEQ ID NO: 532264 - DNA, 598 bp, Homo sapiens
tacatactgattgaggagaaagggcaaaggagaattctaagaaatgcacatgtgcaacaagtatagtttaacagctatataaccttccttgggtagcagtaattagcaaggcaaccatcacctaaaatttgtagtcaacacaagctgaagcatgctcattaatcaatagtaagggagagtcccacaaacctgggatgggaactatgtggagaaaggcagaaatggaaaaaactagacaaaagaagcccagaccgaggtgttgataacaaaacactgcctactgatctgcatgagacactccatctcagagtctacttcctgaagaactcaacaagtaacaactcgtactaggaacaattcaaagcagcaggagattcataggaatttggaaaatatgcttatttaccatcaagctagcaataggatcctaatatttaatttgatgggtacagatagactctggtacaaaatggtagtctagttgttaaaagttccactagtgtgtattggaatggtgcatagtagtggaaaagaatgcactggctggtgcgttatgtcaatggtttgataaccatgaaaaaaacagttaattataaaa

SEQ ID NO: 532265 - DNA, 284 bp, Homo sapiens
gcctggcctcaaaatctttaaaaaattttacctgtaaaaaaaacccccagggttttttttttaataaggggggggaaaaacccatgccccaaactttggttgaagggggcctaaaaccccggggcctttgctcccacccttttttaccgaaccaaacattttcctttaaatgggggatttataaaacgcccccagttttctttgtttttctaaaaaaagaagggccaggaggatccccctctaaacccccttaggccttacctaagttccggggaaaaaaaaaa

SEQ ID NO: 532266 - DNA, 338 bp, Homo sapiens
aaagtgtatgtcccaaatacggactaaacagaaatgtccagagacatctgggggaggtgagatgaaatattcagactttgctttttgcttccctgagctgccctgcctcccaggtgtagttgtagtcccagtgagtccttggagacctacaagctaaatgagatatagattgagtcattcctcttgaatttcacagtctggagtgctgagagtcatctgatcttacggctctggttaacgaattctggccatctagcggcctgtgaaggagacttgagcacacactaaggccttgttagtgggatggctgtggtaggaggtccaagtgcaatgcggaa

SEQ ID NO: 532267 - DNA, 2350 bp, Homo sapiens
  misc_feature (1304)..(1304): n is a, c, g, or t
atttcgattaaataaaaatggctttagtaattcaactttatatttaaaataattttaagacttcctgttatggaaaaatttaacatcgaataatacaacgaatcctcatgtaccatcagcttcagcagttataaacctgtgggcagtctcctttcatctataccattgctcattcccatatctactccgccattaagctaatcacaggtgtcatatcaacttaaaaattaatatgactgaaagcataagctgttgtagttccacatatttgcgtaatgtttattagtttctttcctaagactgtatgtcttaagaaatttgccctttgtattttgtatgtgccatttggggaatataaggaaaagttaaatttctggaaattaatgtgttctatgtgtttagttggaagtaattgttatggtagtatcagcttacttgcttttttgttgttgttgttgcagccgagtgctgttttagaaaataaaaagtaaatttaaaatgtgtttttgagttaagctagatatcaccccagagtactgtgatttttcagttacaatccatttgatatattctgcagtaaaattatatttcatgtacagttttcattttgtattgttccttatatcacaattgcaagtattttggttgttcttgttgatatgtaaagaacaaattaactactccttatttgttcatggtatagacataatgaaagacttcaatatagttgaaacaatcttttccacatttgcctgcttttatgaaaatatcattcattcagagtacttgacatttgaatatgtactgtgaaacttcttctttgatattttctaattctcagctatgttccctaatgggtcttgtatctagtgcctgggtagcatagtgtgactgggataaaatgtcagttattccacagatttttttttattctttgtaagtgaatgataatttttactatggctacagtttaattgatcactcattatatatttaattttggaaaataatttcatctaaccctaccatatatagatatttttggctacaaatactaaataaaaatatggcaaatatattaaatctttgtctatatagtttattttgctttaaaatttgaagataatatttattgtaattgctcaatactgacttctttagctgatcgattatagttagggctgttttttgcctttattacatttctagggaggatgttcagattataagaatctttttataagttagcttggcaatcttgcttctgtggattgtctcatttccattttggatttttatattgnaagttgttgctaaaaattatttttttcccttcttccacttaccttttggaccatgaaggatatattaattaaagtcaagctgctattgagttttgtgtctgaataatttcttatacacttatcatgagatttacttctatcatataagtactgctagtaaaaccaatgaatgtttaactccttcataagcaaaattatttttatgtgatctctaagaaattcctcctttcacatttttctgttttcatacaggtcctcatgctgataccgccagtggatgccagaatttgcagtgtggttttcgagcctgctgccgctctggcgaatgacccttgacttctgatctttgtctacttcatttagctgagcaggctttctttcatgcactttactcatagcacatttcttgtgttaaccatccctttttgagcgtgacttgttttggccccatttcttacaacttcagaaatcttaatttaccagtgaattgtaatgttgtttctcttgcaaattatacttttggtttagaaagggattaggtcttttcaaaagggtgagaacagtcttacatttttcttttaaatgaaatgctttaaagaatgttggtaatgccatgtcatttaaagtatttcatagataattttgagttttaaagtccatggaggtgattggttctctttacacattaacactgtaccaagctttgcagatcttttccgacacacatgtctgaagacttattttcaaagacagcacatttttggaaactaatctcttttccgtaatatttcctttatttcaatgattctcagaaggccaattcaaacaaacccacatttaaggttctttaggattatagaataaattggcttctgagtgttagctcagtgagctaggaaagcaccaatcgatatttgtttcctttagggatactttgttctcaccactgtccctatgtcatcaaatttgggagagattttttaaaataccacaatcatttgaagaaatgtataaataaaatctactttgaggactttaccaagtaa

SEQ ID NO: 532268 - DNA, 464 bp, Homo sapiens
aagacgctacttcgcccgtaactcatagaagagcttatcacctttcatgatcacgccctcataatcattttccttatctgcttcctagtcctgtatgccctttgtccctgagagcaacctccaccaacgaaaacttaactaatactaacatctcagacgctcaggaaatagaaaccgtctgaactatcctgccccccgcccaatccatccctagttcctcatcgccctcccatccctacgcaatcctttacataacagacgaggtcaacgatccctcccttaccatcaaattcaagctttggggcccgaacgcaaaagtgggtactgaacctacgagtacaccgactacggcggactaatcttcaactcctacatacttcccccattattcctagaaccaggcgacctgcgactccttgacgttgacaatcgagtagtactcccgattgaagcccccattcgta

SEQ ID NO: 532269 - DNA, 1859 bp, Homo sapiens
  misc_feature (136)..(136): n is a, c, g, or t
  misc_feature (147)..(147): n is a, c, g, or t
  misc_feature (173)..(173): n is a, c, g, or t
  misc_feature (196)..(196): n is a, c, g, or t
  misc_feature (1750)..(1750): n is a, c, g, or t
gtaaggacatggttggactaaggactacgtgatctgtaggcagcagcattgtgcgttctccagcctttgcgtactggggtcactcattgttgtcgtacaggagacagctttagatgaactatgtcatcactcccanaatcttctgcnatgtgtagaaaagcagcaaggactanattgcctaggggaaaagacttcnttcactttgggagtgaaacaatctgatcaagagactggacgtgtacttctgtttctcagtttatctggatgttatcagatcacagaccatggtctcagggttttgactctgggaggagggctgccttatttggagcaccttaatctctctggttgtcttactataactggtgcaggcctgcaggatttggtttcagcatgtccttctctgaatgatgaatacttttactactgtgacaacattaacggtcctcatgctgataccgccagtggatgccagaatttgcagtgtggttttcgagcctgctgccgctctggcgaatgacccttgacttctgatctttgtctacttcatttagctgagcaggctttctttcatgcactttactcatagcacatttcttgtgttaaccatccctttttgagcgtgacttgttttggccccatttcttacaacttcagaaatcttaatttaccagtgaattgtaatgttgtttctcttgcaaattatacttttggtttagaaagggattaggtcttttcaaaagggtgagaacagtcttacatttttcttttaaatgaaatgctttaaagaatgttggtaatgccatgtcatttaaagtatttcatagataattttgagttttaaagtccatggaggtgattggttctctttacacattaacactgtaccaagctttgcagatcttttccgacacacatgtctgaagacttattttcaaagacagcacatttttggaaactaatctcttttccgtaatatttcctttatttcaatgattctcagaaggccaattcaaacaaacccacatttaaggttctttaggattatagaataaattggcttctgagtgttagctcagtgagctaggaaagcaccaatcgatatttgtttcctttagggatactttgttctcaccactgtccctatgtcatcaaatttgggagagattttttaaaataccacaatcatttgaagaaatgtataaataaaatctactttgaggactttaccaagtaatactgttgtgttgtgatttttattataaatctcaatccaggtttactttagtatagaataggactacatactttgtctttggacctcccatgaacttattaccctgacaaatagttttagacagatactgaattttattgagctgaattttctttttgaaatgagttattcagtagtcaaaatttgaatccgtaagtatatctactttgctttgttaaaacatcatgagagtggaggcctgccacccagaaaggcacatactagtgccttttagtacaattttatgtcatgtagaagaaaatggcaatgttcctcctattgatacagatacaggcatatgtcatcttattgcgttttgctttattgcactttgcaaataatgcattttttacaaatggaaggtttatggcaactctgcgttgagccagtctattggtgccatgtttccaataaaacttctcctttcatgtctcgtatattgtgataattcttggagtatttcatagtttttcnctattattaaatctgttgtggtgatctgtggccagtgattgttgttactattgtaattgctttggaatgccatgaactgtgccctaataagacagagaacttaattgat

SEQ ID NO: 532270 - DNA, 154 bp, Homo sapiens
cattgagcccctgtgatgctggttggtgtcggatggacttgataacttggcctatgtgaaccctggtcacagtgccctggggctttccataaggcacctcgcactgcctgtttggagcctgtcagactctccagcacagtgacaacactcttgc

SEQ ID NO: 532271 - DNA, 1832 bp, Homo sapiens
  misc_feature (136)..(136): n is a, c, g, or t
  misc_feature (147)..(147): n is a, c, g, or t
  misc_feature (173)..(173): n is a, c, g, or t
  misc_feature (196)..(196): n is a, c, g, or t
  misc_feature (1723)..(1723): n is a, c, g, or t
gtaaggacatggttggactaaggactacgtgatctgtaggcagcagcattgtgcgttctccagcctttgcgtactggggtcactcattgttgtcgtacaggagacagctttagatgaactatgtcatcactcccanaatcttctgcnatgtgtagaaaagcagcaaggactanattgcctaggggaaaagacttcnttcactttgggagtgaaacaatctgatcaagagactggacgtgtacttctgtttctcagtttatctggatgttatcagatcacagaccatggtctcagggttttgactctgggaggagggctgccttatttggagcaccttaatctctctggttgtcttactataactggtgcaggcctgcaggatttggtttcagcatgtccttctctgaatgatgaatacttttactactgtgacaacattaacggtcctcatgctgataccgccagtggatgccagaatttgcagtgtggttttcgagcctgctgccgctctggcgaatgacccttgacttctgatctttgtctacttcatttagctgagcaggctttctttcatgcactttactcatagcacatttcttgtgttaaccatccctttttgagcgtgacttgttttggccccatttcttacaacttcagaaatcttaatttaccagtgaattgtaatgttgtttctcttgcaaattatacttttggtttagaaagggattaggtcttttcaaaagggtgagaacagtcttacatttttcttttaaatgaaatgctttaaagaatgttggtaatgccatgtcatttaaagtatttcatagataattttgagttttaaagtccatggaggtgattggttctctttacacattaacactgtaccaagctttgcagatcttttccgacacacatgtctgaagacttattttcaaagacagcacatttttggaaactaatctcttttccgtaatatttcctttatttctataatcctaaagaaccttaaatgtgggtttgtttgaattggcttctgagaatcattgaaataaaggaaatattacggaaaagagatttgtttcctttagggatactttgttctcaccactgtccctatgtcatcaaatttgggagagattttttaaaataccacaatcatttgaagaaatgtataaataaaatctactttgaggactttaccaagtaatactgttgtgttgtgatttttattataaatctcaatccaggtttactttagtatagaataggactacatactttgtctttggacctcccatgaacttattaccctgacaaatagttttagacagatactgaattttattgagctgaattttctttttgaaatgagttattcagtagtcaaaatttgaatccgtaagtatatctactttgctttgttaaaacatcatgagagtggaggcctgccacccagaaaggcacatactagtgccttttagtacaattttatgtcatgtagaagaaaatggcaatgttcctcctattgatacagatacaggcatatgtcatcttattgcgttttgctttattgcactttgcaaataatgcattttttacaaatggaaggtttatggcaactctgcgttgagccagtctattggtgccatgtttccaataaaacttctcctttcatgtctcgtatattgtgataattcttggagtatttcatagtttttcnctattattaaatctgttgtggtgatctgtggccagtgattgttgttactattgtaattgctttggaatgccatgaactgtgccctaataagacagagaacttaattgat

SEQ ID NO: 532272 - DNA, 831 bp, Homo sapiens
gtaacgcatgcctgtagtcccagctacccaggaggctgaggcacaagaattgcttgaacttaggaggcagaggttgcagtgagccgagattgcaccactgcacttcagcctgggtgacagagcaagactccatctcgaaaaaaaaaactctctgtcaagtatccaagtctcaataactgtagttgtctaccaattattctttcaagtcaacatggtgtctatgaaaagagcagctagagcatatgtaactcaaataattgcacaaatgctaatgatactcacaagctaatctatgcttacatcagcaggtctcaacttcttaaaattagttgttttttaaattgactcataattgtacatatttatggggtacatactggtcgttttaatacatacactatttagtgattggatcagggttattagcatatccaaggtatcaaacttggagacaactattgtactttggtatggagcataaatgtttttctgaatattttccatttggtcagattattacacagaggtgtatatttaacagggttgcacgatttaactaaaattataatttctactgctaaggacattttaacgtgacactgttcttgggtttgagcctgtgagcacgtggtgctgaagaatgtatggctactggtacagttgggctgctcgcttgattcatgcttggttctgccagtgccatgtcaccccgcggcaactcttttctgttttttgcaaatagtctggcctggacctttgaaggtgtgggggccgggatccggccacttcgaccgggtgctcttgggttttccccgctgagctctgggggtt

SEQ ID NO: 532273 - DNA, 938 bp, Homo sapiens
gtgcttgtctctttcctggatgttcgaaacattattctaggcaaatcacactatgtatgtatgggctggtggctgccatgcagccccgaatgctggttacgcttgatgaggagctgcggcattgccagtgtctgtccgtgtgggccaggcaggtggatgtggtggggcaggcttgcaagccgaagatatatcacagggttccagacgcatacaaccccagtgttgtggcccacggggaacgggcagaatgggcacctgaggagttcttcctgtaacccccattctgaaagggtttgtaatcctccggaaaaaccccaattatgatctctaagtgaccaccaaggggctctgaaatgtgcaggctgattgtaatcaggcacggccattgccatccctgtggcccagggttgggaccacgggtctgcagactttctggggggaatgtgtcggctccatgctcttgtgtcaactgagtgagatcacggttgtccaatagaggactttttattccccaaaaaaaaaaataaaacacaagaaacacatttttggggcgcttcggaccctcaaaaaaatttcataaaccacttcgttgagcgccgcgggcccccagacggaccggagaccagggccacgcggtccctagggaaaccggacaaggaaagtgggtgggttccccccaatgaaaacgccggcgggaacgaggtgtgggaacaaatccaggggaccgcggccacacggatctacacgggagcacgggcgatttaaaccagcccatgggaaagccacgctcaacaaccagcacacgacacagagcgaagagagcgacacgcgcacgacaacgcgcagcacgcacgaacgacaaactaagcgagcaatgcacacgactacaacagccgcagatacactgagacacagcgtgcacacagtacgatcgacgc

SEQ ID NO: 532274 - DNA, 163 bp, Homo sapiens
aataaggactcacaaggatgaccatataatttaccatctaaatgggggtgatggtggaaatgaagggcaaggctatggttaatgccagcacagcaggcgtaatcagtactggcacatgtaaagtggggatgcaacgttttctccagaatgtagagggagagag

SEQ ID NO: 532275 - DNA, 431 bp, Homo sapiens
caaaaagggaaaagaaaatatcctcccgggccagaaaggcaagcctttttcggttgggcaattggtcaaccgccagtggaaggtgcccccttaaaacctgattttaattggaaaagaactaaaccctgggtgtggaaaaaaaattcccctggaaaaggtcctcctggttggggcaaaaaaattcaccctgcttgggaaacccccccccggaaaggattttgtttgagtaaaaacccccgtcctttaaaaaaaaaaatcctggcccagcatcctttttaaattccgggaaaggaaaaacttcaaaaaaaaaaaaattgttccgaccccccaaactgtcccccggaaaaaaaacattgaaatgccccgggtttgttgtgattacccagttaaaccttcccaaaggacgaaaaaaaacccccgcctccccgggg

SEQ ID NO: 532276 - DNA, 890 bp, Homo sapiens
  misc_feature (870)..(870): n is a, c, g, or t
gataatcacgattgcttttcaagaaaagcttttaatcccagtttctattcgcaatggatgttttggagacattgagggtgggagctttttggcgccaaccaatcgagggtcagcgaggagtgaggaggagcggctcatgttggctattgtttgctctggagacgtgcatccggcccgggtacttgtgatcggtaggagagccgggatcgtcactttccgtgcgaccctctgcgggtagggactagtgctagaggggctagggcggggagcacaggcacgcgtccagctgcgcacgcaccttagcagaaagccggtgtcaggcctcgagccggggcccacctggagccctcagcctgcgccaccacgcccgccagcgcccggatatggcgcccccggctcagaagggccgggctccggtcatccccagtccagtcgcggccactgaccctgtgagatcagccctccccctccccaccttcccgtcgacaggccagccgcagggcccgaagccgcacccactcgcgtctgctagcagccgctcttgtcctgcagggtacggctcgcgggagtgcttggttaccaatggtgaagctggcagccaaatgcatcctggcagatactcgctgagcactactacgtcagagtcaccgtgcaaagtgcagtgggcctgcaagcatgagtcagttgcactgcaaggaagaactaagatgcgtgtgatacgttctaacacagcgtacacaaagcgaatgccctttgtgtgccagatgcggggaaatgcctcacaggcacaggctgctacttgttctggttcacggagaagaaagaaaacaacatttgacattgatctgtattttgtttactgttaaatanactcgaggtactatatagtg

SEQ ID NO: 532277 - DNA, 1026 bp, Homo sapiens
taaaggcaaggaaattattttattggctgaaataggtataacactggaaataaaaattaaccaaatgtaagtagtctccttccatgaaacagcagagtaagagataacacgtgttcggaagtctctgaaccatgtgatctgatgactctggaagacatgacctgtcaggtgcgagacatgcagtctggaatatactacagacgaaggggcacgaacactggacaggaaacaacagcacctaaagctataatcacccagatccaaactgaacgaaagcaccaaaggccacgcacaacagcaaccacaaagacagcaaataaagcgaccatcacagcaaccaacagtgacagcaacaaaacaaagcagacaccaacggaataagcaccgaacgcacgcaaacaccaacccacaaaaccaacacaaagacacacagacacgcaacacaacacacaaacaaccacacaaacacaacaaacaacgcaggtaaacctcacacagcaaagaccaagaaaaaacaaaaaccaacatgacacgaacaccgcaaaaacaaagaagaaccaagcccacccagcaacaaaagcagacaccacaagaacagcgcacaagtcaacacgaccaaccagcacaaacagacacgaggccgaagacaaacaagcacaaagacacaacgaacgaacaaaacaagaaggacaaccgaacgacaagcacccagacacaaaacaaacaacacaacacaaggagaaggaaacaaacacaaaacaagcaagacacaaacacaccggaacaaagaccggagggaaggacacaccgaaatggagaagcgctgcgctcagacacgacgagcaacaagcacgaatagagcaagaagccagcaccaccaacggaggcaccacagcgaagaaccggcagcaacgagcacgcaaccagggcgagcagagcacagagaagaaacagacagatagaccggcgacaggagcaacacagagaaaaggaaaaaaacatcccccggatggtgctattgctcga

SEQ ID NO: 532278 - DNA, 112 bp, Homo sapiens
tgtgtaatgcccgccactacacagggcaggtcaaatattcactagattaaaagtaagagacagcttgaaccctacgtggagccattcatacatggacccataattaaggaca

SEQ ID NO: 532279 - DNA, 463 bp, Homo sapiens
  misc_feature (195)..(195): n is a, c, g, or t
  misc_feature (210)..(210): n is a, c, g, or t
  misc_feature (263)..(263): n is a, c, g, or t
  misc_feature (379)..(379): n is a, c, g, or t
  misc_feature (452)..(452): n is a, c, g, or t
  misc_feature (454)..(454): n is a, c, g, or t
ccgcctcctaaaacctagtggatcccccccgggctgcaggaaatttcggccaccgagagatccttaagaggttcctttaaccagaaagttcctgccctacccttttcctccccttcatccttacacgaattaaattggatagccataaaaattcaagttaaaaaacataacattcggtccggtatggtggctcanacctgtaatcccaanactttgggaggccgaggcagacagatcacttgagctcaggagttcaaggccancctgggcaacatggtgaaaccctgtctctacaaaaaatataaaaattagctgggtatgatggtgtgtgcctgtagtcccagctccttgggtagttgatgtgggagtattgtttgancctcggaggtcgaggctgaggtgagccatgaccatacccaccacactccagccagtctgggcacagagtgagngnggtgtctca

SEQ ID NO: 532280 - DNA, 321 bp, Homo sapiens
attctttatagaacgttctgtcaggagccagtcgtcttgtcaagcagctgatatggccacctactcttactttgcaccgatatactgtttgccagtagtgaatgaaggtggactacttggagacatcaaaagctaagtttccaggagcactgaggtagcaatgctgtagaaacctcacatgtaaacagtgtaccttaaactgagcatcctttattttcccccatggacctcactttccaatgactagcaagcctgaagaggccaacatggtgccagacttggcgccctgccaggaccaaggggcatgtgcactctccagtg

SEQ ID NO: 532281 - DNA, 959 bp, Homo sapiens
  misc_feature (1)..(1): n is a, c, g, or t
  misc_feature (93)..(93): n is a, c, g, or t
  misc_feature (116)..(117): n is a, c, g, or t
  misc_feature (125)..(125): n is a, c, g, or t
  misc_feature (227)..(228): n is a, c, g, or t
  misc_feature (262)..(262): n is a, c, g, or t
  misc_feature (294)..(294): n is a, c, g, or t
  misc_feature (304)..(304): n is a, c, g, or t
  misc_feature (330)..(330): n is a, c, g, or t
  misc_feature (343)..(344): n is a, c, g, or t
  misc_feature (347)..(347): n is a, c, g, or t
  misc_feature (350)..(350): n is a, c, g, or t
  misc_feature (352)..(352): n is a, c, g, or t
  misc_feature (355)..(356): n is a, c, g, or t
  misc_feature (358)..(358): n is a, c, g, or t
  misc_feature (369)..(369): n is a, c, g, or t
  misc_feature (398)..(398): n is a, c, g, or t
  misc_feature (402)..(402): n is a, c, g, or t
  misc_feature (411)..(411): n is a, c, g, or t
  misc_feature (440)..(440): n is a, c, g, or t
  misc_feature (454)..(455): n is a, c, g, or t
  misc_feature (494)..(494): n is a, c, g, or t
  misc_feature (505)..(505): n is a, c, g, or t
  misc_feature (515)..(515): n is a, c, g, or t
  misc_feature (518)..(521): n is a, c, g, or t
  misc_feature (523)..(524): n is a, c, g, or t
  misc_feature (537)..(537): n is a, c, g, or t
  misc_feature (578)..(578): n is a, c, g, or t
  misc_feature (623)..(623): n is a, c, g, or t
  misc_feature (952)..(952): n is a, c, g, or t
ngaaagccttcagggttcagttgtatgtcatgtaacgaggagtagcactgaatttggcataagacttaatgaccttatttacagcttccaagnaatccttctcggtagcaattttnngccgtgcnctgatggcaaacataccagcctctgtgcagacgcttctaatctcagcaccagtgctatttggacacagtcgtgctaacagttcaaatctgatatctctttcnncactcattgaacgagcgtgaatcttaaatatgtnggtccgcccctctagatcgggcaagccaaatncccttccccnctccaatctccctggcctcatcagtnctgggtcgaaagnntcnggncngtnngnggggatgggcnctttaatattgcctcgggggtcaaaaccntcangctgattgntcagttccaacattgttctctgcacttgnttgtgacctccagnnccatcatcaaaacgggcccctccaatagcatcaatttcntcaaggagggngggggggggnttnnnngnnctgggcatttcanagggttcacgaaccattcgagccccctcaccgacgtatttntgttcaagctcagatccaataactcgaatgaggcacgcatcagtncgattagcaactgcccgcgcacagagtgtcttgcctgtaccgggtggaccaaagagcagcacgcccttgggaggctcaatgccaaggttcacaaacctctctggatgaagtaatggggtttcaactacttctcgcagtttctcaatctgttccttacagccaccaacatcactgtatgtgacatcaggtttctcttccacctgcatcatggtaactgttgggtcaatcttaggaggcaatggaatgtgaatttgatatttattctatccacgcccactctcatcccttcttcaatgtcagtaggtgccactgatcactaaggtcaccanaaactgg

SEQ ID NO: 532282 - DNA, 285 bp, Homo sapiens
  misc_feature (1)..(1): n is a, c, g, or t
nctggcggctgggattggaggtggacacaaggaggaggcagcagacagctacttcagcgtactcaacgcattcatcgacaggaaggacaggtactactccattcaccagataagtgggaagctgcagaatgtggcagggcccacccgggctgtctggagagggtggagtggtcggtttccccttcagaagttttctggtgtcgggggatgttggagcaggagggtgtaaacctttaaacactgaactctgaccatcttgtcgctggttgtcacatcaaccccggg

SEQ ID NO: 532283 - DNA, 565 bp, Homo sapiens
  misc_feature (434)..(434): n is a, c, g, or t
  misc_feature (544)..(544): n is a, c, g, or t
gtgtggtacctggtgcatgcactgcggctgcccatcccgctggccaggcactttggggtggtgaccgcccgttaccgctgggtggctggggtctacctgctgctcggattcctgctgctgcccctggcggccttcgggctctccctggcagggggcatggtgctggccgctgtcgggggtcccctggtggggctggtgctcctcgtcatcctggttatggtcctgcagcggccccggccggcctggctgcctgtccgcctgcgctcctgggcctggctccccgtctggctccattctctggagccctgggaccgcctggtgacccgctgctgcccctgcaacgtttgcagccccccgaaggccaccaccaaagaggcctactgctacgagaaccctgagatcttggcctcccagcagttgtgacgggcagttgntgcgcagaccgccccaccctccccggctgggagggctctggagggccctggagggggggtccccgcggcagctgacctccggtcacctgcttccccttctgtgaaaattnaccaggctgttatctggaaaa

SEQ ID NO: 532284 - DNA, 512 bp, Homo sapiens
attattctcattacataataataaaaaacttttaccattattttttctcaaaaaaacaaaaatcaagaaactcttgaaaaaatttaaaaaagtaaccccaatccccccttaaaacattaaattaaagctattacaaccaaatttacattaactaaaacatatttcaaaactattacaaattaaccactcataacccccaacaacaatatccacacaaaaaaaaataaactgcgatcaatggattatacaaaatcaaaaaaaccatacatttaatcctataaaaacaaataattctttaaaccctccttaacatttccccaacatatccaatatttccaaaaatctagctccttcaatttcaaaattttcttaactctacaaacccattataattttctacaaacaaccctatttctacttaaatacgcttattcacataaatcctttctctcgccaattctatttttagcctattataaaacatttactatcttcccaaacatgaatgtctc

SEQ ID NO: 532285 - DNA, 382 bp, Homo sapiens
  misc_feature (290)..(290): n is a, c, g, or t
gtgggtgcagcccagggagggcaagccaaagcagcgcaggacattgcctcacctgggaagcgcaaggatctgggggatttccctttcctagccaagggaagccatgacagactgtaccaggaaaattgggacactgccacccaaatactatgctttcccaacagtcttagcaaacagcacaccaggagattatatcccgcacttggctcagcaggccccacacccacagagccttgctcactgctagcgcacagtccaagatcgaactgcaaggagacagcctgacttgngggaggagcgtctgccattgctgaggcttggagtagattaaaaaaagcaaccagggaagctcaaactggggttggagcccacccgcagctca

SEQ ID NO: 532286 - DNA, 116 bp, Homo sapiens
cactgatgcagatcaggaacaaggcaggcttctggcatatggatatggtttctttctcaaccgtcgccaaattcatgaatcaacctgtcaatgtcgagactcatgtgattgcttca

SEQ ID NO: 532287 - DNA, 241 bp, Homo sapiens
gcagcttaccgaggcagtcgttctcataatcgcccacggacttacatcctcattactatatctgactagcaaactctaacactacgaacgcactcacagtcgcatcataatcctctctcaaggacttcaacactctgctccacactaatagacttacgatgacctctagcaagcctcgctaacctcgccgtatttacaccaaccccgccgctagggatctgagccgtaaggccgactcctg

SEQ ID NO: 532288 - DNA, 350 bp, Homo sapiens
  misc_feature (147)..(147): n is a, c, g, or t
  misc_feature (207)..(207): n is a, c, g, or t
  misc_feature (215)..(215): n is a, c, g, or t
gcgcgctcaagacatggagctgatcacaaatgtcaccgagtatgagaagctcgccaaggagaagctgccgaagatggtgtacgactactatgcctccggcgcagaagatcagtggacgctcatggagaacagggaggccttctccanaattctgtttcgaccacggatactgatggacgtctcccatattgacatggccacaaacgnctgggctncaacattaccgcgcatatcgagagcgctctttcacccgtgcaaaaaagggctcatcctgatggagagcttgctacggaaagagcaaccctctgtgcgagaacaatagagacattgtcctaagggtctacttccag

SEQ ID NO: 532289 - DNA, 109 bp, Homo sapiens
gtattcaaattcaattgagcaggtgctaaaaacaaccccaatgtgctcctttaactccttgtttaaatgacaacagttagaatgtggtcactagaacctactgtgccct

SEQ ID NO: 532290 - DNA, 826 bp, Homo sapiens
  misc_feature (243)..(243): n is a, c, g, or t
agcaaccctctaaaagcagtttagagtggtaaaaaaaaaaaaaaaacacaccaaacgctcgcagccacaaaaggggatgaaatttcttctgggacatcctccggcttctcccgttactgatcgtctgctccctagagtccttcgtgaagcttttgattcctaaagaggagaaaatcagtcaccgggcgaaatcgtggctggattacagggagctggggcatgggaattggggagactggactncgctatgaattggctaaacttaaaagcaagctgggttctctggggatataaataagcatgggactgggaggaaacagctggccaaatggcaaggggactggggtggccaagggttcatacctttggtgggtagactggcagcaaccggagaagatatttacagctctgcaaagaaggtgaaggcagaaatgggagatgttagtattgtagtaaataaggctgggggtagtctatacatcagattggttggctacacaagatcctcagatggaaaagactttggaagttaaggtactggcacatttctgggactacaaagggcatttacttcctggcaatggacgaagaataaccatgggccatattggtccactggtgggcttcggcagctgggacatggtctcggtccccttcttactgggcttactggttcaagcaagttggctgctgtgggattccataaacactttgacagatgaactgggctgccttacaaataactggcagtcaaaacaacatgtctgggtcctaatttcgtaaacacggggttcatcaagaaatccaagtacaagttggggaccca

SEQ ID NO: 532291 - DNA, 1357 bp, Homo sapiens
  misc_feature (194)..(194): n is a, c, g, or t
  misc_feature (386)..(386): n is a, c, g, or t
ggttttctctgcgctgtgtgcgttttccctcctcccccggccctcaggttccatggacacacatggtccgtattagtgggcagctagtgcctgcagcagcacttgggccttttgcatggcaggggaggcagctagcaccaggacatcctgcaagacagagctaagccccgcaatgtctggatcttgagtcccantggacggcattctctactgtgctagttcagacatgcgagactgtcttgtccgtgtaaccaagacatatagactcaccgttcgcaatttcacagcacagttccttcggactgtcgcattcaaaaggacagccgaaagaccaattgaaccggcacaatgagagactatctcttgcatgcacagcctgcacggtntgctagcgtgtgtggcggcaccgtagtacgtgttctctctgcctatgcgaaagcgcagatgcgtgggtattagcgtgggcgccctgtcacagcaaaagagtcccttcagggcaattcgtcccttcaaggacatgtcacctgtactccccttgaggcacgtggctgcggtgccaaagttaccacacgttttgcgaaaaccaccccgttgccagttggcgacggttggtgcatttccacattggcggaccttgagcgataaacgggggcggattaataaaggaggtgcgctcggcggcgcacttcccccgtgttccggcctggaagaatcttcgcggcccattatggtggcgattatgcattcggtcgcacctgtttgtcgcggattctcatgggggtccccacagggggttccccggcctcttccgccgaaaaaaccaataactaagagaggccataacaccgggggctcggtggaagttccgcccccttttatcgttccccctgggttgtggcgaccaaagggaaacttcctcccggtggcaacttctggtgattccggggaaaaagcgaaaaaagtaacaacctgagggaggggagcgtttctacctggttgccagaccactggcgacgcaaaacgagtttatccacagggacactccttctagagggagacgacttttttgcgcgcccgcccgttgtcggggacgataaatagggcggccgagttaaaactttaggcgtgaagcattcggacatccgcacctgtttggcgtgcgaccaaaacaagcgccgcccgaggataagcgcacgccttaaaggtagaactcttgggaaacccccgcgattatgcccctattggaaaaccgcaccacaagcagtgggtttttctggtgggaagctcttggtacagcccaaatcattattcgggggtggggaaaatatgcggttccggttagcgtttatgacccccc

SEQ ID NO: 532292 - DNA, 207 bp, Homo sapiens
atcgcgagtcatacgtcgcgtctctcaaggcactatcagatcctcactcccagctaatagctgttgtggatgacgtcatagcaagccatcgcttgacctcgcctttaccccccactattaacctactggaagaacgctctgtgctagtaaccatcgttcatccctgaatcaaatatcactctcctagttacaggactcatcatacta

SEQ ID NO: 532293 - DNA, 355 bp, Homo sapiens
gaggtggttactagacgatccccttgtgtgtctcatattaaggtaacagctctaacgactcctgcagcaacttaaatgtaactggctaccctaggctcgggcttagaactatgtaaagaagccaaggagtacagatctagatagcagagaagtccgtactcattctaaaacattgcaactacggtaagagtccaccccatgaagctagtaacagatagtagtaatactttgactgaatactataagtatatatggtacagactaaaaacaaatgtggcaagctcggtgggctgtgctgacccagtaggacattgacagactccagcttccaccctctggagaccttggacctaag

SEQ ID NO: 532294 - DNA, 442 bp, Homo sapiens
tgtagcctgttttctcatctttgtaaaagttcataattgtacagagttactctggtaactgagatcagatgcataggtagcgtttatgaatgaccagaacactaacggtgtagatcacggtgctgtttacccttccccttgtacagccagacggcacttgaaaacaacaattcctcccgctcctccaaccctcttgaaagactacctggaaagtgtgtatcttcgtccttatcatgatcttcattggtcactctcagaggaatgtgatggaagcttctctggtttgtattctgcttcggggtatcgtgtcgatatgtctccagaatattgtccatactttgttgttcaccacatgccactggcaactataagatttagaagcctccttaagcagtaaattttctgccttgtgctctgtctcttcaggtactgtatcatacaa

SEQ ID NO: 532295 - DNA, 405 bp, Homo sapiens
gcagtgcttttctctctcccatgtctagcctccaaaagttaagtgaaaattagtcaactgcacgtggaagcccccaccactttggggatctctttatttcttttcagccagggacctgtccactccctttgaattaatatgggaagaaattaatacaggatgaactggagagaagggttgagtgtggcatactttctgaaacctggagctgggaattgcgggaaggggaaggtctagactagtacattcacatagggattacttttaatcaagtccttttaagttttgttgaccgcccaccggaaccaaaccttgccttggggttgaaaattcccttgccgtggtccacccccccctaatccctgcttccaaggcaggtgttgttaatctatcatagcacttaaa

SEQ ID NO: 532296 - DNA, 247 bp, Homo sapiens
  misc_feature (61)..(61): n is a, c, g, or t
  misc_feature (103)..(103): n is a, c, g, or t
  misc_feature (119)..(119): n is a, c, g, or t
  misc_feature (152)..(152): n is a, c, g, or t
  misc_feature (169)..(170): n is a, c, g, or t
  misc_feature (183)..(183): n is a, c, g, or t
  misc_feature (185)..(185): n is a, c, g, or t
  misc_feature (197)..(197): n is a, c, g, or t
  misc_feature (215)..(215): n is a, c, g, or t
  misc_feature (218)..(218): n is a, c, g, or t
acgtgcagtaaatacagtattcaagcagtcactatttctatgtacatgctcattaattctncaaaaaacccacaaaattatcaaatagatcaaaatactgtcntgtgtttccacacttntatattcagaaaaaccagctgataatttacaantgtcataaagttcccanntttcacaattacnanaaaggataaaantgaaattggggtatcatnttngttgcaatttatagcaactttacccatac

SEQ ID NO: 532297 - DNA, 1039 bp, Homo sapiens
taaaacccccccccacacaaagagaggggagaccacaccaaaaaagagcgcaccaccccccctctcccaaaagagcgcgcgcaaataccgggggggggggcacaaccccacacagagggagggggggggggaaagagggaaaatatgggggggcggggagaacccaacagggggagagagaaatggcgcgcgccacaaaaagggggagagaaacacgggggagacccgggggggaaaacaaaaggggggcgccccaaaacggcgccgggagaaagcggggaggagagggagaacaccacaaaaaaccgcgcgcggagggcgggagagaggagggcgagcaaaaaacacaaccacccacaaacacggaggagaaagcgcaacccgcgcgcgccaaaacaacacaagaggagagcacgcggcgggagcccacatatacacacacacgagaggggggagagacccgcgggagagtagagagagacacagcgcgcggcggagagggagggaaaacaacgcgagagaggtgtcatctacagagagaggagaggagacaccaccgaggcgcgcgcactcatcggagcggagaaaaaaccgcgcaggagtgcagggcgacgagccacgacagcgcccgccccccacccacgacagacgcgggggcgagcaggatgagggcgcatcacacaccgagtgagaaaagcaagtggggctaaccaacagagagccacaccaccaaacaaacacaacccggctggcggcggacacaaaaacaaaaaaacaaccaagatgtgagggcgagcaccacaaaacaacagaggagagcatctatacccacaccgcacatgcgaagagagcacagcgcccttcgatataatgagaaacacagcacgacggtgagcaatatgatgagatgaaggagacccacccgagagaaagaaaatgagaggtgcaacacactacggcgggggaagaactcaacggccccggccgctcgccctcccccgggagagggagcaagaagagaatgaaagcaagaagagta

SEQ ID NO: 532298 - DNA, 314 bp, Homo sapiens
aaaaccctagtccagacgcaatggggcactttacagaggaggacaaggctacgagcacaagcgggggggagcaaggagaatgcggaagatgctggaggagaaacccggggaaggcacctgggaggcaacccaaggacccagaggatcaatgacagccgaggcaacctggccactgccactgccaacatgggcaaccccaaaggcaaggcacatggcaagaaggagccgactaccctgggagaagccataaagcacccggaagacctcaagggcacctggcccagctgagagaactgcacctgagacaagcagca

SEQ ID NO: 532299 - DNA, 137 bp, Homo sapiens
taatcctgacctcgtgtgttcagtgattctcctgctcagctcctgagtagcttggattacagcagccggcaccatgccgagctaatttttgtattgtatataaagatggggtttcgccctgttggccaggctggtct

SEQ ID NO: 532300 - DNA, 227 bp, Homo sapiens
ccctaggtagagaagacgagatgatattatttacgggggaaggcgctttgtgaagtatgccttatttctcttgtcctttcgtacagcgaggaatttgtagtaatttgaaatccgacctggcattactccgagtctgaactcatgatcacgtatggattttaatcagttgaacaaacgaagcctttaatatgcggctgcaccatcggagatgtcctgtatccaagcat

SEQ ID NO: 532301 - DNA, 105 bp, Homo sapiens
cttaacgctgtataatagtcttttttaatagaaacatgtgttggaatggatcaatgtccattggaggaagcttcttgtctgaatccgaaggcacagctgtgtctg

SEQ ID NO: 532302 - DNA, 415 bp, Homo sapiens
tccttttactgcgcggtggtctggcgtcggggttgataagcccaggctggcgtcgtatccgttgcggtacatgcgtggtgtagctgacgcgttcgcgcggggtgatctcgcccacgaggtttgggtctaccgccaggatcgggttgccgagcagttggttaatgggcggtttttgccgccttttgcaagtaactgtcgaagtcgggaaactgttgcgggcttcccgggcttgcggcgtaggcctgtgcggcgccctgtgcctgttccttgaggtcggcgagtttctgtcggtcggctgccgatgcctggctggtggaaatgagcaccacgacgctggccatgcaggccgatgaatacctgcatcagatgcccaagaacctgcattaccacacctacgacaaaaagctgcgtcacc

SEQ ID NO: 532303 - DNA, 431 bp, Homo sapiens
aatggtggatgcacagtgacccatgtcggcctgaatgtcctctatggtccagacctccccagtatttacccttcatgcagcctattggcggacaggagaaaacctctacttgtcctgcggcgcggaatctagcccaccggcagagtatggggggacaattaatgggatgtttcggcaatcaggacgaaagctctctatcccccaaattactacaaagcgtagagggctctatacttgctcttgttcgtagctcagccactggcaaggaaggctccggatccgtgacatgtcgatggctctggtccttcaggaataggacgtcttcctctccttaatccactatagcagccgtggggtcataacgtgtatttcagggcagactggcaggacagttgctattgattcttcctcaaactacttacagagcgagc

SEQ ID NO: 532304 - DNA, 350 bp, Homo sapiens
atccagcgattacgggacttacctggcagagcattctcgtggtgctctggtgctgtaggtgccctggtctgctggagcacaggtgaacggggcgaagctagtggctgctggtcctgctgtcctgctggtctcggggaagccctggtgaacgtggtgaggtcggtcctgcttggcgccaaatggatttgctggtcctgctaggtagctagctggtcaacctggtgctaaacggcgaccgcaggcagccaaagggcctaaggtttgaaacagggttgtacgtaggtcccacaggccccgtatggagctgctggtccagatggtccaaactggtccccccggtacctgctagg

SEQ ID NO: 532305 - DNA, 1590 bp, Homo sapiens
caaccttttcctccgaaccgccttaagaacccccctcctaatactaactacctgactcctaccccgtcacaatcagtggcaagccaacgccagcttatccagtgaaccagctatcacgaagaaaaactctacctctctagtacgtaagtctcccgtacacaagtctccctgtaagttactacacactctcacacgcccaacagcaaccctacacgtcagtactcctctagtacctcttctctcgcaaccaccccacacctctactcgcccaagccattgcgactcatcactcaacaccgcactgcacgcgccaacccacgcccacgcacacgtccatgcaaaccgcccagcgtccaccactacctctccccttactctcctaacaccccccctagcctcagggccctcaccctatccacccctaacgtcgaatccgccaaccatgcaccctctccaaacatccctccgaaccacaccccagcccccttacgcgccgctccacccataaacaacgactctccctagcgtcaccgctcaccccttccctccacatgaccccccacacgcaacaccttaatccacaacacccctccccctgcaaccccccaacacccacacccctctaccaccctacccttgcaacccttaacgccacctatcaaccaccaaaacctacgccccctctcaacctacctaccgccctcacacacacgcaacctaaccgcccatcccactcctactcaacccagcaggaacccctcccccaactcctttctaacttggacaccgcataccccgccccttaacacacatcgcccactccaaccttgccttgcggagccgaccggccctccgccgcccccgtacattcccggccctcctcggcggtgggtcgttcccgcgccgcctcaagcgccttcaccccctgcctgggcccccccggacataacggacttcacatcccttcccactcctccaccacacaaaccgggtttacggacggccccggggggccccgttaacgttgcggtactacacacttcaacccccataacacccggtccccacaaattccacaggccgaacctctgttccgcaaaatttgttcccgatcgccagaacgtccgcatcccccagcccaatggctgaagcccaacacagaacgaagccaacgcggaactctaaacggccaccaccgccatcaacagccaccgagcctcccgtgttgcatcccccacctatgttggcaactttagacgcagtttaacctgtccatccccctctttaaactcgtgtcgcacagggtggcgcccacagttaaagacaccattgcctaacgttttacgcaccccacataaaccgcagcccgatcccccccgaaccttcccaggtagggacgcccatttagagcacgaacaaaccccaggcagcacgcgcatagggagaaagcccccgttttaacggacgacacacgctttgccggggccgattcccagaagctttctagggaccacaagtttatacgcgttgcgatgtcgtacagcaagacagttccacaagcgtggcgccaaaagcataagctataaaggg

SEQ ID NO: 532306 - DNA, 376 bp, Homo sapiens
atagttttagaagttcaatagcatatcatattatatctcgtagcaagctcaggaaaggattcagatataaaattgtacttctaactatgcattgaataaatatttgcacgtatcttcactttgttctctataattattcacatggtgtcattactccaattagtattttaatgtatgataaatgataatatggggggggcaaatatagtgaagtacccttaaaaatacgaacgctagttagaaatgtatactaaaactaagagtaccattgaaaccttctaaaacatatcagttgtgatgagaaaatctcaagatatctacttagaggtggttgggcgtatgaactacgtttaatggtggtacctgtcctcatcct

SEQ ID NO: 532307 - DNA, 136 bp, Homo sapiens
acctcacagttgaaggacttgcttttcctaattcaggaagttctcttatagctcaggtatgaaacttccaggacacttagattagaaccacaagagtttacccccaagagaagagtgaggctgaggagagcaatgg

SEQ ID NO: 532308 - DNA, 846 bp, Homo sapiens
ggtttcttggtagtaattagggctttccggtccgtatctagtttttggggggccccgttttgcgccggtgtgggctggtcctcccctgttggcggttgcgtgagtggccccccggctgtggtcaccacgtgtgtttcgcggcccaagaacaggcgttcccccgggtgccacaaggtgggcggcgcccgccccgcatgggtgtcaactacagcgggaagtagtgtctgccttgggggggtcccacattatcggggggggccccagcgttgtggtttttgtacgcgccgcggggttgttcgcccgttgtactgttcgcacacgtggcgacggcagaagcagttccgccccccgcgtgctgggaagcagaggggtcgcggagcaccggccaggtctggttcgtctgtcgcgcaattatggaggggtgtgcaccccagtgagtgaaggtgttgcgcacgggccactttcctcagcccacgttggtgcctctccttgcccgcgggaattgtgagtgctccgagccgtgcggatctttgtggggttctccaccagggggtcaatatgtatatggggatgaaccacggggggttcgaccccgccgtctggtgacgtcggcgggggcgagactcattccgcacggtgttctttggcggggaactcacgttgtggcggggccgccgtgccctagctgttgtttgtctgtcccgcgtcccgtccggcggagggtgagagtgttgtcgtgtctccccgcctcccccggcttgtctggtggaagacgacgtgctctttttgggcccacgtgcgtgggcacgtttccatacagatttacaggggacaacccacaaaaca

SEQ ID NO: 532309 - DNA, 375 bp, Homo sapiens
  misc_feature (350)..(350): n is a, c, g, or t
  misc_feature (359)..(359): n is a, c, g, or t
acagactgtggcaatcccaaagttcaaaaaacaaagtcatgctcacacaattgtagtttgagctacaaataaaattgattgtaggccagtggtgccttagcacagagtccagggggcatgtgtctatataacaatgtagaccagtatctgccaaatgtgttcacagacccaagtctttgaggacacctctacaggcaaagagcctgtgtccagatggttctgggggatggccatatgctgtctgctcccctaaggaaaccgcattgccaaatgacgatttaacagcccttaggaatcccaggagcactgaggtcctgaggcaatccagcttttttcccaaataaatgtanttttgaccntggggggacttttttt

SEQ ID NO: 532310 - DNA, 1003 bp, Homo sapiens
gatctctctcgggtgagagtcttctgacacgtatgttgcgtctgcccgagaatcatcctcctgaagctcaatcatgtgctttgtgaatctggtcgcttcagacaaacctgaatctcagaacctggtgattgccttctgactgcgatgcgaggtgcctccatctcgctaagagcctctcgtgctgagacctgggcgacagacggcagcaatctgtgcctgcatttcactccgtcgctttcgacgcccacggagatgccatgaccactccgtgttgcttttccgcccaggtccggcgggtaccttggggggcaccggagccgcgggttcggcttgccttgtcccttccgtcctggtcctgttcttcgccagtaggtgtggttgcattctgctttcgagccaggcccactcctgtagccggccaagagctggcacgactactgtgatacaaggttcatggttcccccatgcaggcatcatccctgggggctcaattaccctaagattggcaagattgacggcagactttcaagaagcaaaattgtgtcgcccgtaggacatgagaatcagcgcatgcccattgggccccagttaacaggagaggtgtccctctttgcttcccttgatggaaagaaaaaagagaaactcattccattgctttggcgacgactctaggacaaacgataagttctatgcaccagttctgttggaggcgacgaccctctcacgtaacgggaagcgcgttcccttggcgtctccgcgacgcgccgggtctcacagggccggcactcactctgtaccttgcaccgcggcagtgcccttataattacaaagcgggcgtatccactgttttgttgccgtctaaggcgtcattattcccgcgcgcgcgtgcttccccttgcgagtccgccgagttcccgtttgtgagttggggcgtctgcaccatcgcgcggatattatctgtgacccgccaggtatcgcgtgctgatctctacactctttgtgc

SEQ ID NO: 532311 - DNA, 164 bp, Homo sapiens
gttagaataatacttctggagatcatgtcttaaagtagatagctgtaagcataaacatattaatgaccacgtcctatattctggatacatgtgtctgcttgtctttagctagttagttactagtggaaactagtgaataggtaaaagcaacatgaaatatagca

SEQ ID NO: 532312 - DNA, 237 bp, Homo sapiens
gagtctgtgggatcagctgatactttctgatgatcagagtcaattctgctgatgacaagagtacaagttcagggtaatgagggacttggaggtggagaggcctgattcaggtgaagtggtccaggtctgcaggagacccaaaggtcagtgggatgactctttctcttggaggcatggtgctggcacatggtgtgccattagtgcaggctgcagggttggtcggagggcgctcgatgg

SEQ ID NO: 532313 - DNA, 128 bp, Homo sapiens
  misc_feature (20)..(20): n is a, c, g, or t
attcagcaaatctcatgtcncatcaaaaagtcacatctccaattcagccacagtccctggaccctttcccgttaaacattcatacaaaaacatattcacctttttccttcagatagggataacacatt

SEQ ID NO: 532314 - DNA, 123 bp, Homo sapiens
ccggttgcagtgagccgagatcgtgtcattacactccagcctgggcaacaagagtgaaactctgcctcaaaaaaagaaaaattcctggaggacagagttcacgtcatatcttttatttcatta

SEQ ID NO: 532315 - DNA, 107 bp, Homo sapiens
cgtcgagccgcagcaactcggcgatttcatccaggctgaagcccggcggctgggccgatttcacgaatcgcacccgtgtcacgtccgccgcgccatagcggcgaatg

SEQ ID NO: 532316 - DNA, 644 bp, Homo sapiens
caggagtcggtgttctgcaggcatggactggaagtcgtagtacttttgaactgtagggacctaagacatcttttagtctaatccccttatctatccggaagaagaaatcatgattccaaggtgacatgagttgcttgctttaggtcacagtgatttcacattgggatacctcgatttctaatgagtaatagaatatttaataaatactctcgaatttggaattgctcctattccagtcacactggatattttcccaatttggtgaaactgatattttaacaactgttaaccattccatgtactaagatgcttatagtcaaactgtgcctcttaaacctatttttattgtgtatttaacaaattttgctataatgttaaaaacaacttataactcatcaaactgcattttaattttagtaaacacaaattacactgaaacgggagtgttccctggcccctctcacaggacgtgtgaccagggttcggttcgctgcctgtccaaaccccttacgggagggggatcacgcagagggacaggtgcaggagcccaagtgggtgtgtgctacagtgtgctcttttaagccttggcatctgtggatggcttgagtgttaactagctcagtgaccctcacctttctgccaaa

SEQ ID NO: 532317 - DNA, 272 bp, Homo sapiens
gtaccttggcgctctcaggcgtttcccatgaccagatgccagtcttgtgtcccaatgaagatactgatggatgctgggactgtcgtctcccttccaggaatgctgggcccccaggctggccagagaagaagactgtcaggaagggatcggagtctgtaaaaccagcatacaggttcggcttctatgttcacatctgtatcattctcttatatgaaataatatgaagatccctgcagtcttatggtgtaatgaaaaatcatacaaaacacagg

SEQ ID NO: 532318 - DNA, 240 bp, Homo sapiens
gatctcacaggtcccctctggcacgcaggtcaaggccactggggtcgggcaagcagggcaggcaaggcaggcaagggcagggcagggcaggcaacaagggcaaggcaagggcaggcaagtgcatggcatcaagagggcagtggcagcagcacaggcagtggcacagcaccacacaggcacaggcaagcgcgcagcgcaacagcacagcggcacagcacaggcgcagtgcgcagaggcaca

SEQ ID NO: 532319 - DNA, 198 bp, Homo sapiens
ccttgtgggggaggggtttggcccccccccccccccaaaaaagccttttccttttttccggggaattaggggcccggggggggaggcccccctcccccgggtttttgggttgggcgggggttttttggggggtccccggggggtttttttcccggccccccccctgggaattaaaccccccccgctttctttggggga

SEQ ID NO: 532320 - DNA, 711 bp, Homo sapiens
tctttcccctccctgccttcgggtcccgctttttctctctttcgtcgctctcattctttccctttcctccttgtctgcttctgactcccttcgatctcctctctccacctttccttctgggtgccctcacgctggcggtctcactggtggctctcccgttcctgtttcccttgtgatgttcttgcgcgcctgttgtagtgccctattcgtgtgttgcgggcccatactcgtgtcgttgctggtgcgtgttgctgctatgtcatcctgtcttgcctcgtctcagcgtgtgcacataggtgtctattttcatcatctgctttcctgcccctctcaatctctttcctgtgcggtgcatcactcctatccctcatgagttgtcttaatgagaccttagacggagattccagtgaaagcactttcttagatgccctttcttatcgacattgacttggtattactttctgacttccatgaaaacaaagtgcgggtggcaaataggccacggacatctatcctgagaactatgataaaccgcggaaactgtgggccattttttttttttttggctgggtagagaaatcacgataaaatcgcaggctgtctagcatggagatgactctcagaacaatgggagggtctcggcacttgatgggggattagctgcttggcagcctgccatgccactgagggaagtccattagagatgataac

SEQ ID NO: 532321 - DNA, 166 bp, Homo sapiens
aaaaaaccaacctgggttctgggggggacctttggttccttttcctccctacccccccccgcatggtccggggaaaaaaaattctatgccctttttggccctgtttttagaaaaggtcggaaattttttaccaaagattattattaattttgtgccggttttttga

SEQ ID NO: 532322 - DNA, 885 bp, Homo sapiens
ggccagagatccggtgtctgctcctgtcgccttcgtctcctaatccctagccactatgcgtgagtgcttctccatccactttggccagtgctggatgtccagattggcaatgcctgctggagagctctactgcctggaacacggtggatccagcaccgatggccagcatgccaagtgaccaagaccattgggggaggagatgactcctttcatagtaccttcttcagttgagactgggctgctggcaaggcaacgtgccccgggctgtgtgtgtagacttggaacccacatgtcattgatgaagttcgctactggcactctaccagcagcattcttccaccctgtatcacgctcatcacaggcaaggaagatgctgccaataactatgcccgaggtcatctacatccattggcaaggtgatcattgatcgcttgtgttggaccgcaatttcgcaagctggcgtgaccagttgcaccggtcttgcagggcttcttggttttccaacagctttggtgggggaacttggtgtctgggttcacctccctgctcatggaacgtctctcagttgattatggcatagaagtccccagctggagttctccatttacccccgcaaccccaggttgccacaaggctgtagttggagcctctacaaaattccattcgtcaacgagcgtaaatctaaccctgtgagcacttctggattgtggccttcattggttagacactcgagggccgtctactgaccatctgtgcagaaagccttcgataatcaagtcgcccaagctacaataacctgtaaacgcttattatccaaattgttgcctcatcgatggtcctgagatttgagggaaccgaatgtgactgaaaatccaaagacgtgcc

SEQ ID NO: 532323 - DNA, 850 bp, Homo sapiens
agggaagggaggaagggaaaccagaaagcagacaaagaaaaaagagctagcccaaaatcccaaatcaaaccaaaccaaacagaaagcagtggaggtgggggtcgctgttgattgaagatgtatataatatctccggtttataaaacctatttataacactttttacatatatgtacatagtatgtggctttttatgttgaccatcagcctcgtgttgagccttaaagaagtagctaaggaactttacatcctaacagtataatccagctcagtattcgtacgtagtagctgtttggttttacccagaaataagataactccatctcgcccctttccctttcatctgacaagaagatacctcccttccagttccactcattttagaaaaccaaagtgttgggtagaaaacccaaaatggtccaaaaagccctttttcttggtgggtggaacccaggtgcatccaaaagaaacaggcgtggcccggaaccttgtggttcacagctttcacggcgccaccccgggcataaaaatgggcccaatatgtgggaggcctttggcaaaaaaacacagggttttgtgggcattggggaatacatttggccctttaacagggtggcaggtctctttcggtcacacccatctttacacttgcacgcacatccggtggcccacccagtcttttggacacggggctctggggcattacccattccctttataatacgtatatcatttaaacagctccgtgggaattcccagttcacacattgtgcaccctcgagattacatgggcgcccgggacgacactctggggccatacacggcgtcaacggcgttggcacctgcagag

SEQ ID NO: 532324 - DNA, 823 bp, Homo sapiens
  misc_feature (7)..(7): n is a, c, g, or t
  misc_feature (9)..(9): n is a, c, g, or t
  misc_feature (14)..(15): n is a, c, g, or t
  misc_feature (74)..(74): n is a, c, g, or t
  misc_feature (144)..(144): n is a, c, g, or t
  misc_feature (801)..(801): n is a, c, g, or t
ccgcggnanccccnncgggctgggaaggaacttcgcgcaacgaggcgcgttataagtagagagaccgcgacggnagacacttgagagaaaaagcccaagtgtttttttatgcatcaacgcgggcccccgacagaaatacccccncgcaaggagtgagggaagacctggaaatcccgacggaaccacccaaagacggtgggccgagccatagaaagggacccgaggccttccggaatcggctgagaaaacgcggggccggggaaggaggacgggagaaacccctggcaacacaggagaggccaccccacgtccttcgcgaaccaaagggagccgggacgagggggggcccaacgaacaacgggcgcgcaagcggggggcggagacatagggcaacccaggccggaggcccaaaaaacaccccacacacgagccacgtaccccgcctgagggccgaaaacaccgaaccctccttgcaggaggcgcggccaaaagagaatccccccacgcgccggagtatagaagggaggaaggcaccaggcccaggcaaacccaatttatagaaaaggccaacaaaaccagacggaccaccccccaggagtcggaaataaaaggaaaaaaccaaaccggccgaagaccaggcaaccaacgaaataaaacacacgggggagggccgccacccgtggcgccgggacatgaaagacaggatcttcaacagggccctccgaaagcccaacacgcgcccacacgggacgccggccccaaaaggacacaaaccggcaccgccaccggcgaaggaccccnccggccacgcctgggccggccc

SEQ ID NO: 532325 - DNA, 799 bp, Homo sapiens
  misc_feature (616)..(616): n is a, c, g, or t
gggggcagagggtgtgcacaagggagccggaccgatgcgtgtcgattccctgaagcggccccgagtgccgggcccgcgccaacggcgtccgggtcagatcgtggacccgtcgtgtctcgctcgtgggtcgctcgcgggtagtggtgggtgagatgcccgtgcggccgtctgggggggctcggcgatactgcggatctgcaggctgggagtgtggactccaacgcacggtccgctcttgtctgcctttccgacatgtatgtcgtttcgcgcttcgcatcgcgggtagtgctgtaactcatcgctttttccatttgtcatcttgtgtcgtcctctgcgtggggttgttgggcactgagttggttgtagtccattagtggcagccatgcaagagattgggatagatccggcaacgtatgagtctgtagggctgacgaaatttctgccccagtgcaacgctccatatcggtgaagcgtatagtagcttatcatagagtagactttgtcctcgtcgcccgtttagacgtcagccttgacggacacctagtgatgcagacctagtcgaacggtggccgctcagcatttggtccgtctggagggcgggctagcatatcaagtnaaagtccaataatcagaagttgacttgttgttccgaacctttttaattcctcgacgcttaggaagtatacgtagacataattgggattcttaacaaacaattgggaaggaaccttgggaaacgcattgggggccgagaacagaattcacagcacctcgaaaggggtggaatggttccccttca

SEQ ID NO: 532326 - DNA, 904 bp, Homo sapiens
cgatgtgctttgtctcccagaggggaggtttgtgaaagttttttcctaaggaaatatgccccgtggacccccccacggttcggatttctctgaccggtgaccgccccatgagtgctttgtttagttacaaggttgccacaacgagtgtcctgaagggttgtcccaggaaaccttggaaaatctccggccacctgagtcccggaatgccatctggatgttatttaaagaaagaagtggctactttgttccaaatagagggaaaaggttgactttaaccggagtcccttgattaactgcagaggaaggcaaccaggatgggagatccacccatcgttccagtttactggacccagaactacggggtccacccatgataacccggggattcgcaccagccatttaaaggaaacccccttatgcgccgggatggttagtgtgcccggtccatttaagatccatgtggccccattgtgccatttccagattttccagaaatatttttgctatatagatattgggagtaattctatataattttggacctttaaatattaaggtttaaaatacccgtactcttaaattgattctgttataccgttgtcttttaaactttaaggtatttacagtatataaaatttaaaatttgccccattttttttaaaaaattgccacattttgattctccctgggggaaaattggagataaatttttttttttttgcctctggagtttaaagtttccctatggagataagttttgtgattcctgtaatagatgtgtatgttttctatttgagagtttaaacctttgagagttataaacctttagttttaataccacctatgtatatatacttctgtgttaatttttgctttgtccttaataaaattttaaaatattcca

SEQ ID NO: 532327 - DNA, 141 bp, Homo sapiens
  misc_feature (107)..(107): n is a, c, g, or t
tctagaggatcctcggcgagtgcactggctgtagtaaagctctacagagctgaacttggccagaacaaaaccttcaatgaacaaaatgcctcacaagccacaaatcntaacaaacaaaatctgctataccttatagttcta

SEQ ID NO: 532328 - DNA, 327 bp, Homo sapiens
cggcggtcgagtcttgagatcccccttgttcctgcttcttgaaaaggcccagaatgattcacgaggatggccttctgagtcgatcacgcaagaagatccattcagcagtagttacctacaaggaagacaccctactgaacaatacttgagaatcatgttgaagcttaacccatttgctgagaccatgcgccggaacaccgattcttcgccatggccaggaattcacaaagctccgcgtgtggcataggcagctgctgcatcatcggctctacaagccaaattcagactagaacggcggcgtgtcgcagtgcaagaagcctgtggtaa

SEQ ID NO: 532329 - DNA, 100 bp, Homo sapiens
gcggccgcctactactactactgctcgaattcaagcttctaacgatgtacggggacatggagcaggcccctgctgtggccctgccccctacccacaaaaa

SEQ ID NO: 532330 - DNA, 757 bp, Homo sapiens
  misc_feature (488)..(488): n is a, c, g, or t
gctttgctttgggctgtacgaatggccttggaagggatgagtcaagacggaggaagaaagagaggtgtccaggagggagaagaatcctgatgacggggatggggggccagttccgcccgggagagaactacagagtatttggacagtgtccgtccagtagcgtttatttcaggcggagaagaaaccatttccgagccggtggctacccgttccggttaggggtcccatctttgatgttgctctgggagcccccaagcattcaactccggtgtacgttgcctttgttgcccatgaaacgaagtagtctgatcagcacaagatggcaaagcgggattggatggccgcgccagtcaggcgttacccgttccccagaaatttgtaggaagaacccagatttgtcgggagaggaaagcctgtgcccagacccatcgttgttaccgtgctgatcggcctgagaattccaccactataagccggcatgtcaaatnacacacccaagttgcggttcatgcaccacggggcaaagaggggtcatcattagccgaagcagtgatgtgacctatcacgacgtgacgcgagcaatttcctcccagccagacgcgcggggcccgtactaccagggacaaaattcgctcacaccctgggtgtgtaacacgttagcacactttaggcacaacttcttgtccatggcccctgtaaggaccaccggcggtccagtcacacagaatgtgcacagatttcaattcatcgccaagaa

SEQ ID NO: 532331 - DNA, 910 bp, Homo sapiens
  misc_feature (46)..(46): n is a, c, g, or t
  misc_feature (419)..(419): n is a, c, g, or t
  misc_feature (627)..(627): n is a, c, g, or t
  misc_feature (643)..(643): n is a, c, g, or t
  misc_feature (667)..(667): n is a, c, g, or t
  misc_feature (687)..(687): n is a, c, g, or t
  misc_feature (695)..(695): n is a, c, g, or t
  misc_feature (705)..(705): n is a, c, g, or t
  misc_feature (708)..(708): n is a, c, g, or t
  misc_feature (735)..(735): n is a, c, g, or t
  misc_feature (738)..(738): n is a, c, g, or t
  misc_feature (743)..(743): n is a, c, g, or t
  misc_feature (766)..(766): n is a, c, g, or t
  misc_feature (774)..(774): n is a, c, g, or t
  misc_feature (795)..(795): n is a, c, g, or t
  misc_feature (805)..(805): n is a, c, g, or t
  misc_feature (819)..(819): n is a, c, g, or t
  misc_feature (821)..(821): n is a, c, g, or t
  misc_feature (904)..(904): n is a, c, g, or t
gcacagcagacacttttcttagctttccaatggcggcagcatcatngtccctctcctcctcgacctttgccggcaaggcggtgaagaatgtaccatctttggctctctttggagaggcccgagtcacaatgcgcaagactgcagcgaaggtgaagcaggtttcctttggcagcccatggtacggtgccgaccgtgtgctctacctcggcccactctctggtgagcccccgagctacctcactggtgagttcccaggcgactatgggtgggacactgccggactttcagctgaccccgagaccttcgccaagaaccgggagctggaggtgatccattgccgctgggccatgctcggggcacttggttgtgtcttccctgagtagctcgcccacaacggcgtcaacttcggtgaggctgtntggttcaaggccggctctcaaatctttagtgagggtggtctcgattacctcggcaaccccagcctcgtccacgcacaaagcatccttgctatttgggcatgccaggttgtgctcatgggtgcgtcgagggggaacgcgttgccggtggcccactgagtgagaacgtcgacccactctacccaggcggcagcatcgaccctctagggtnggctgacgaccctgangcattcgccgagctcaatgtgaangagatcaagaactgtcgctngcaatgtnctcaatgtcngcntctttgtcaagctatcgtcacggcaanggnccacncgagaacacgctgacacatcgcngacgccgncaacaacaatgcatgagcatntgcaacaacnttgtcgcagcaagnangagtctgagatgtctcgcaagaggcgtgtctgtgctgagtgtacaaagaaaatgcaaagcatcaaaaaaaattaaaaagggcnacggca

SEQ ID NO: 532332 - DNA, 642 bp, Homo sapiens
ggattgtgaataggtaggtggaagaggcaggtagagaaaagcagcacccataccccgaacacatacacatgcacgcacgcgcgcgcaaacacactgcatgcccagacacactcacgcgcgcgcaaacacacgcacgcgcgcgctcccctccaaacatatatatgcactcacgcgcgcccaaacaaacacacacttgctgatgtacgggaaatatgttattgtccttacatgtccactatatgatacatttccctgaatacgaaagaactaggtaaactaggcaaaaagaagtacccttaactaacctataactaataggaatgctatatacctgatttgccaactctgaaagtcagaatttttgtactaaattcatgtcgactccacagggacctcaaaaccataagctaagtgacactctgtatgtaaatccgtgcaggtaactacactcaggtagaaagatattaaagtaataatccaggcctaaatacataaacgcaataaataagaggagtaacttaggattcctgtaaagatgagaaatgactagagaatgactaagttatcataataacaacaggtaatcttccctctatgtagacactcttctaagagctttgcatgcccagtgtactcatgagg

SEQ ID NO: 532333 - DNA, 291 bp, Homo sapiens
  misc_feature (233)..(233): n is a, c, g, or t
atcgatcattctctgcgctagacaatatccaaagtattttaaaatccccgtctcatactactggcccgtctttttacaacatcaaattttaaaattttgttgggtttgtgcctgaagtaaaaaaaaaaagtaaaggataccacacttggaaaggaaaactgctgtgtcaggaacattctggccttcacttaacccacatatagtacgtaggcgtctggtccggggtcccagangcctcgaattctcgtaactcttggctcatagctgttacccgggaaccaccacaccaca

SEQ ID NO: 532334 - DNA, 407 bp, Homo sapiens
ggtacagagttcacagaatgtggcccgcctgcaaaaagttcctgtgccaaagtgaaaaccaagatgtgagctggaccttacccagggaagaaatatccaacaaggacgccacaagaaccctggccaaagactttgagccctgggagctcactgagttgagtcaacagagtggaagaatagggaggtgtgaagataaagaagtagcagctctggtaaggaagaaaaagaaaaatcctgaggataagggcagaagagagacttcaagaacggcaggtcctcgaaaaactacaaatagaactacaatgtgatccagcaatctcaataatgggcatttatccaaagaaaagaaaatcagtgtattgaaaagacagctgcacccctaagtttattgcaacactattgacaat

SEQ ID NO: 532335 - DNA, 214 bp, Homo sapiens
ctctagaggacccctgaggacaggcaccagcctttgccaggcactgctgcacaggcatagtctgaggcggtgtcaccactgcttcaccctgcagcacctggacaccggctggagcacaacgctccaccctgtccctctgagtctatacactgtcccttggccctggacccagggccatagggtggacccagagggagacacaatggcacgtggg

SEQ ID NO: 532336 - DNA, 877 bp, Homo sapiens
ccacaaagacatggaacactatacctattatcggcgcatgagcatggagtcctaggcacagctctaagcctccttattcgagccgagctaggccagccaggcaaccttctaggtaacagaacacatctacaacgtaatcgtcaacagcccatgcatatgtcactcacatcttcttcatagtaatacccatcataatcggaggcttggcaactgactagttcccctactaatcggtgacccccagcatatggcgtatcccacgaataaacaacatcagcttctgactcttacctccctctctcctactcatgctcgcatctgactatagtggaggacggagcaggaacaggttgaacagtctacacatccacttagcagggaactaatcccaccctggagacctccgataggactaacccaatctatcagcactgtacagcctccgcaggtgtcatccatctcatcccaggggccatacaattcacatgagacaagcaattctcacagaataaaacgccacatgcaataacccaaatcaccacaagcacaccacgtatcgacatgatacacaaaaacaaacaacaggaagacgcaaaaagaaaaacccacgcgaggaggccaagcaataccgcgaaacacaaacaaacgtataccacaagcggaccaaaaccacgaaacaacacaaaaaaaccacgccaatcaccgccaaaaacacaagcaccaacagggcaaaaagcacacacaacaaacagaaaaaagaccaaacaaactaagcataacacaaagacagaagccgcaaacacaagacacacaagacagaacacaaagccaaaaacacaaccagcaacacacagagcaaaaaagcacacacagacac

SEQ ID NO: 532337 - DNA, 160 bp, Homo sapiens
  misc_feature (96)..(96): n is a, c, g, or t
acttccaacgccgctctgatgcatcaacgccgctctgactctcaacgccgctctgactgcatccaacgccgctctgactgcatccaacgccgctcngactgcatccaacgccgctccggattcggggatctgaacccggagtggcggcgttggatgcagt

SEQ ID NO: 532338 - DNA, 134 bp, Homo sapiens
gcagaagaacaatgtattaaaacagtaaactcctttacaattccaaagaaaaataaaaaagaaaacatcaaatcaaaaagcacaagaagattatgaacagatacaagccaaacgtgctgctaagaaacaagaat

SEQ ID NO: 532339 - DNA, 257 bp, Homo sapiens
agcctgattacgctgctcacacaggtggatcgccacggcggcgcggtgcaggagccgctgcgccagtttggcgaacgcctgcagaccgcgcgcaaggcacggatgaaagacaaggtcggcaagctgacggtcaagatgaccggcgtgatggtggtgaccctgctgccggtgctgctgatcctgaccgccggcccgggctttctgggcgtgattcgcatgcttgcgcgcatgaacggaggacattgatgaccttgacg

SEQ ID NO: 532340 - DNA, 386 bp, Homo sapiens
  misc_feature (198)..(198): n is a, c, g, or t
  misc_feature (296)..(296): n is a, c, g, or t
tttttttatttttcaatttttatttttttgagatggcgtttcaccctgtcacccaggctggagtgcagtcgcacaatcctggctcactgcaacctccgcctcccgggttgacgccattctcctgcctccgcctcctgagtagctgggactacaggcccgtgcctctgcgcccagctaattttttgtattttttagtanagacggggtttcaccgtgttagccaggatggtttcgatctcctgacctcgtgatctgccctcctcggcctccctaagtgctgggattacaggcatganctgccgcactctgcccaagttccttatttttaatagaaaagaaaacaggaaaggaacacagtccatgtgagaaaggggttcatggttaaa

SEQ ID NO: 532341 - DNA, 377 bp, Homo sapiens
gttattgtagactattcagctgggtaactggtgtctggctgaggccatacttgagcgcagtgaggaaggatctccagcctgagtgtgccgtgggccccccagaatacataggggattcctgcaaaggcaagttttgaaatagagtagtacatactcacgaagacaagtctgcaagagtgtcgaggttttttttcgatatgatctggccctgatgccactggtgccaccttgtgcccctttcttgctgctagggggtctcatttgtctcaagagtgcttaagtacaccatcagttggcgaagggggcaggcaggatgctcaaggcctgcccagtcgggcccagcaaccaggctctttattagccaccgttggagacca

SEQ ID NO: 532342 - DNA, 163 bp, Homo sapiens
cagggagcagtcgcccgagatgcacaacgccgagatctacgaggcggctggggaaacgctggaagctgctcaaagacagcgacaagatccctttcattcgagaggcggaggggtgcgcctcaagcacatggtgactaccccgatacagtacggccaggaaaag

SEQ ID NO: 532343 - DNA, 152 bp, Homo sapiens
  misc_feature (53)..(53): n is a, c, g, or t
cagggcccgtctgtcctttgggggctgcttcgggcccccggtgctcggggccntgtgtggggcgagtaaaaacttccccagcctaaacgggggtgggttttgggtcagcttcttttccctcaattttgtttgcaataaatgctctatagcca

SEQ ID NO: 532344 - DNA, 134 bp, Homo sapiens
ttctgcaggtctcaacctcatctcctgcccgtctctggaagtcgtcttccaggccattatcttctgtgccttcctcctccatcttcagtcctttaacacatctcttggctgacttctggctggtggcgttccca

SEQ ID NO: 532345 - DNA, 147 bp, Homo sapiens
gcatcacattcagcctctgtatacaaggaccttgagataaaccaaactgactgcttaacgtaacccctcctattaaatcttgttatttgtcttgtgttgccatttcaaaaatggaacgatgcatctcaaagctcctcttcctatcac

SEQ ID NO: 532346 - DNA, 207 bp, Homo sapiens
  misc_feature (20)..(20): n is a, c, g, or t
  misc_feature (24)..(24): n is a, c, g, or t
  misc_feature (61)..(61): n is a, c, g, or t
  misc_feature (132)..(132): n is a, c, g, or t
  misc_feature (164)..(165): n is a, c, g, or t
tggcacagtgggaccaaggnaagncaggcaggccgcttgggcactgatgtaccggtggtgncaaaacatccctggaggagacctgaaatccgggtccagttaactctgcctttatacacacaacccctccanataactggtcaggaatgccactgattctactnnctttccaagtaaagagagtattccccaaaaaatgaaggaaac

SEQ ID NO: 532347 - DNA, 905 bp, Homo sapiens
gctaaagctgtggaccgtgtgggctcgccgtccctgggactaggtattcaggcggtcgctgcagattaccagtatataggtgcatatcccgaaggtcccgaccgctcatgcggaggcgtgttccgtgtggcagctgcacctaccaaggagctgcttggtcaagcataacccctatcgcagcaagcccctggcgttctcgcggacatctgctgctggaagctctacaaatgcctcagtgaacacgcggtgaagcagaagcatgattctgagccgctggggttgaaacgacggttcatgaaattttgtcactgaaggacgaaacaagggatcatggtatttggcaggagacacactgcccattgatggtatactgccatctcccgagatcatgtgtgaggaccgaaattttgccctatgtctatatccccgtctaagacggacctggtgtgcacgccgacaggctccaagtcgccccacctgtgtgataatggtcaagtccccagtgaggagataccaggaggcttacgatgacgtgcctggaggcatgtgcagtccctggtccctacccctatgaggggctccggtaggacctggagcacctgccgcctggaagctattgggctggcagtcagtgacgactggctgtcctcctagccacccaaatgacggtatctttcccagttcccccaatggcactgccttcttcccaggcagctctaacagcccttgcatgaagggtaatgctaactcattcttgtccaatcaagtgcccaattccgtgtagaacctaaagggctgttccaggaactgttgggtggggaacacgtcactgctgcgactaggagtgcgggaacaatcagcacaaagagccaggacgggcagtaaaagcagggaggtcgcaccgg

SEQ ID NO: 532348 - DNA, 679 bp, Homo sapiens
  misc_feature (43)..(43): n is a, c, g, or t
  misc_feature (93)..(93): n is a, c, g, or t
  misc_feature (95)..(95): n is a, c, g, or t
agcttcagagcctaatgctgtggtgtgacccaagccctgccanctactagaaatgtaccttgaacatactattttggctctttgggcctcagntnccctaactattaaccattaattggagggaaataaaaaaggaagttttttggaagttggaaagggggatttgacccttttaatttttaaaaccaaggtagaaattttgtggggccccaaaaaaggcgggggggatgggggaaaaaaattttggcggggaaagtggggtttttggggggagaaaaaggggttttttaaaaaccccccttggaacaccggggggggaaaaattggggaaccccaagaatgtggttaagggggggttttttcttccacacgggggggggcccccgcccccttttaaacactcttacaaaaaaaagaaaggggtgggaaaaaacccccctctttttttttgggggggggggggggattttttgaaacacacaagggggtctcccccgggggggggaaaccacggggggttttttataaacaaccttttttggggggcttttatatattgtttttgttagggggggcccccccgcggggaaaaaaaggggggggaccccgggggcgccccctcccccttttttttttttaaaaacccccaatagggggttttttccccaaaggggcgccc

SEQ ID NO: 532349 - DNA, 1119 bp, Homo sapiens
  misc_feature (629)..(629): n is a, c, g, or t
agcggggtgctggcgcgtggagcctcgcgcggcgcgtggtggtggtccgctccctcgtgtgcgcatgcctgtcgcgcggggtgccgtgaggctggctgtgcgatcgcctttctctcgcccgcgcggctctgcacgtgggcattggttccatcggcaggtgaccccacttcgcttgaggaatcagctaggagtaggccgtggaaggttggcgaacacagcatatgccgtattcgcaagaataactgccaccggagctcgcgcgtctctcgagctcgcattgtggctggtacaccagggtgctccatgggcaactgcaagatcgctggaacttctggttcaagccgggactctgggttggggttcctccctttttgacgtattccacctcgatgtgcgtccacggtttccttctagcgtatcaaatcggctggccctttcgtctccccagcatgtctctctcgtgtccagagggcgggatcctctgcatcgctgtcggtgggattttggagaacatccgggcgccgccaaaggtgcgctggccccttccttggtagttcgtggaccagtctttgttcaccggagcgaattcggggacacaaacaaggagtaggacagcgactcgtggagtntctctctatatgggtcgatcgcggtctctgactggaggctgcgggaaagaacgattactatcccgttttctctgtcgctctgccattcgaattgggacccgataatgtcctggcgtccatgaggccgctaggccaaatcggttttagatcttcgtccctaggggtggtttaatttttaaggggtcacacacctaagggttcccaacgacacgactctccttaaatggaattggcttttaaatcaacgccaacggaataccccaatcgtgttcggggcagttaattaaacaacgtggaatataaaaggtttggcaagctttagggtttataactttggcgggagataacacatttcttggttttaggcattaggttatcaggggcaaaatgtggttacttttggtacgagcaacaacttatacaaggttaggttaaagaaaatctttagttcaaatattcaagaatagttattttaagccaaagtaaggta

SEQ ID NO: 532350 - DNA, 871 bp, Homo sapiens
gctgctgtggggccgccggctgcggactttgctgcgtggccgccgtgtggctaggacgagcgctgtgtgcgggatggaaaaccaattctgtgtcctcggatggaccagcaggccagtatgggcacccagtgcgaatactccagaccttggtaggcttgtcgagtgcgatgcgactgcatctggttcagcgaccgcaagtacccgccgaggcacaaggaggagaccccatgcaactacgattatcgagcagcacaggaagaagcgtgcatgggtatctcatctttgcacaacatggagttccatggtccgagtaccatagagaatgcttttgtgacattggttgcaccggtccctgtactcagaaactaagaggtgttagatatcgagtgagtctgtatcttcccaagtgccccagacgaattgccttgtgcaaatactagctgcgttccacacaagcatgggtggtcatgacggctcaagacagcgtgcccagacagatgggaggaatttcacgttgcagcaccaatgcacgagaaaagggcactcaagctaatcgattcgcagggtagtatcctaggctatcagggtatgaccatcacgggaattgagacatggctagtcccaacccgtaggtggaacgaatttgcccacgaatcgggggcttccaagaggcctttcctgggtatggcttcctgtgagatgaccacggtctggagtgctcatgtgagtcgagacgaatccagtccgtgcccatgcttttgtgaatgctgggggttatcgtacgtcacgggcgttttcaattggttggttggaccagaggtggaagggttctatttccgccgactcgggcaagggcccgggggagccctgg

SEQ ID NO: 532351 - DNA, 138 bp, Homo sapiens
accctatctcagacagtgaaagtgaaatggaatgatttgcactcttggttctttggagccgtgtggtggaatccccttttccccatcttgttctttcagttcattaatgagcagaataaaaagagtgaaatggataaa

SEQ ID NO: 532352 - DNA, 226 bp, Homo sapiens
  misc_feature (32)..(32): n is a, c, g, or t
  misc_feature (72)..(72): n is a, c, g, or t
  misc_feature (101)..(101): n is a, c, g, or t
  misc_feature (121)..(121): n is a, c, g, or t
  misc_feature (127)..(127): n is a, c, g, or t
tgaaatgatctcactccatcaccccaggctgncgtgcagtggtgcagtcataactcactgcagcctcttaantcccaggctcaagcaatacttccccctcngcctccccagtagcaagtanaaaaanatgtagctgggcctggtgtcacaggtctgtggtcccagctgctcaggaagctgaggtgggagagtctcttgaccccaggcggtcagggctacagtgatc

SEQ ID NO: 532353 - DNA, 923 bp, Homo sapiens
ggcggtacccttcccgacgcccggggttcctccgacggttctctcgttgtagtccacggactggtcttcagataaccggattcgtctccgagtgtgcgagtcgtggagccgggatacacggcgctgaagaggctggactcggatttcgttgcactgagcaatgggtgatatccggaagagaattggtgattgtaggtgatggagcctgtggaaagacatgctagttcatagtcttcagtaaaggaccagtgtcccagagggtgtatgtgtccacaagttgtttgaaaacatatgtggcagatatcgaggtggatggaaagcaggtagagtgggctttgtgggataccagctggtgcatgaacagcattgatggatcgcctgagtgccgcctctcctaacccagcatactcgatgttgaatacgtgatgtgtcagaccagtctgacagccacggataggtatagacatgatatcccagaaaatagtgggaccgcgatgaacgtggagcatggtcgagttcgccagagtgtgtccattcatcctggtttggggagatcaagcaaggatcttcgagaaatggaatgagtcggcacaatgggggagcgtagccaatgatgaaatcgggaagccggtgaagactggaagaatggcagagacatgcgctaacacgaatcggggcattgggggtacatggacgtgttcagctaacgcccgaaaggattggaggtgacgaaaaggcgctctatgcaacatgggctacagaagacgctggtcctgctaccgcctacaagctggggcacagcatgcaaaggctctggggatgcccttggtttggcgaaaaaccattgtctgataggcagcaaggcccttaatgcggggtaaatacgggaaagtgccggtcatatcaattctacggtgtctata

SEQ ID NO: 532354 - DNA, 394 bp, Homo sapiens
ctccgaggtcatgaagaacttctcgccgggcgggaagatcaccgacaggtcgtcgaagaagcgggacttgaaggcatcgccaccaaaccagtacttggggatgcgcttgtcgaaaccaaaatccagcttttcgcgggggatgatggggtgcagggcttctggatgttttgccatattgtcactctctcctcgtgtctccgggatggaggaactgtacaaattgcccagggcagcaaacaggatgaggggtgacagcagggtttcctacacgacagccctaactcagtgtttttactaggttcaagcgctgttcaagacaaatgcaaaaggcctccgaagaggcctttgtgtgtgcgcttatgtgccctcgtgaacgcttgactcaggtggtgtg

SEQ ID NO: 532355 - DNA, 105 bp, Homo sapiens
tcccctttctggagccttttaccactccagcctagcccttacccccaattaggaggagcactggcccccaacaggcatcaccccggtacacccggtacatgcaag

SEQ ID NO: 532356 - DNA, 181 bp, Homo sapiens
ctgtgttctcaagcttcttctcccatccttcaactgtcagagacctagacacagtggacaatggcatactggaaactctacccacagtgagcatggcgagcacttagtctaagatggagcggagactgcttagtccacaaattctgagcactatgggtgtaacagcctgggcttgtatccc

SEQ ID NO: 532357 - DNA, 383 bp, Homo sapiens
taattttttttttctgactgaatatgagatgtggagcgtgcgatgtgtgcttattggtattaatagtgccaacagggtttgtgtttttcttataagggggggaatggtagagaaacttcaggccaggggtggtggtggtgcctgtagtcctagctttgggaagctgaagtggggcgagtgacttgagatcaggagttcgagaacggccgggccaaggtgaaaccccgtctctgctaaaaatagaaaaagttagccaggcgtggtggtggatgcctgtaattccagctacttgggagctgaggcccgggagacagaggttgcagtgagccgaggtgatggcattagactccagcctggggaacagggtgagattccatcgtaaa

SEQ ID NO: 532358 - DNA, 625 bp, Homo sapiens
ggagataaacatcatctcgactgtgaagggcaagatccagtgttctgcagcgagcaggcagatgatgcagaggagcgagctgagcgcctccaggcgagcaagttgaagggagaaaggcgggcccgggaacaggctgaggctgaggtggcctccttgaaccgtagagatccagctggttgacagaagagctggaccgacgctcaggaggcgcctgggccacagaccctgcaaaagctggaagaagctgaaaaagctgctgatgagagtgcagagaggtagtgaaggttcatatgaaataccgagcctttaggagatgaagaaaagatggaactccagggaaatccaaggtcgaaagcaacgctacaggcagcaatcgcccgaaagacggcagactcaggaacgcattgagaggcaagggggacaatcaggcagaacgtgaggcgaagaatccaatacagaaacaggaacgcaactacagagcacaacgccccgcaaggaacgcaaaccgcaggcgtagcacgccagacgaagcacgataccccgccagcgcgaagcaacacaaggcatgaaaccagacatgaagaacgtgcatgagacccaaaaagcccgcaagtcggcctgaaac

SEQ ID NO: 532359 - DNA, 455 bp, Homo sapiens
tgttgtggggcccgtgcaagtgagtttgtagatgactcagctatcaggatattagcagtaaagccgcctgaactggcagcagcatcacgaaacagtatgatgtagtgattggcatcaacacttctccagctcctccaatatggaatgcttgtggggttcgttttttcttccagccaggcagcaatgggatatggcattgtgaataatcggcttgtatgatttactactgggctccttaaagagcttgggacctgtgtactcggccacttgaggccagggaagatgccgccgacgcggtctcacagtcctcggtctgtgctcctgctttgggttacggctcagtatgggcaggcttccatcgattccactcgctgagaaggtgtgccccggaatgacgctctcggctactgtcgtcccgcagaggccacggacaggtggggctgactgagtcggct

SEQ ID NO: 532360 - DNA, 444 bp, Homo sapiens
aaaaaaagttattgcgccggcaatttaacggattataagcttgggggtggggagacgtagatgggtggggcgtgagggtgtaaaagcgagacgaaggaacttggtcaggagattggtgtgctgagatgtgttgtaaaaagggggttgcaatacttgcctgtgcacctatgtgtaacaggatatgctgtaaacccgcctacgccacccgccgatttaacgcttagccgcaatcgcgttggttacccaggagaccgcgggttaactaatagtagggggaggtggggggggaagctaccctcaccacgtgttacattcaggatttgctagtgacgcgcgtacgcctgacgaggttgaaatggttgcccgcctgcggcaactccacgcttggcgattacttgtacagtattggttagcctggtgggcacgcgtaaaagatagcaacaa

SEQ ID NO: 532361 - DNA, 88 bp, Homo sapiens
ctcttggggaagggtgggcctagtgcgggatcttatccggccgggtcgtctgggggatacgccgggcctttcagctcctgggacaccc

SEQ ID NO: 532362 - DNA, 413 bp, Homo sapiens
aatcgcacgcaactccactgtgtccctggctatggagctagagcttcagggaattagtgatgtatcagaggatagaagcgaaggaagtactcacggatttctcttcgtatacccctcataaagtgtgagcttactcagtgagtctgtatttgtctggatttcccagtgatagagatgccatttgtccaaggagtagctttttagaagaaaagtgtacaaatactctttctttcataagaaaaatctcagggaagtttcttggttcaggcaagaatggggatactcttccactctctaaaaatgcagatcatttactgtacctaaagacaaaggtaaggaagttggtttaggctctgaattctagagcctgaattctaggctcataattcccattctgaattttgaggttactt

SEQ ID NO: 532363 - DNA, 372 bp, Homo sapiens
aaaggtaggaagcagagacatcgagacactttgccaagctcacctatagggtctctgctgtgaagactgctcacaggagagtcagcatgtggtcaaggtgcaggatgaaaagtctctggaccaaagtcacttcctgttcttcttgcctcctttcctcccttcggctcttttcagcacagcctttaacattttcaacacttgtttctgtttttgataacttacatgcaccaggaaagggggcagggggccttagttccaatttctcttccactcttttctgaaacgttcctgccagcagtcagtcctgccgggaaagtttccagtctcagccggttccccacacccagggccgggcctcgggggaggccagtg

SEQ ID NO: 532364 - DNA, 262 bp, Homo sapiens
tatagaatttccgagcacaggtgcttaagtgaccttacatatcacaccctccaaatcccctgcaggccatctcagttgtggagaagctggaagaagatcagggaaacggaactgccttcttcctccccgtgtggttgcactgacaccagaacattcttgcttgttttgatgcaacctatgatccaatgtggtgttttttgcgcaggtttgtgcatctgtgtggcacctccatgctaaccaccctttggagtccttatgctgc

SEQ ID NO: 532365 - DNA, 279 bp, Homo sapiens
gatatagagagaaatatggagctagataaagaaatgggcaaagacagagtgaaagagagagagagacccatacatatactttttaaagcagataaaagcactgaacaagaggctaaagaaaaaattattatttttatcatttgattggctgctgctaacttttcagaagagattaatcatcatcagaaaaacattttgaagtcctatgccccatgctgttttcatactctctttaaagccatttagactgatagaatcctcgtattctaggagcttatg

SEQ ID NO: 532366 - DNA, 144 bp, Homo sapiens
cagagggtatctaaatattcagcatacctcatcggaacagtctggcttttggtgtcatcatagcaatttgttcaacttcaccctgtaaaattaaaaatctattatggtccaagtcaattccatggcttcgaagaagatttccaa

SEQ ID NO: 532367 - DNA, 839 bp, Homo sapiens
tcggcagagagccttctatcgcactttgggacaaggagaacaccactgtgccttagcgcccaaacgggtttcttttcgcccacagtacggaggaaacttcgttgtgcgtggttctccctcactgtcctggtaagaggtaattcgcgaatctggctccggtggtaggctttacttgtgaactgtcgtccgtacctcggcgccacattttacctgcggcggtctcgctccccacccaccgtcctcgtgttaatatgtgtgagactgatgttcgagtagccccctcttcggcgacaggtccacaccctggctctctcccgcgtgttctcccccatggggtctacttcatgacattttggtgtatatggcgctcgctccccttgggtgcctcggatatgggagaacacaatcgtgcccttcttcactattgtgtgagcttcgatgcccccttttatgtggttgatccgctcccgcgcgcgctcctccttgcggtcctcgaaccacctatgtgtgagccggtacagcccccctctctcctcgctctccgagtagttcccgatagcgtctgtaatgcgccgcctttctctcctacggcggtgctcaatatgaactcgtccacatataattacctcactagactaccctcaccgctctaatatacactggcgatattatctacatgctcttctagattgtgagcgcctcccccccctgagggttttttttctctcccccgcctgttggatcagtaagttcagtgctgctctcctgccgactttcattttgccccttccccacgtggtcttatcaaaatacaagtgcgtcgtttttaacaattaaca

SEQ ID NO: 532368 - DNA, 373 bp, Homo sapiens
tacgagcgggtagtttacaccgtcaagacgggcgtctgtcactcagctccagttcctgcaaacggctggcagatttgcgccaactgcggggccagttgtgccaggcgcgccttggcagccgactcctgttcccagctggtagccttggcacgctcgatcatggccaacatcgaatcactgagcaattcgggataagactgaaactccttggccaatgagcgggcaccttcgcaatcgttgatcagctggtgatcatcgaatactccgtcgaatgcctcgggcaacacgacttcactgacaagaggccccaacttggctaccgcttgctcaatcgcctgggctactaacggctgcacgtcagaccagcgagagg

SEQ ID NO: 532369 - DNA, 326 bp, Homo sapiens
  misc_feature (192)..(192): n is a, c, g, or t
  misc_feature (227)..(227): n is a, c, g, or t
cggccgcatcggtctttattccttctttcttctctttcccgaatctgctgctgcaaagcctcttggtaaaacttaagtagctgtggggggaggtttcaatttatcttcaaaaatcaatcctgaatttatcacttgatcacttgtaatcttcagttcattctgtccaaccgtattcacaacaggttgtgctanttggtgggtgacaggagcactaacataagctgcangctgtacgggggtgattcctgaaccataataagcaagactgggatcgaaagtattcctggacccataaaaatagtatgcatcatcataaggagttcgat

SEQ ID NO: 532370 - DNA, 218 bp, Homo sapiens
tgtagaattagaattatacattcatatttaagcagccagcctggcaatttttttagtgttcttcagaattaacgagacttgtatcatctgtaaagggccatctctgtgttctgccaccatataagcagaagttgtatatacaagagaaagtgatgattttaaaaaaggatgtaaacagaggttatgggaaaaaaaatgcctcaaatatattcctcgtt

SEQ ID NO: 532371 - DNA, 394 bp, Homo sapiens
tcacccacggggaaaatcgtgcgcccggcctcgtccaccgccagaagacgccgctacacaatggagtctcgctctgtcgaccaggctggagtgcaatggtgcgatctcggctcactgcaatctctgcctcccggtgagaggtgaagccagctggacttcctgggtctagtggggacttggagaacttttctgtctagctaaagatttgtaaatgcaccaatcagtgctgtgtctagctaaagtttgtaaacgtaccaatcagcactctgtaaaaatgggccaatcagcactctgtaaaatggaccaatcagcactctgtaaaatggaccagtcagcaggatgtgggcggggtcaaataaaggaataaaaagctggtagccgagccggcagtggc

SEQ ID NO: 532372 - DNA, 116 bp, Homo sapiens
gtgtacgtgccctgtttgctgatctactcatcctaaggtacatttgcttccaggtacatgttgtgagtatactacaatgtgcatatatctattccatgtctgctttgtctgttggg

SEQ ID NO: 532373 - DNA, 83 bp, Homo sapiens
tttaggtgagaaattattttatcatatttagaatcaaaatacccttaaattttacattacataaagggatacaaacacagatc

SEQ ID NO: 532374 - DNA, 105 bp, Homo sapiens
caaggtggcacaccgccaccagtgcccagccctggaaaggggacccgtggaacagctggtccgcatttcccatcgagactgggccaaagggtgaagatcagggct

SEQ ID NO: 532375 - DNA, 1063 bp, Homo sapiens
  misc_feature (1063)..(1063): n is a, c, g, or t
ggcgcctcagacctcgtgtaccactgcgagcggggaggagtgcaggaaagaaggacgcggcagtctggggagcaccctaggcagcaatgtacgttgggcccgggtctttcgcacagtgtgggagtgtgactgcgcttggtgaaaggcaggagcgccagcggctcgggctgctcttggctatacgagaggagtccgttatgcggctcgtcgaggggcgacacgacccatgaagcaagatgtgcgagtacaagagcatgtatgaagatactgtttgacgcgagcttgtcttccatcgcggaatataaggactctggaaatcataggaatataaacacagtctttcctaatacttgatgcgtgaggtttactcgaggcgctattggctgcttacagttcgagtcgcagctacttgtatccaggtaaaccacgtttgccattaccttggacactgttggatctatagatcccttgcatatgcgtacaaacgaatttatttgcccgcttacaacttttggagtctactctggaccttggcgtgaccgtgcactggcgcggatcttggacttgacggcctccaagagttcaatttcgtgagtcggtgtgcgcatacggtagctaaccatagtataccaccaaattgcatgcaatggcgggcccggtatatgagtgcctattccctgaatactggtgaacaggttgagcactcggtctctggaaaatttcggatgcacggcatctttaggggtctccctttgagaaccacgcgcaaagcgcctagttcgcgcaccagtgctcgactgaatttagctgcgcgcactcttcaatgagaactgccgcaaacagtaccacgacacctgacgccctcccgtaccaccttggggccggggggccagaagttcacttccaaaacttcacactttgggtacctatccaggtcgccccccagtccggtcgcacagatgtcgctcggggcgacttcttcgcagcatatagggtcgcccgacgagcaatccacctgcacttcatacgagccattacacactaaagggtaggcaaggaaacn

SEQ ID NO: 532376 - DNA, 268 bp, Homo sapiens
ttttttcagtatttttagtatagacggggtttcaccgtgctttgcccgggtggggctctgtctcgttctcctgacctcgtgatgtgccggcctctgcctcccaaagtgtttgtggattactggtttgagccaccatgctcggccatccagctactcttagaagcataatatttccagttatcctcctttcccatcctttgaaatttcatgtttctattctgtgcgcgttgttcaagcatgctatgccactctagcttcccatatgttc

SEQ ID NO: 532377 - DNA, 712 bp, Homo sapiens
  misc_feature (712)..(712): n is a, c, g, or t
gtctggcctatttttgttttcatcaaaaatgtcaggctgcacagtggcgccatcctgaaatcccagcactttgggaggctgaggcaggtggatcacctgaggtcaggagtttgagaccatcctggccaacatggtgaaaccccgtctctacaaaattacaaaaattagctgggcttagcagtgggggtctgtgatcccgtctacttgggtgtctgaggcagagaatggcttgaacctgggagacggaggctgcagtgaagcaagattgcaccactgcactccagcctgggtgacagagagagactccgccaaaaaaaaaaaaaatcacagaaaaaaacaacaaaacttgttggggacggcacgggcgccctcagaaagcggtttttcgacaacaattggtgttgtgagcagcagcggaggcccacatgaggagactgacgttgaaacaacgtgggacaacaagggggtgtatccacaaaagggagaacacccggggacaaaaagacaaagagtgcggagtggggtatctctcgcagccaagtaaataaaaacgcgccggggagtaaaaccaggacacgtccttgtgtgaacacaagctccacagatgtggcgacctctcaagaggaggcaacaaaacggggggacattatacaaacgcgaggaggtccaccgaagagagacgcgcgagaagtatcaaatttagacagcccgn

SEQ ID NO: 532378 - DNA, 230 bp, Homo sapiens
  misc_feature (123)..(123): n is a, c, g, or t
aacccaatgagcatgagtcaaaatcttaaataataaaaaaaagtctggccgggcgcgtggttcacacctgttatacagcactttgggaagccgagacaggcggatcatctgaggtcaggagtntgggaccagcctggccagcatggtgaaaccccgtctccactaaaaacacaaaaatcagccgggcgttgtggcacgcacctgtagtcccagctcattgggttccgatg

SEQ ID NO: 532379 - DNA, 983 bp, Homo sapiens
taaaaggttgaggagtttattagggaaatatgagaggcttaaacaccccaattgacagaaaaaaaatgtctgaaatgtgtcccttacaacccaagttgggggcctggccttgacctcctccaattctccaccaggaacactggtgtgggtttagccacaagcttctcctcgtggcagccccatttgcccggcgctctgagtatgctctttgaccaggacttgccccgcactttcccaccaataggttggggacgcgcagacatcatcatgtgttctcactagataccttgtgcaacagcgcacttgacgcaacttttacgggaaaaggtttgtgaacagaacgagcagaacacgcaaaagcaattactcagtgctgatcggagcgacctttcagcatatagagttccccaggccctatcggcgggcgtgcgtgcagtgtgtctccctcacatgtcacctgtttgcacaagtctagccagtgtcttctaaccacgtgttctacgtgcacacaaggcggtaacaaagtgccccctacagcgctgcgtttctcacacacgcgcgtttcccccatcgtgaacactgtgtctgtctcccgcagcatctatcctacaacccagccagcccccaggatgtgcgcatgaagcccccctatgtgggccaccaaccttttttgtaactcacgaccggtatacacaaccaactagatctataagacgcccccgttgtgtacgcccttcaatctctacgggggacgaacagcgcgcatcgcgccgcctgacaagcgccttgccgtggggagcctttttccccctgtgttgcgccccttgtgttcttggtcgtacaaccgcgatccttcccccacgctgcactggcatcggaccactgctactatgggtgaatgtgttctacccctttgttgtcatcccccggggccttcatgtgtacccctatttcccccgagcaggggggccgtcaacatttct

SEQ ID NO: 532380 - DNA, 266 bp, Homo sapiens
tggccaaggcccacgcagccacatcctgggggctccagcaacaccacagtgtcacactcaggtcaggcattgtgcatgctcccacacatcaacccatctcagccaatcatcttggcagcttgcagcaatcagcatttagtgtggcttcatttacttcgttgccttcgttcccgccatcctatttccaagcagcagcacacttcatctttgtgcacacacagctcatcgtcatcatcatcaccaccaccaccaccaccaccaccacc

SEQ ID NO: 532381 - DNA, 852 bp, Homo sapiens
  misc_feature (658)..(658): n is a, c, g, or t
gtaggctaagcataggcgctttgaaactcgccatgtatccagtcgaggtaggcgctgaaacgtgagacggagctgtgacgagcagtctcacacagcctatggtacgagggtgtctccggctgagcagtccattacgtgggggagctggactccgagaatcctcgcgtgtgctcaaccagatctatcctcctcgtgatcgttcctattgcaggagttgtggtagcatgcgtggcggacggactatcccctgtcaacacggtcattcccatctagtggacaactctgatactgcttggtttcgacgtagtggaacgctaggccttcagacccggtctccgagagggccctgagaattgagaccctcggggagtgaagggctgacaacaaatacaaccgactactggggagggttggccgaggggtaggagaggtggcaccgcagtggcgaggagctttgtgtaggtccattagcggtatagcaggccgatggttgggcgtccgagtcgagatgatagacagtacggcatctgtcagacaggggagcagcatgcaggcacctggataggtgcgggaagcatgggtacgctccgtgtggtgcatcatcatgaggtaagctcaagacccactttattctcggtggagccggttccatcccganaggtggggaggcgagtcgacctgacggtgtgattcgtgggcaccgattcaagaatcttctttggaactcctgaggagtggcttctgtctagcctctgagtggatcactacactactcgtgcgggtgggaggaccatgtcctagaaacctgtcttgagtggggaacatgatctctggttgcggcgaaagctggta

SEQ ID NO: 532382 - DNA, 168 bp, Homo sapiens
actagtcacggttggctgctgcaacacagacaacacccaagactagaaacaacagacaccatcttccgttacttgtcttacgcttcctataaacacttgcaacaaactttcctagttaaaaattctctcttcaagacacagcgtactaccagccaaccgtggactagt

SEQ ID NO: 532383 - DNA, 434 bp, Homo sapiens
  misc_feature (212)..(212): n is a, c, g, or t
  misc_feature (217)..(217): n is a, c, g, or t
  misc_feature (292)..(292): n is a, c, g, or t
  misc_feature (294)..(294): n is a, c, g, or t
aaatttttttaaggaaaagaaaataccatagaatgggtggcttaaataacagaaacaaatttttcacagttctggaggcttaaagtccaagatcaaggtgcagacaaagtaggtgtcatgctgaggcctcttctcttgtaggtggccaccactttgctgtgtgctcagatgacctctttgtgtgtgagtgtgagtgtgtgtgcacgcatgcngccantgggggaaatgctggccagttctccagcattctcttcttataagggcattcatcccattgtaagggctctgctangntgacctcatctaatcctaaataccgtgcccctcaaagtaactccaaataccatcacattggggttaggcctcaacatatatgaatttggggaggacacaattcagtccatatcgagaaagaactgcactaagaacttatc

SEQ ID NO: 532384 - DNA, 1205 bp, Homo sapiens
  misc_feature (513)..(513): n is a, c, g, or t
  misc_feature (744)..(744): n is a, c, g, or t
cctgggcctaaaagcgcggagagtttttgtgcgcccaaccccgccacaggcgctcccgccctttcccttatagaaacctcttgggagccacagaagcgccccggagagagtgaggaatgcaatcacagagagagggtgttgtgtgagagtggttctccccccgggagaggtataacactttttggtctgtgccacacaggcctttcgaaaagagggccgcgccgcagaggcaatatataagtttccccccccagagaggatatttctccgccccacacagggccccaacttccctctgggagagagactcctctctcggggccgtctgtttctcatgagacactctcttggcgagcccgttttaaataccccggcgggacacacacctgcggtctctttgttctctgccccccgcgagagagagttataagtctccgcgcgccctcacgcgagaagatgagagagcccacacccgagcggaaaaatgagagagagaggggagactctctcggnggcgtctcccgcgcacacagcgcgcgagagagaggcgcgagagagtcttgagaggcgcagatatagaaagggaaatggggagcacacagcaacccgcgagaccctcgtctcaacagagagttctttcgcgagagagaaacaccctcgggtgtctctctcacagccccctccgagagagacacacacggcgcctctctcacgcttattagggagaacgctctcttcgcggcngcgcgcacaattgtctctcatctcacacgcgtgttttatgccctcgtctctcgaatttataataaggagaaaatacccccacaaaaatatctcgcccctttaaaataattgaaattcccgccatacggctcggagacaaagtgatggtgaaaaaagttgccagatgtggggacccacattttctttgtgtgtaaactgtctagcactcgttgtgtgtgagtcactcggagtcactaatgcccctctgtgtttctttgggtagaaaaaagggagttccacgtttttgggaaactctcggcagggttgctgttgcggggtgttcaagtcccacagactagtgaaggcgtttgtataataacccccgcccccccaacatccgtcaatagagaacgctggcaccaaactggagggtttttgttttgggctttattattacggtatttttgttttgttaaggatta

SEQ ID NO: 532385 - DNA, 391 bp, Homo sapiens
tgctgtgtaccagctgcactgtctcctgaagatactactaaatccctggacttgtttctcccttaacttggcatgcaatcctaatgttccatgatcagcctgattgaccagtgtctgaatgttcctgataggtgagataaaaacagacacactgttttctccatatactagtctcaatactttattcatcctttgtcagccagaatgtgacatggccccaagatagccaatcacgtgacgtgtctgcagtatgtgttatctttccacatagtacactaccgactgatcatgcaaaaacaggaagggaagcattaagttataagccacattagttatcaaaaaataatatatactttatatgtcttgtatccccactgaggatttgctccct

SEQ ID NO: 532386 - DNA, 457 bp, Homo sapiens
aactatgttttagagatcaaataatgtattctacaactatatacatacaaacctgtctaaaccctgagcaaagaaagaactgtattgtgatgcagggttcgtgatacggtgatatgttagtacttgataggccaaagactaataatcaaggagtagaaacacacgatgcaatgtagcaaatcacagacgctatcattaacatgtgagatcaaaaaggcgatacagaacaaagtggtaaaacgaagatcagaaataaatgatatccatacaagcataatagtaaagtagagaaaatcgtggataatacacagataagaaaagacaatagagagttaatgcgagaacagaatgaagataataatagaacataagaataataacatgaagaatccatcaagaggaaacaagcaacaaagaacaaagaaaaaggagaactaagcgcacacaaacagcaaac

SEQ ID NO: 532387 - DNA, 103 bp, Homo sapiens
cgagctcggtacctgacggcgttgaagtcataatttcagtacagttcggaacttgcgaaagactatgaaattatttacacaccctgccaccgtagccatattg

SEQ ID NO: 532388 - DNA, 162 bp, Homo sapiens
ttacatggagcagcccttaaaaatgtctcacgtggaggcaggcacggtggcttatgcctgtaatcccagcattttgggaggcgaagcaggtggatggcttgagtatatatacttcgggagcaccgtggccaacatggtgaaaccctgtctctacaaaaagtg

SEQ ID NO: 532389 - DNA, 130 bp, Homo sapiens
  misc_feature (80)..(80): n is a, c, g, or t
tagaggatcgggaaagagtgatagcttagataacgaagtaactagctatactaaccagtgtgtcatttcgtgcatgcacngggcacacgattaaccaagtcatagaagcggcgtaagagtgtttagatca

SEQ ID NO: 532390 - DNA, 951 bp, Homo sapiens
tggggcttccaaaaaagtgaaaatgataataaataagtgtaaaaagatgtcaacaacacaccctttaagccaaaaaaaaaaatacatcaggagggacagtcacaattgattaaactgacaaggaggcgtgagtggcgttgggacccaacagggccacgggagggacacgcagggctgtaacatgggtgtagagggcccccctcccagcgccgggagcatgggccagggatctcggacatagggctgtggggtacgcacgctgctgcgatttctcccaccccgggaccaaagcacgttagctcctcctgtgcccaaggcccaacgaccatgctctcgtggccccttgcaccctaacacaggtacctatcgggaccgctggctgtctgcctctcaggggcacatgagcaaccgagtcgcaggcgggcacccatcttgtgccctgctatgctgccctgggggtgagacagcccccatagcttggggccacccatttctccccactcttgggcctggggggtcccccacccattgggattcccttacaccaaagaggcctcctcggattgcccccgcgatagtaggaactcctaggatccttactcaacatttgttccacctctggcggcttggtcccaatccctcccggcgcccttctttgggccttctcccgcgcccattcctgttcctggggacccttatcattgcgtcgaatccacgctttgggcagccgtttacactaatgtccctctcgccacattgcggacatgcgtcccagcggccagtgtcagcctgttacacccatgcgcactggctgcgtaacgcacaatgacgaaccgttggctcctgaacacactctctcttggtggtgtcccccgtgttctcaacacaccccctctgggtcccgcttaccggcgccattatcctgcgagccaacccggattaattggcagc

SEQ ID NO: 532391 - DNA, 3774 bp, Homo sapiens
  misc_feature (21)..(21): n is a, c, g, or t
  misc_feature (33)..(33): n is a, c, g, or t
  misc_feature (35)..(35): n is a, c, g, or t
  misc_feature (305)..(305): n is a, c, g, or t
  misc_feature (3698)..(3698): n is a, c, g, or t
  misc_feature (3706)..(3706): n is a, c, g, or t
  misc_feature (3710)..(3710): n is a, c, g, or t
  misc_feature (3713)..(3714): n is a, c, g, or t
tgagtcggtacctcagagctncctgatggtaanancattcccttggttcacaatctactaccttccacagcagcccaggcgacactgaaaccacactcttacctgacgacaccataacctcaggcctcgtggaggcatctacacccacccacagcagcactggctcgctacacacaacactgacccctgccagctccacaagcgctggccttcaggaagaatctaccactttccagagctggccaagctcaagtgacacaacaccttcacctcccggcaccacagcagcccctgttgaagtatcnacaacctaccacagccgcccgagctcaactccaacaacacacttttctgccagttccacaaccttgggccgtagtgaggaatcaacaacagtccacagcagcccaggtgcaactggaacagcactcttccctacccgctctgcaacctcagttcttgttggagaacctacaacgtcacccatcagttcaggctcaacggaaacaacagcgttacctggcagtaccacaacagcaggcctgagtgagaaatctaccaccttctacagtagccccagatcaccggacacaacactctcacctgccagcacgacaagctcaggcgtcagtgaagaatccaccacctcccacagccgaccaggctcaacgcacacaacagcattccctggcagtaccaccatgccaggcgtcagtcaggaatctacagcttcccacagcagcccaggctccacagacacaacactgtcccctggcagtaccacagcatcatcccttggtccagaatctactaccttccacagcggcccaggctccactgaaacaacactcttacctgacaacaccacagcctcaggcctccttgaagcatctacgcccgtccacagcagcactggatcgccacacacaacactgtcccctgccggctctacaacccgtcagggagaatctaccaccttccagagctggccaaactcgaaggacactacccctgcacctcctactaccacatcagcctttgttgagctatctacaacctcccacggcagcccgagctcaactccaacaacccacctgcccgctccacaacctcaggcctcgttgaagaatctacgacctaccacagcagcccgggctcaactcaaacaatgcacttccctgaaagcgacacaacttcaggccgtggtgaagaatcaacaacttcccacagcagcacaacacacacaatatcttcagctcctagcaccacatctgcccttgttgaagaacctaccagctaccacagcagcccgggctcaactgcaacaacacacttccctgacagctccacaacctcaggccgtagtgaggaatcaacagcatcccacagcagccaagacgcaacgggaacaatagtcctacctgcccgctccacaacctcagttcttcttggagaatctacgacctcacccatcagttcaggctcaatggaaacgacagcgttacccggcagtaccacaacgccaggcctcagtgagaaatctaccactttccacagtagccccagatcaccagccacaacactctcacctgccagcacgacaagctcaggcgtcagtgaagaatccaccacctcccacagccgaccaggctcaacgcacacaacagcattccctgacagcaccaccacgccaggcctcagtcggcattctacaacttcccacagcagcccaggctcaacggatacaacactgttacctgccagcaccaccacctcaggccccagtcaggaatcaacaacttcccacagcagcccaggttcaactgacacagcactgtcccctggcagtaccacagccttatcctttggtcaagaatctacaaccttccacagcagcccaggctccactcacacaacactcttccctgacagcaccacaagctcaggcatcgttgaagcatctacacgcgtccacagcagcactggctcaccacgcacaacactgtcccctgccagctccacaagccctggacttcagggagaatctaccgccttccagacccacccagcctcaactcacacgacgccttcacctcctagcaccgcaacagcccctgttgaagaatctacaacctaccaccgcagcccaggctcgactccaacaacacacttccctgccagctccacaacttcgggccacagtgagaaatcaacaatattccacagcagcccagatgcaagtggaacaacaccctcatctgcccactccacaacctcaggtcgtggagaatctacaacctcacgcatcagtccaggctcaactgaaataacaacgttacctggcagtaccacaacaccaggcctcagtgaggcatctaccaccttctacagcagccccagatcaccaaccacaacactctcacctgccagcatgacaagcctaggcgtcggtgaagaatccaccacctcccgtagccaaccaggttctactcactcaacagtgtcacctgccagcaccaccacgccaggcctcagtgaggaatctaccaccgtctacagcagcagcccaggctcaactgaaaccacagtgttccctcgcagcaccacaacctcagttcgtggtgaagagcctacaaccttccacagccggccagcctcaactcacacaacactgttcactgaggacagcaccacctcgggcctcactgaagaatctacagccttccccggcagcccagcctccacccaaacagggttacctgccacactcacaaccgcagacctcggtgaggaatcaactacctttcccagcagctcaggctcaactggaacaacactctcacctgcccgctccaccacctctggcctcgttggagaatccacaccctcacgcctcagtccaagctcaaccgaaacaacaactttacccggcagtcccacaacaccaagcctcagtgagaaatcaaccaccttctacactagccccagatcaccagatgcaacactctcacctgcaaccacaacaagctcaggcgtcagcgaagaatccagcacatcccacagtcaaccaggctcaacgcacacaacagcgttccctgacagcaccaccacctcaggcctcagtcaggaacctacaacttcccacagcagccaaggctcaacagaggcaacactgtcccctggcagtaccacagcctcatcccttggtcaacaatctacaaccttccacagcagcccaggcgacactgaaaccacactcttacctgacgacaccataacctcaggcctcgtggaggcatctacacccacccacagcagcactggctcgctacacacaacactgacccctgccagctccacaagcgctggccttcaggaagaatctaccactttccagagctggccaagctcaagtgacacaacaccttcacctcccggcaccacagcagcccctgttgaagtatccacaacctaccacagccgcccgagctcaactccaacaacacacttttctgccagttccacaaccttgggccgtagtgaggaatcaacaacagtccacagcagcccaggtgcaactggaacagcactcttccctacccgctctgcaacctcagttcttgttggagaacctacaacgtcacccatcagttcaggctcaacggaaacaacagcgttacctggcagtaccacaacancaggcctnagtnagnnatctaccaccttctacagcagcccccccgctgctgaaatgcgggatccttagagtcaccc

SEQ ID NO: 532392 - DNA, 712 bp, Homo sapiens
  misc_feature (458)..(458): n is a, c, g, or t
  misc_feature (460)..(460): n is a, c, g, or t
  misc_feature (502)..(502): n is a, c, g, or t
  misc_feature (504)..(504): n is a, c, g, or t
  misc_feature (531)..(531): n is a, c, g, or t
  misc_feature (548)..(548): n is a, c, g, or t
  misc_feature (628)..(628): n is a, c, g, or t
  misc_feature (639)..(639): n is a, c, g, or t
  misc_feature (682)..(682): n is a, c, g, or t
  misc_feature (695)..(695): n is a, c, g, or t
agcggggctgttgctgtctccggctccttcgctaacgattgcaggagaaataatgaggatgtaattattacagccctgcgcggagggctggggggcggcggacgcgggctcctctgcctgcgcgcccaggtggggctgggctgggctgggctgggctgggctggactggacgcctctccccgcccggccctccctcagcgcgcggcgtgtgcggtgcccgaggcttcggagcaggctggacctgggaacccggggaggggcctggaggagagatagctgggcgaggtgggcgccggcgagaaggcggagcccccggacagcgtaggttcgcaggtggagagcggacgcgggggcgagggtgcgcggcgggtctgcgatgcgcgtcggaaactcgcggcccccggtcccggccctgcgcgcttggagcccgggtccttccagcccctgcgcgacgccgncnccgccgccgccggtgaatggcgatcccggccacggcctggantnggaaattcgtgacttgtcggcggcccnggtcttctatcgattanagataaagcgatcagcagtgaatttatccttcgtgtggatgaactcggccagccgggctgtggggggttgggaactgtanatattctccanagcgccgcgttctcccgtcttcccggactcgaggctggaggcngctccggcgacgngaacgggggtacccccc

SEQ ID NO: 532393 - DNA, 436 bp, Homo sapiens
  misc_feature (10)..(10): n is a, c, g, or t
  misc_feature (40)..(40): n is a, c, g, or t
  misc_feature (42)..(42): n is a, c, g, or t
  misc_feature (67)..(67): n is a, c, g, or t
  misc_feature (103)..(103): n is a, c, g, or t
  misc_feature (129)..(129): n is a, c, g, or t
  misc_feature (134)..(134): n is a, c, g, or t
  misc_feature (140)..(141): n is a, c, g, or t
  misc_feature (206)..(206): n is a, c, g, or t
  misc_feature (251)..(251): n is a, c, g, or t
  misc_feature (277)..(277): n is a, c, g, or t
  misc_feature (290)..(290): n is a, c, g, or t
gggagggggngggaaggagaagcagagcgaagaaaacaangnagggagaaggaaggaacggggaaancaaaaaaaaggggggaaagcaagaagcaaaaaagangaagagcggggaggaaaaggaaagcnagcangggcanngatggggggcaagaggaaagaagagacccgagcacaaaaaacactggccgggggccccaaacagngaggagagagggggagagaaagttgcgcacggagaataagggcangaggaagaaggagcaggggagcgccnggagaggcgcgcngggaggagcgcccgcccaacagcagggcggcggcggggaggaggcagcagggagcgcgggccgcgggccggcccgccgagcgcccgatgatgcgcccgcggcccgcgccggggagactccgggctgcgcccaggccccgcgcgctc

SEQ ID NO: 532394 - DNA, 3862 bp, Homo sapiens
  misc_feature (21)..(21): n is a, c, g, or t
  misc_feature (33)..(33): n is a, c, g, or t
  misc_feature (35)..(35): n is a, c, g, or t
  misc_feature (305)..(305): n is a, c, g, or t
  misc_feature (3786)..(3786): n is a, c, g, or t
  misc_feature (3794)..(3794): n is a, c, g, or t
  misc_feature (3798)..(3798): n is a, c, g, or t
  misc_feature (3801)..(3802): n is a, c, g, or t
tgagtcggtacctcagagctncctgatggtaanancattcccttggttcacaatctactaccttccacagcagcccaggcgacactgaaaccacactcttacctgacgacaccataacctcaggcctcgtggaggcatctacacccacccacagcagcactggctcgctacacacaacactgacccctgccagctccacaagcgctggccttcaggaagaatctaccactttccagagctggccaagctcaagtgacacaacaccttcacctcccggcaccacagcagcccctgttgaagtatcnacaacctaccacagccgcccgagctcaactccaacaacacacttttctgccagttccacaaccttgggccgtagtgaggaatcaacaacagtccacagcagcccaggtgcaactggaacagcactcttccctacccgctctgcaacctcagttcttgttggagaacctacaacgtcacccatcagttcaggctcaacggaaacaacagcgttacctggcagtaccacaacagcaggcctgagtgagaaatctaccaccttctacagtagccccagatcaccggacacaacactctcacctgccagcacgacaagctcaggcgtcagtgaagaatccaccacctcccacagccgaccaggctcaacgcacacaacagcattccctggcagtaccaccatgccaggcgtcagtcaggaatctacagcttcccacagcagcccaggctccacagacacaacactgtcccctggcagtaccacagcatcatcccttggtccagaatctactaccttccacagcggcccaggctccactgaaacaacactcttacctgacaacaccacagcctcaggcctccttgaagcatctacgcccgtccacagcagcactggatcgccacacacaacactgtcccctgccggctctacaacccgtcagggagaatctaccaccttccagagctggccaaactcgaaggacactacccctgcacctcctactaccacatcagcctttgttgagctatctacaacctcccacggcagcccgagctcaactccaacaacccacttttctgccagctccacaaccttgggccgtagtgaggaatcgacaacagtccacagcagcccagttgcaactgcaacaacaccctcgcctgcccgctccacaacctcaggcctcgttgaagaatctacgacctaccacagcagcccgggctcaactcaaacaatgcacttccctgaaagcgacacaacttcaggccgtggtgaagaatcaacaacttcccacagcagcacaacacacacaatatcttcagctcctagcaccacatctgcccttgttgaagaacctaccagctaccacagcagcccgggctcaactgcaacaacacacttccctgacagctccacaacctcaggccgtagtgaggaatcaacagcatcccacagcagccaagacgcaacgggaacaatagtcctacctgcccgctccacaacctcagttcttcttggagaatctacgacctcacccatcagttcaggctcaatggaaacgacagcgttacccggcagtaccacaacgccaggcctcagtgagaaatctaccactttccacagtagccccagatcaccagccacaacactctcacctgccagcacgacaagctcaggcgtcagtgaagaatccaccacctcccacagccgaccaggctcaacgcacacaacagcattccctgacagcaccaccacgccaggcctcagtcggcattctacaacttcccacagcagcccaggctcaacggatacaacactgttacctgccagcaccaccacctcaggccccagtcaggaatcaacaacttcccacagcagcccaggttcaactgacacagcactgtcccctggcagtaccacagccttatcctttggtcaagaatctacaaccttccacagcagcccaggctccactcacacaacactcttccctgacagcaccacaagctcaggcatcgttgaagcatctacacgcgtccacagcagcactggctcaccacgcacaacactgtcccctgccagctccacaagccctggacttcagggagaatctaccgccttccagacccacccagcctcaactcacacgacgccttcacctcctagcaccgcaacagcccctgttgaagaatctacaacctaccaccgcagcccaggctcgactccaacaacacacttccctgccagctccacaacttcgggccacagtgagaaatcaacaatattccacagcagcccagatgcaagtggaacaacaccctcatctgcccactccacaacctcaggtcgtggagaatctacaacctcacgcatcagtccaggctcaactgaaataacaacgttacctggcagtaccacaacaccaggcctcagtgaggcatctaccaccttctacagcagccccagatcaccaaccacaacactctcacctgccagcatgacaagcctaggcgtcggtgaagaatccaccacctcccgtagccaaccaggttctactcactcaacagtgtcacctgccagcaccaccacgccaggcctcagtgaggaatctaccaccgtctacagcagcagcccaggctcaactgaaaccacagtgttccctcgcagcaccacaacctcagttcgtggtgaagagcctacaaccttccacagccggccagcctcaactcacacaacactgttcactgaggacagcaccacctcgggcctcactgaagaatctacagccttccccggcagcccagcctccacccaaacagggttacctgccacactcacaaccgcagacctcggtgaggaatcaactacctttcccagcagctcaggctcaactggaacaacactctcacctgcccgctccaccacctctggcctcgttggagaatccacaccctcacgcctcagtccaagctcaaccgaaacaacaactttacccggcagtcccacaacaccaagcctcagtgagaaatcaaccaccttctacactagccccagatcaccagatgcaacactctcacctgcaaccacaacaagctcaggcgtcagcgaagaatccagcacatcccacagtcaaccaggctcaacgcacacaacagcgttccctgacagcaccaccacctcaggcctcagtcaggaacctacaacttcccacagcagccaaggctcaacagaggcaacactgtcccctggcagtaccacagcctcatcccttggtcaacaatctacaaccttccacagcagcccaggcgacactgaaaccacactcttacctgacgacaccataacctcaggcctcgtggaggcatctacacccacccacagcagcactggctcgctacacacaacactgacccctgccagctccacaagcgctggccttcaggaagaatctaccactttccagagctggccaagctcaagtgacacaacaccttcacctcccggcaccacagcagcccctgttgaagtatccacaacctaccacagccgcccgagctcaactccaacaacacacttttctgccagttccacaaccttgggccgtagtgaggaatcaacaacagtccacagcagcccaggtgcaactggaacagcactcttccctacccgctctgcaacctcagttcttgttggagaacctacaacgtcacccatcagttcaggctcaacggaaacaacagcgttacctggcagtaccacaacancaggcctnagtnagnnatctaccaccttctacagcagcccccccgctgctgaaatgcgggatccttagagtcaccc

SEQ ID NO: 532395 - DNA, 645 bp, Homo sapiens
tatggtcgtaaatacagtacagtcagaaagtgtctctttgcagactcattttatagtcaatttagttcagataaatataggaaactacttcagataattggacaaataagaatttcagtgtgtcactacctataattaagtagcagcacaccacaaccacagcaagtaaacactaatctcctctactgcctttttggggtcttttccagtcacaggagctaatttacagggataccactgggtttcaaccaatctctgaaagttcctttattatgagttttgaaatttaactaatgcatcacctacaattctgttggctagttttattcttactcttcactaattagttttaaatacaatatgtaatgttttcaaattttataaacataggtgttgtactaaaatgattaatggcatttgaaatacaacaaatgggttagatgttaaccaaaacaatgggattaagagtattttagaaagcgattttttgttaactagaaaagctaacggattcacaatgaatacagatacaatatttttaaccctgctctattattacatcagtagtatagtaagtgcataacgtatcgaagagaagaaatttcaggaaaaaatttcaaaacttaagttgtgcgtcaacacaga

SEQ ID NO: 532396 - DNA, 443 bp, Homo sapiens
aaagcagatgtggggtgacggctgtttcttctattcaagccatgcaccttactcttgttggtaaaatcactggcatgttctcacatattcataatttagaacttcttcatatgctctagtctccagagtccctccgttgtaaggttgatcaagctgtatgtgtattacaagcccgcccagttaaagagggtgcccatagagcagttaacagtgccactggtgttccaactgtttagaattgatcagggaccatgaaaagaagcttgtgcttcaccgaagaaaaatatctaatcatcgtataactttaatattatggaaaaccaacattgccatttataaaataaataattaaaggaaaggaatctttgaaccttatgtcccgagcaaatgccaggtctagcttacataatgctagtcctattttacttattgatttaaaaaca

SEQ ID NO: 532397 - DNA, 3722 bp, Homo sapiens
  misc_feature (21)..(21): n is a, c, g, or t
  misc_feature (33)..(33): n is a, c, g, or t
  misc_feature (35)..(35): n is a, c, g, or t
  misc_feature (305)..(305): n is a, c, g, or t
  misc_feature (3646)..(3646): n is a, c, g, or t
  misc_feature (3654)..(3654): n is a, c, g, or t
  misc_feature (3658)..(3658): n is a, c, g, or t
  misc_feature (3661)..(3662): n is a, c, g, or t
tgagtcggtacctcagagctncctgatggtaanancattcccttggttcacaatctactaccttccacagcagcccaggcgacactgaaaccacactcttacctgacgacaccataacctcaggcctcgtggaggcatctacacccacccacagcagcactggctcgctacacacaacactgacccctgccagctccacaagcgctggccttcaggaagaatctaccactttccagagctggccaagctcaagtgacacaacaccttcacctcccggcaccacagcagcccctgttgaagtatcnacaacctaccacagccgcccgagctcaactccaacaacacacttttctgccagttccacaaccttgggccgtagtgaggaatcaacaacagtccacagcagcccaggtgcaactggaacagcactcttccctacccgctctgcaacctcagttcttgttggagaacctacaacgtcacccatcagttcaggctcaacggaaacaacagcgttacctggcagtaccacaacagcaggcctgagtgagaaatctaccaccttctacagtagccccagatcaccggacacaacactctcacctgccagcacgacaagctcaggcgtcagtgaagaatccaccacctcccacagccgaccaggctcaacgcacacaacagcattccctggcagtaccaccatgccaggcgtcagtcaggaatctacagcttcccacagcagcccaggctccacagacacaacactgtcccctggcagtaccacagcatcatcccttggtccagaatctactaccttccacagcggcccaggctccactgaaacaacactcttacctgacaacaccacagcctcaggcctccttgaagcatctacgcccgtccacagcagcactggatcgccacacacaacactgtcccctgccggctctacaacccgtcagggagaatctaccaccttccagagctggccaaactcgaaggacactacccctgcacctcctactaccacatcagcctttgttgagctatctacaacctcccacggcagcccgagctcaactccaacaacccacttttctgccagctccacaaccttgggccgtagtgaggaatcgacaacagtccacagcagcccagttgcaactgcaacaacaccctcgcctgcccgctccacaacctcaggcctcgttgaagaatctacgacctaccacagcagcccgggctcaactcaaacaatgcacttccctgaaagcgacacaacttcaggccgtggtgaagaatcaacaacttcccacagcagcacaacacacacaatatcttcagctcctagcaccacatctgcccttgttgaagaacctaccagctaccacagcagcccgggctcaactgcaacaacacacttccctgacagctccacaacctcaggccgtagtgaggaatcaacagcatcccacagcagccaagacgcaacgggaacaatagtcctacctgcccgctccacaacctcagttcttcttggagaatctacgacctcacccatcagttcaggctcaatggaaacgacagcgttacccggcagtaccacaacgccaggcctcagtgagaaatctaccactttccacagtagccccagatcaccagccacaacactctcacctgccagcacgacaagctcaggcgtcagtgaagaatccaccacctcccacagccgaccaggctcaacgcacacaacagcattccctgacagcaccaccacgccaggcctcagtcggcattctacaacttcccacagcagcccaggctcaacggatacaacactgttacctgccagcaccaccacctcaggccccagtcaggaatcaacaacttcccacagcagcccaggttcaactgacacagcactgtcccctggcagtaccacagccttatcctttggtcaagaatctacaacctcctggacttcagggagaatctaccgccttccagacccacccagcctcaactcacacgacgccttcacctcctagcaccgcaacagcccctgttgaagaatctacaacctaccaccgcagcccaggctcgactccaacaacacacttccctgccagctccacaacttcgggccacagtgagaaatcaacaatattccacagcagcccagatgcaagtggaacaacaccctcatctgcccactccacaacctcaggtcgtggagaatctacaacctcacgcatcagtccaggctcaactgaaataacaacgttacctggcagtaccacaacaccaggcctcagtgaggcatctaccaccttctacagcagccccagatcaccaaccacaacactctcacctgccagcatgacaagcctaggcgtcggtgaagaatccaccacctcccgtagccaaccaggttctactcactcaacagtgtcacctgccagcaccaccacgccaggcctcagtgaggaatctaccaccgtctacagcagcagcccaggctcaactgaaaccacagtgttccctcgcagcaccacaacctcagttcgtggtgaagagcctacaaccttccacagccggccagcctcaactcacacaacactgttcactgaggacagcaccacctcgggcctcactgaagaatctacagccttccccggcagcccagcctccacccaaacagggttacctgccacactcacaaccgcagacctcggtgaggaatcaactacctttcccagcagctcaggctcaactggaacaacactctcacctgcccgctccaccacctctggcctcgttggagaatccacaccctcacgcctcagtccaagctcaaccgaaacaacaactttacccggcagtcccacaacaccaagcctcagtgagaaatcaaccaccttctacactagccccagatcaccagatgcaacactctcacctgcaaccacaacaagctcaggcgtcagcgaagaatccagcacatcccacagtcaaccaggctcaacgcacacaacagcgttccctgacagcaccaccacctcaggcctcagtcaggaacctacaacttcccacagcagccaaggctcaacagaggcaacactgtcccctggcagtaccacagcctcatcccttggtcaacaatctacaaccttccacagcagcccaggcgacactgaaaccacactcttacctgacgacaccataacctcaggcctcgtggaggcatctacacccacccacagcagcactggctcgctacacacaacactgacccctgccagctccacaagcgctggccttcaggaagaatctaccactttccagagctggccaagctcaagtgacacaacaccttcacctcccggcaccacagcagcccctgttgaagtatccacaacctaccacagccgcccgagctcaactccaacaacacacttttctgccagttccacaaccttgggccgtagtgaggaatcaacaacagtccacagcagcccaggtgcaactggaacagcactcttccctacccgctctgcaacctcagttcttgttggagaacctacaacgtcacccatcagttcaggctcaacggaaacaacagcgttacctggcagtaccacaacancaggcctnagtnagnnatctaccaccttctacagcagcccccccgctgctgaaatgcgggatccttagagtcaccc

SEQ ID NO: 532398 - DNA, 2962 bp, Homo sapiens
  misc_feature (21)..(21): n is a, c, g, or t
  misc_feature (33)..(33): n is a, c, g, or t
  misc_feature (35)..(35): n is a, c, g, or t
  misc_feature (305)..(305): n is a, c, g, or t
tgagtcggtacctcagagctncctgatggtaanancattcccttggttcacaatctactaccttccacagcagcccaggcgacactgaaaccacactcttacctgacgacaccataacctcaggcctcgtggaggcatctacacccacccacagcagcactggctcgctacacacaacactgacccctgccagctccacaagcgctggccttcaggaagaatctaccactttccagagctggccaagctcaagtgacacaacaccttcacctcccggcaccacagcagcccctgttgaagtatcnacaacctaccacagccgcccgagctcaactccaacaacacacttttctgccagttccacaaccttgggccgtagtgaggaatcaacaacagtccacagcagcccaggtgcaactggaacagcactcttccctacccgctctgcaacctcagttcttgttggagaacctacaacgtcacccatcagttcaggctcaacggaaacaacagcgttacctggcagtaccacaacagcaggcctgagtgagaaatctaccaccttctacagtagccccagatcaccggacacaacactctcacctgccagcacgacaagctcaggcgtcagtgaagaatccaccacctcccacagccgaccaggctcaacgcacacaacagcattccctggcagtaccaccatgccaggcgtcagtcaggaatctacagcttcccacagcagcccaggctccacagacacaacactgtcccctggcagtaccacagcatcatcccttggtccagaatctactaccttccacagcggcccaggctccactgaaacaacactcttacctgacaacaccacagcctcaggcctccttgaagcatctacgcccgtccacagcagcactggatcgccacacacaacactgtcccctgccggctctacaacccgtcagggagaatctaccaccttccagagctggccaaactcgaaggacactacccctgcacctcctactaccacatcagcctttgttgagctatctacaacctcccacggcagcccgagctcaactccaacaacccacttttctgccagctccacaaccttgggccgtagtgaggaatcgacaacagtccacagcagcccagttgcaactgcaacaacaccctcgcctgcccgctccacaacctcaggcctcgttgaagaatctacgacctaccacagcagcccgggctcaactcaaacaatgcacttccctgaaagcgacacaacttcaggccgtggtgaagaatcaacaacttcccacagcagcacaacacacacaatatcttcagctcctagcaccacatctgcccttgttgaagaacctaccagctaccacagcagcccgggctcaactgcaacaacacacttccctgacagctccacaacctcaggccgtagtgaggaatcaacagcatcccacagcagccaagacgcaacgggaacaatagtcctacctgcccgctccacaacctcagttcttcttggagaatctacgacctcacccatcagttcaggctcaatggaaacgacagcgttacccggcagtaccacaacgccaggcctcagtgagaaatctaccactttccacagtagccccagatcaccagccacaacactctcacctgccagcacgacaagctcaggcgtcagtgaagaatccaccacctcccacagccgaccaggctcaacgcacacaacagcattccctgacagcaccaccacgccaggcctcagtcggcattctacaacttcccacagcagcccaggctcaacggatacaacactgttacctgccagcaccaccacctcaggccccagtcaggaatcaacaacttcccacagcagcccaggttcaactgacacagcactgtcccctggcagtaccacagccttatcctttggtcaagaatctacaaccttccacagcagcccaggctccactcacacaacactcttccctgacagcaccacaagctcaggcatcgttgaagcatctacacgcgtccacagcagcactggctcaccacgcacaacactgtcccctgccagctccacaagccctggacttcagggagaatctaccgccttccagacccacccagcctcaactcacacgacgccttcacctcctagcaccgcaacagcccctgttgaagaatctacaacctaccaccgcagcccaggctcgactccaacaacacacttccctgccagctccacaacttcgggccacagtgagaaatcaacaatattccacagcagcccagatgcaagtggaacaacaccctcatctgcccactccacaacctcaggtcgtggagaatctacaacctcacgcatcagtccaggctcaactgaaataacaacgttacctggcagtaccacaacaccaggcctcagtgaggcatctaccaccttctacagcagccccagatcaccaaccacaacactctcacctgccagcatgacaagcctaggcgtcggtgaagaatccaccacctcccgtagccaaccaggttctactcactcaacagtgtcacctgccagcaccaccacgccaggcctcagtgaggaatctaccaccgtctacagcagcagcccaggctcaactgaaaccacagtgttccctcgcagcaccacaacctcagttcgtggtgaagagcctacaaccttccacagccggccagcctcaactcacacaacactgttcactgaggacagcaccacctcgggcctcactgaagaatctacagccttccccggcagcccagcctccacccaaacagggttacctgccacactcacaaccgcagacctcggtgaggaatcaactacctttcccagcagctcaatggctcagccaacttcctccacctcccgtgggaagtcgggtgccgagctcgattg

SEQ ID NO: 532399 - DNA, 3796 bp, Homo sapiens
  misc_feature (21)..(21): n is a, c, g, or t
  misc_feature (33)..(33): n is a, c, g, or t
  misc_feature (35)..(35): n is a, c, g, or t
  misc_feature (305)..(305): n is a, c, g, or t
  misc_feature (3720)..(3720): n is a, c, g, or t
  misc_feature (3728)..(3728): n is a, c, g, or t
  misc_feature (3732)..(3732): n is a, c, g, or t
  misc_feature (3735)..(3736): n is a, c, g, or t
tgagtcggtacctcagagctncctgatggtaanancattcccttggttcacaatctactaccttccacagcagcccaggcgacactgaaaccacactcttacctgacgacaccataacctcaggcctcgtggaggcatctacacccacccacagcagcactggctcgctacacacaacactgacccctgccagctccacaagcgctggccttcaggaagaatctaccactttccagagctggccaagctcaagtgacacaacaccttcacctcccggcaccacagcagcccctgttgaagtatcnacaacctaccacagccgcccgagctcaactccaacaacacacttttctgccagttccacaaccttgggccgtagtgaggaatcaacaacagtccacagcagcccaggtgcaactggaacagcactcttccctacccgctctgcaacctcagttcttgttggagaacctacaacgtcacccatcagttcaggctcaacggaaacaacagcgttacctggcagtaccacaacagcaggcctgagtgagaaatctaccaccttctacagtagccccagatcaccggacacaacactctcacctgccagcacgacaagctcaggcgtcagtgaagaatccaccacctcccacagccgaccaggctcaacgcacacaacagcattccctggcagtaccaccatgccaggcgtcagtcaggaatctacagcttcccacagcagcccaggctccacagacacaacactgtcccctggcagtaccacagcatcatcccttggtccagaatctactaccttccacagcggcccaggctccactgaaacaacactcttacctgacaacaccacagcctcaggcctccttgaagcatctacgcccgtccacagcagcactggatcgccacacacaacactgtcccctgccggctctacaacccgtcagggagaatctaccaccttccagagctggccaaactcgaaggacactacccctgcacctcctactaccacatcagcctttgttgagctatctacaacctcccacggcagcccgagctcaactccaacaacccacttttctgccagctccacaaccttgggccgtagtgaggaatcgacaacagtccacagcagcccagttgcaactgcaacaacaccctcgcctgcccgctccacaacctcaggcctcgttgaagaatctacgacctaccacagcagcccgggctcaactcaaacaatgcacttccctgaaagcgacacaacttcaggccgtggtgaagaatcaacaacttcccacagcagcacaacacacacaatatcttcagctcctagcaccacatctgcccttgttgaagaacctaccagctaccacagcagcccgggctcaactgcaacaacacacttccctgacagctccacaacctcaggccgtagtgaggaatcaacagcatcccacagcagccaagacgcaacgggaacaatagtcctacctgcccgctccacaacctcagttcttcttggagaatctacgacctcacccatcagttcaggctcaatggaaacgacagcgttacccggcagtaccacaacgccaggcctcagtgagaaatctaccactttccacagtagccccagatcaccagccacaacactctcacctgccagcacgacaagctcaggcgtcagtgaagaatccaccacctcccacagccgaccaggctcaacgcacacaacagcattccctgacagcaccaccacgccaggcctcagtcggcattctacaacttcccacagcagcccaggctcaacggatacaacactgttacctgccagcaccaccacctcaggccccagtcaggaatcaacaacttcccacagcagcccaggttcaactgacacagcactgtcccctggcagtaccacagccttatcctttggtcaagaatctacaaccttccacagcagcccaggctccactcacacaacactcttccctgacagcaccacaagctcaggcatcgttgaagcatctacacgcgtccacagcagcactggctcaccacgcacaacactgtcccctgccagctccacaagccctggacttcagggagaatctaccgccttccagacccacccagcctcaactcacacgacgccttcacctcctagcaccgcaacagcccctgttgaagaatctacaacctaccaccgcagcccaggctcgactccaacaacacacttccctgccagctccacaacttcgggccacagtgagaaatcaacaatattccacagcagcccagatgcaagtggaacaacaccctcatctgcccactccacaacctcaggtcgtggagaatctacaacctcacgcatcagtccaggctcaactgaaataacaacgttacctggcagtaccacaacaccaggcctcagtgaggcatctaccaccttctacagcagccccagatcaccaaccacaacactctcacctgccagcatgacaagcctaggcgtcggtgaagaatccaccacctcccgtagccaaccaggttctactcactcaacagtgtcacctgccagcaccaccacgccaggcctcagtgaggaatctaccactcgtggtgaagagcctacaaccttccacagccggccagcctcaactcacacaacactgttcactgaggacagcaccacctcgggcctcactgaagaatctacagccttccccggcagcccagcctccacccaaacagggttacctgccacactcacaaccgcagacctcggtgaggaatcaactacctttcccagcagctcaggctcaactggaacaacactctcacctgcccgctccaccacctctggcctcgttggagaatccacaccctcacgcctcagtccaagctcaaccgaaacaacaactttacccggcagtcccacaacaccaagcctcagtgagaaatcaaccaccttctacactagccccagatcaccagatgcaacactctcacctgcaaccacaacaagctcaggcgtcagcgaagaatccagcacatcccacagtcaaccaggctcaacgcacacaacagcgttccctgacagcaccaccacctcaggcctcagtcaggaacctacaacttcccacagcagccaaggctcaacagaggcaacactgtcccctggcagtaccacagcctcatcccttggtcaacaatctacaaccttccacagcagcccaggcgacactgaaaccacactcttacctgacgacaccataacctcaggcctcgtggaggcatctacacccacccacagcagcactggctcgctacacacaacactgacccctgccagctccacaagcgctggccttcaggaagaatctaccactttccagagctggccaagctcaagtgacacaacaccttcacctcccggcaccacagcagcccctgttgaagtatccacaacctaccacagccgcccgagctcaactccaacaacacacttttctgccagttccacaaccttgggccgtagtgaggaatcaacaacagtccacagcagcccaggtgcaactggaacagcactcttccctacccgctctgcaacctcagttcttgttggagaacctacaacgtcacccatcagttcaggctcaacggaaacaacagcgttacctggcagtaccacaacancaggcctnagtnagnnatctaccaccttctacagcagcccccccgctgctgaaatgcgggatccttagagtcaccc

SEQ ID NO: 532400 - DNA, 260 bp, Homo sapiens
gctcggtacccctcctaacattgagctgattgatggaaggtagaggaaagtaataaacctttattcacagaactacaaaaccctttctggctgctgcctccttccctctctggagatagatggggtcgttactattatgaaatatacagcagaggagtgtttttctagtaatccctctagtactcatctacatcttgactacttcttgataaagatatcaccctctagatagaacctgtcatcaagacaagcaggccaca

SEQ ID NO: 532401 - DNA, 828 bp, Homo sapiens
tgcagtgcagtggcacgatcttggctcacggcaaccttggcctcccaggttcacgccattctcctgcctcagcctcccgagtagctgggactacaggcacctgccaccacgcccggctaattttgtattttttagtagagatggggtttcaccatgttaggcaggatgctctccatctttgacctcgtgatctgcccgtctcggcctcccaaagtgctgggattacaggcctgagccactgcatccagcctttgtctgacttttaagccaggttacagttcattcacaaggactcaaatatagaagtacggagtccatcacaggccatatttagttgctttaacacctggctaaggagacaatgagccgagaagctgcaggcagcctccacagatcagaagcagccccagctgacagcaagcaagaaacgggacctcagtcaaacagacgcaaggcaacaaatgaccaacatccctaatgagacggacagggattctgccccaaactcctcacagaaggcagccctgccacatcttgatttgggccttgtgagaccctaagcagagagcccagccatgtggtgcagaatttctgacccataacactggtgagctaatgagttgttgattacgatgctaagcatgtgaccatttatcactcggtaattgggtaactgttaccaaaaagcatgcaaatctatgcgaccaaattagaaaactccgacggacaaccacagaaggagtgaacaccctagtatgacctctaacatgactttgtatattgcgaatagctccaatatgtcggaggtaattttttcccactagttta

SEQ ID NO: 532402 - DNA, 2842 bp, Homo sapiens
  misc_feature (21)..(21): n is a, c, g, or t
  misc_feature (33)..(33): n is a, c, g, or t
  misc_feature (35)..(35): n is a, c, g, or t
  misc_feature (305)..(305): n is a, c, g, or t
tgagtcggtacctcagagctncctgatggtaanancattcccttggttcacaatctactaccttccacagcagcccaggcgacactgaaaccacactcttacctgacgacaccataacctcaggcctcgtggaggcatctacacccacccacagcagcactggctcgctacacacaacactgacccctgccagctccacaagcgctggccttcaggaagaatctaccactttccagagctggccaagctcaagtgacacaacaccttcacctcccggcaccacagcagcccctgttgaagtatcnacaacctaccacagccgcccgagctcaactccaacaacacacttttctgccagttccacaaccttgggccgtagtgaggaatcaacaacagtccacagcagcccaggtgcaactggaacagcactcttccctacccgctctgcaacctcagttcttgttggagaacctacaacgtcacccatcagttcaggctcaacggaaacaacagcgttacctggcagtaccacaacagcaggcctgagtgagaaatctaccaccttctacagtagccccagatcaccggacacaacactctcacctgccagcacgacaagctcaggcgtcagtgaagaatccaccacctcccacagccgaccaggctcaacgcacacaacagcattccctggcagtaccaccatgccaggcgtcagtcaggaatctacagcttcccacagcagcccaggctccacagacacaacactgtcccctggcagtaccacagcatcatcccttggtccagaatctactaccttccacagcggcccaggctccactgaaacaacactcttacctgacaacaccacagcctcaggcctccttgaagcatctacgcccgtccacagcagcactggatcgccacacacaacactgtcccctgccggctctacaacccgtcagggagaatctaccaccttccagagctggccaaactcgaaggacactacccctgcacctcctactaccacatcagcctttgttgagctatctacaacctcccacggcagcccgagctcaactccaacaacccacttttctgccagctccacaaccttgggccgtagtgaggaatcgacaacagtccacagcagcccagttgcaactgcaacaacaccctcgcctgcccgctccacaacctcaggcctcgttgaagaatctacgacctaccacagcagcccgggctcaactcaaacaatgcacttccctgaaagcgacacaacttcaggccgtggtgaagaatcaacaacttcccacagcagcacaacacacacaatatcttcagctcctagcaccacatctgcccttgttgaagaacctaccagctaccacagcagcccgggctcaactgcaacaacacacttccctgacagctccacaacctcaggccgtagtgaggaatcaacagcatcccacagcagccaagacgcaacgggaacaatagtcctacctgcccgctccacaacctcagttcttcttggagaatctacgacctcacccatcagttcaggctcaatggaaacgacagcgttacccggcagtaccacaacgccaggcctcagtgagaaatctaccactttccacagtagccccagatcaccagccacaacactctcacctgccagcacgacaagctcaggcgtcagtgaagaatccaccacctcccacagccgaccaggctcaacgcacacaacagcattccctgacagcaccaccacgccaggcctcagtcggcattctacaacttcccacagcagcccaggctcaacggatacaacactgttacctgccagcaccaccacctcaggccccagtcaggaatcaacaacttcccacagcagcccaggttcaactgacacagcactgtcccctggcagtaccacagccttatcctttggtcaagaatctacaaccttccacagcagcccaggctccactcacacaacactcttccctgacagcaccacaagctcaggcatcgttgaagcatctacacgcgtccacagcagcactggctcaccacgcacaacactgtcccctgccagctccacaagccctggacttcagggagaatctaccgccttccagacccacccagcctcaactcacacgacgccttcacctcctagcaccgcaacagcccctgttgaagaatctacaacctaccaccgcagcccaggctcgactccaacaacacacttccctgccagctccacaacttcgggccacagtgagaaatcaacaatattccacagcagcccagatgcaagtggaacaacaccctcatctgcccactccacaacctcaggtcgtggagaatctacaacctcacgcatcagtccaggctcaactgaaataacaacgttacctggcagtaccacaacaccaggcctcagtgaggcatctaccaccttctacagcagccccagatcaccaaccacaacactctcacctgccagcatgacaagcctaggcgtcggtgaagaatccaccacctcccgtagccaaccaggttctactcactcaacagtgtcacctgccagcaccaccacgccaggcctcagtgaggaatctaccaccgtctacagcagcagcccaggctcaactgaaaccacagtgttccctcgcagcaccacaacctcagttcgtggtgaagagcctacaaccttccacagccggccagcctcaactcacacaacactcttacctgacaacaccacagcatcagcctccttgaataatctacggccgtccacagcagctcgcgctaagttgggccggct

SEQ ID NO: 532403 - DNA, 1147 bp, Homo sapiens
  misc_feature (1)..(1): n is a, c, g, or t
ntttgttcctttcgttttgtctctcgtgttcgttgttctgtttgttttgtgcgggtgtgtgttgtattggtgttactatatggttgttgtttgttgtgtgcggggggagggggggagaagagcagagcgacgaggggggggggagggtgggggcggcgaaagaagagagaggagtggttcatgttggattgtttctcgatcaaatttttcttcccctcccgggtgttttttcttgttggtgatagtgttttaaacggtgttagaatttgttttcgctcctccccgttttcctcacatagtggcgcgctttcgttttattttaatgatgggggtctttcgccgctttaggttgtttaatttaaaaaagttggtgcgtgtggttaaaagtaaaattatggccgccggcttcttcttttacaaaaggggtgttttccccccgtcacgggggtggtttaaaaagccctcgctgaattcttctgctccccccgggggtaagacttgggcgccactttttaaaacccccttcgtttccccgcctctttctctaatccgctccgccgcccccagttgggaaacaacttttacatgggggaaattgttatagagggcgtgcgccccctttctggtgtgggataaataaacaatacgttgtgctagcgggaggacacctcgtggtaagccaccaattcctcccgcgaatgcccgccagatattaacgaacatttgaagcaaagtattcgagtacaacattcgagaagcgttcaataccacctcctctttctctagatgatacaaatgccatttacttcttgacctccctgccaatattatggtagccacgacagggtactacagaccccactccttttggctccctcactaggcttcatagggccaaactgttctccacacccgtctgaatagtaaatatgttgagcaagaatatgaaccaccacagagatataggaaagtaggaaaatattgtacttccacgaagtttctacgagagaagaaaatggaatcactcacggctgtatgctccactcattgttgggacactatatatacaaagcaaacaggaaaaatatatataacgccccacaacttggagaggaaaatagcccgcctcatcaatagatacaaaaaa

SEQ ID NO: 532404 - DNA, 2819 bp, Homo sapiens
  misc_feature (21)..(21): n is a, c, g, or t
  misc_feature (33)..(33): n is a, c, g, or t
  misc_feature (35)..(35): n is a, c, g, or t
  misc_feature (305)..(305): n is a, c, g, or t
tgagtcggtacctcagagctncctgatggtaanancattcccttggttcacaatctactaccttccacagcagcccaggcgacactgaaaccacactcttacctgacgacaccataacctcaggcctcgtggaggcatctacacccacccacagcagcactggctcgctacacacaacactgacccctgccagctccacaagcgctggccttcaggaagaatctaccactttccagagctggccaagctcaagtgacacaacaccttcacctcccggcaccacagcagcccctgttgaagtatcnacaacctaccacagccgcccgagctcaactccaacaacacacttttctgccagttccacaaccttgggccgtagtgaggaatcaacaacagtccacagcagcccaggtgcaactggaacagcactcttccctacccgctctgcaacctcagttcttgttggagaacctacaacgtcacccatcagttcaggctcaacggaaacaacagcgttacctggcagtaccacaacagcaggcctgagtgagaaatctaccaccttctacagtagccccagatcaccggacacaacactctcacctgccagcacgacaagctcaggcgtcagtgaagaatccaccacctcccacagccgaccaggctcaacgcacacaacagcattccctggcagtaccaccatgccaggcgtcagtcaggaatctacagcttcccacagcagcccaggctccacagacacaacactgtcccctggcagtaccacagcatcatcccttggtccagaatctactaccttccacagcggcccaggctccactgaaacaacactcttacctgacaacaccacagcctcaggcctccttgaagcatctacgcccgtccacagcagcactggatcgccacacacaacactgtcccctgccggctctacaacccgtcagggagaatctaccaccttccagagctggccaaactcgaaggacactacccctgcacctcctactaccacatcagcctttgttgagctatctacaacctcccacggcagcccgagctcaactccaacaacccacttttctgccagctccacaaccttgggccgtagtgaggaatcgacaacagtccacagcagcccagttgcaactgcaacaacaccctcgcctgcccgctccacaacctcaggcctcgttgaagaatctacgacctaccacagcagcccgggctcaactcaaacaatgcacttccctgaaagcgacacaacttcaggccgtggtgaagaatcaacaacttcccacagcagcacaacacacacaatatcttcagctcctagcaccacatctgcccttgttgaagaacctaccagctaccacagcagcccgggctcaactgcaacaacacacttccctgacagctccacaacctcaggccgtagtgaggaatcaacagcatcccacagcagccaagacgcaacgggaacaatagtcctacctgcccgctccacaacctcagttcttcttggagaatctacgacctcacccatcagttcaggctcaatggaaacgacagcgttacccggcagtaccacaacgccaggcctcagtgagaaatctaccactttccacagtagccccagatcaccagccacaacactctcacctgccagcacgacaagctcaggcgtcagtgaagaatccaccacctcccacagccgaccaggctcaacgcacacaacagcattccctgacagcaccaccacgccaggcctcagtcggcattctacaacttcccacagcagcccaggctcaacggatacaacactgttacctgccagcaccaccacctcaggccccagtcaggaatcaacaacttcccacagcagcccaggttcaactgacacagcactgtcccctggcagtaccacagccttatcctttggtcaagaatctacaaccttccacagcagcccaggctccactcacacaacactcttccctgacagcaccacaagctcaggcatcgttgaagcatctacacgcgtccacagcagcactggctcaccacgcacaacactgtcccctgccagctccacaagccctggacttcagggagaatctaccgccttccagacccacccagcctcaactcacacgacgccttcacctcctagcaccgcaacagcccctgttgaagaatctacaacctaccaccgcagcccaggctcgactccaacaacacacttccctgccagctccacaacttcgggccacagtgagaaatcaacaatattccacagcagcccagatgcaagtggaacaacaccctcatctgcccactccacaacctcaggtcgtggagaatctacaacctcacgcatcagtccaggctcaactgaaataacaacgttacctggcagtaccacaacaccaggcctcagtgaggcatctaccaccttctacagcagccccagatcaccaaccacaacactctcacctgccagcatgacaagcctaggcgtcggtgaagaatccaccacctcccgtagccaaccaggttctactcactcaacagtgtcacctgccagcaccaccacgccaggcctcagtgaggaatctaccaccgtctacagcagcagcccaggctcaactgaaaccacagtgttccctcgcagcaccacaacctcagttcgtggtgaagagcctacaaccttccacagccgagccctgagctgcagctagcacctgacgttagcagctcgcgcctgaggtagcagctcgcacaagagaaacagatgcccaggt

SEQ ID NO: 532405 - DNA, 3865 bp, Homo sapiens
  misc_feature (21)..(21): n is a, c, g, or t
  misc_feature (33)..(33): n is a, c, g, or t
  misc_feature (35)..(35): n is a, c, g, or t
  misc_feature (305)..(305): n is a, c, g, or t
  misc_feature (2295)..(2295): n is a, c, g, or t
  misc_feature (3789)..(3789): n is a, c, g, or t
  misc_feature (3797)..(3797): n is a, c, g, or t
  misc_feature (3801)..(3801): n is a, c, g, or t
  misc_feature (3804)..(3805): n is a, c, g, or t
tgagtcggtacctcagagctncctgatggtaanancattcccttggttcacaatctactaccttccacagcagcccaggcgacactgaaaccacactcttacctgacgacaccataacctcaggcctcgtggaggcatctacacccacccacagcagcactggctcgctacacacaacactgacccctgccagctccacaagcgctggccttcaggaagaatctaccactttccagagctggccaagctcaagtgacacaacaccttcacctcccggcaccacagcagcccctgttgaagtatcnacaacctaccacagccgcccgagctcaactccaacaacacacttttctgccagttccacaaccttgggccgtagtgaggaatcaacaacagtccacagcagcccaggtgcaactggaacagcactcttccctacccgctctgcaacctcagttcttgttggagaacctacaacgtcacccatcagttcaggctcaacggaaacaacagcgttacctggcagtaccacaacagcaggcctgagtgagaaatctaccaccttctacagtagccccagatcaccggacacaacactctcacctgccagcacgacaagctcaggcgtcagtgaagaatccaccacctcccacagccgaccaggctcaacgcacacaacagcattccctggcagtaccaccatgccaggcgtcagtcaggaatctacagcttcccacagcagcccaggctccacagacacaacactgtcccctggcagtaccacagcatcatcccttggtccagaatctactaccttccacagcggcccaggctccactgaaacaacactcttacctgacaacaccacagcctcaggcctccttgaagcatctacgcccgtccacagcagcactggatcgccacacacaacactgtcccctgccggctctacaacccgtcagggagaatctaccaccttccagagctggccaaactcgaaggacactacccctgcacctcctactaccacatcagcctttgttgagctatctacaacctcccacggcagcccgagctcaactccaacaacccacttttctgccagctccacaaccttgggccgtagtgaggaatcgacaacagtccacagcagcccagttgcaactgcaacaacaccctcgcctgcccgctccacaacctcaggcctcgttgaagaatctacgacctaccacagcagcccgggctcaactcaaacaatgcacttccctgaaagcgacacaacttcaggccgtggtgaagaatcaacaacttcccacagcagcacaacacacacaatatcttcagctcctagcaccacatctgcccttgttgaagaacctaccagctaccacagcagcccgggctcaactgcaacaacacacttccctgacagctccacaacctcaggccgtagtgaggaatcaacagcatcccacagcagccaagacgcaacgggaacaatagtcctacctgcccgctccacaacctcagttcttcttggagaatctacgacctcacccatcagttcaggctcaatggaaacgacagcgttacccggcagtaccacaacgccaggcctcagtgagaaatctaccactttccacagtagccccagatcaccagccacaacactctcacctgccagcacgacaagctcaggcgtcagtgaagaatccaccacctcccacagccgaccaggctcaacgcacacaacagcattccctgacagcaccaccacgccaggcctcagtcggcattctacaacttcccacagcagcccaggctcaacggatacaacactgttacctgccagcaccaccacctcaggccccagtcaggaatcaacaacttcccacagcagcccaggttcaactgacacagcactgtcccctggcagtaccacagccttatcctttggtcaagaatctacaaccttccacagcagcccaggctccactcacacaacactcttccctgacagcaccacaagctcaggcatcgttgaagcatctacacgcgtccacagcagcactggctcaccacgcacaacactgtcccctgccagctccacaagcgctggccttcaggaagaatctaccactttccagagctggccaagctcaagtgacacaacaccttcacctcccggcaccacagcagcccctgttgaagtatccacaacctaccacagccgcccgagctcaactccaacaacacacttttctgccagttccacaaccttgggccgtagtgagnaatcaacaacagtccacagcagcccaggtgcaactggaacagcactcttccctacccgctctgcaacctcagttcttgttggagaacctacaacgtcacccatcagtccaggctcaactgaaataacaacgttacctggcagtaccacaacaccaggcctcagtgaggcatctaccaccttctacagcagccccagatcaccaaccacaacactctcacctgccagcatgacaagcctaggcgtcggtgaagaatccaccacctcccgtagccaaccaggttctactcactcaacagtgtcacctgccagcaccaccacgccaggcctcagtgaggaatctaccaccgtctacagcagcagcccaggctcaactgaaaccacagtgttccctcgcagcaccacaacctcagttcgtggtgaagagcctacaaccttccacagccggccagcctcaactcacacaacactgttcactgaggacagcaccacctcgggcctcactgaagaatctacagccttccccggcagcccagcctccacccaaacagggttacctgccacactcacaaccgcagacctcggtgaggaatcaactacctttcccagcagctcaggctcaactggaacaacactctcacctgcccgctccaccacctctggcctcgttggagaatccacaccctcacgcctcagtccaagctcaaccgaaacaacaactttacccggcagtcccacaacaccaagcctcagtgagaaatcaaccaccttctacactagccccagatcaccagatgcaacactctcacctgcaaccacaacaagctcaggcgtcagcgaagaatccagcacatcccacagtcaaccaggctcaacgcacacaacagcgttccctgacagcaccaccacctcaggcctcagtcaggaacctacaacttcccacagcagccaaggctcaacagaggcaacactgtcccctggcagtaccacagcctcatcccttggtcaacaatctacaaccttccacagcagcccaggcgacactgaaaccacactcttacctgacgacaccataacctcaggcctcgtggaggcatctacacccacccacagcagcactggctcgctacacacaacactgacccctgccagctccacaagcgctggccttcaggaagaatctaccactttccagagctggccaagctcaagtgacacaacaccttcacctcccggcaccacagcagcccctgttgaagtatccacaacctaccacagccgcccgagctcaactccaacaacacacttttctgccagttccacaaccttgggccgtagtgaggaatcaacaacagtccacagcagcccaggtgcaactggaacagcactcttccctacccgctctgcaacctcagttcttgttggagaacctacaacgtcacccatcagttcaggctcaacggaaacaacagcgttacctggcagtaccacaacancaggcctnagtnagnnatctaccaccttctacagcagcccccccgctgctgaaatgcgggatccttagagtcaccc

SEQ ID NO: 532406 - DNA, 3619 bp, Homo sapiens
  misc_feature (21)..(21): n is a, c, g, or t
  misc_feature (33)..(33): n is a, c, g, or t
  misc_feature (35)..(35): n is a, c, g, or t
  misc_feature (310)..(310): n is a, c, g, or t
  misc_feature (318)..(318): n is a, c, g, or t
  misc_feature (323)..(323): n is a, c, g, or t
  misc_feature (325)..(326): n is a, c, g, or t
  misc_feature (332)..(332): n is a, c, g, or t
  misc_feature (336)..(337): n is a, c, g, or t
  misc_feature (352)..(352): n is a, c, g, or t
  misc_feature (355)..(356): n is a, c, g, or t
  misc_feature (367)..(368): n is a, c, g, or t
  misc_feature (377)..(377): n is a, c, g, or t
  misc_feature (391)..(391): n is a, c, g, or t
  misc_feature (407)..(407): n is a, c, g, or t
  misc_feature (418)..(418): n is a, c, g, or t
  misc_feature (421)..(421): n is a, c, g, or t
  misc_feature (511)..(511): n is a, c, g, or t
  misc_feature (3543)..(3543): n is a, c, g, or t
  misc_feature (3551)..(3551): n is a, c, g, or t
  misc_feature (3555)..(3555): n is a, c, g, or t
  misc_feature (3558)..(3559): n is a, c, g, or t
tgagtcggtacctcagagctncctgatggtaanancattcccttggttcacaatctactaccttccacagcagcccaggcgacactgaaaccacactcttacctgacgacaccataacctcaggcctcgtggaggcatctacacccacccacagcagcactggctcgctacacacaacactgacccctgccagctccacaagcgctggccttcaggaagaatctaccactttccagagctggccaagctcaagtgacacaacaccttcacctcccggcaccacagcagcccctgttgaagtatctacaanctaccacngcagncnnggctcnactnnaacaacacacttccntgnnagctccacaanntcaggccanagtgaggaatcaanagcatcccacagcagnccagatgcaanggnaagtggaacaacaccctcatctgcccactccacaacctcaggtcgtggagaatctacaacctcacgcatcagtccaggctcaactgaaanaacaacaacactgtcccctggcagtaccacagcatcatcccttggtccagaatctactaccttccacagcggcccaggctccactgaaacaacactcttacctgacaacaccacagcctcaggcctccttgaagcatctacgcccgtccacagcagcactggatcgccacacacaacactgtcccctgccggctctacaacccgtcagggagaatctaccaccttccagagctggccaaactcgaaggacactacccctgcacctcctactaccacatcagcctttgttgagctatctacaacctcccacggcagcccgagctcaactccaacaacccacttttctgccagctccacaaccttgggccgtagtgaggaatcgacaacagtccacagcagcccagttgcaactgcaacaacaccctcgcctgcccgctccacaacctcaggcctcgttgaagaatctacgacctaccacagcagcccgggctcaactcaaacaatgcacttccctgaaagcgacacaacttcaggccgtggtgaagaatcaacaacttcccacagcagcacaacacacacaatatcttcagctcctagcaccacatctgcccttgttgaagaacctaccagctaccacagcagcccgggctcaactgcaacaacacacttccctgacagctccacaacctcaggccgtagtgaggaatcaacagcatcccacagcagccaagacgcaacgggaacaatagtcctacctgcccgctccacaacctcagttcttcttggagaatctacgacctcacccatcagttcaggctcaatggaaacgacagcgttacccggcagtaccacaacgccaggcctcagtgagaaatctaccactttccacagtagccccagatcaccagccacaacactctcacctgccagcacgacaagctcaggcgtcagtgaagaatccaccacctcccacagccgaccaggctcaacgcacacaacagcattccctgacagcaccaccacgccaggcctcagtcggcattctacaacttcccacagcagcccaggctcaacggatacaacactgttacctgccagcaccaccacctcaggccccagtcaggaatcaacaacttcccacagcagcccaggttcaactgacacagcactgtcccctggcagtaccacagccttatcctttggtcaagaatctacaaccttccacagcagcccaggctccactcacacaacactcttccctgacagcaccacaagctcaggcatcgttgaagcatctacacgcgtccacagcagcactggctcaccacgcacaacactgtcccctgccagctccacaagccctggacttcagggagaatctaccgccttccagacccacccagcctcaactcacacgacgccttcacctcctagcaccgcaacagcccctgttgaagaatctacaacctaccaccgcagcccaggctcgactccaacaacacacttccctgccagctccacaacttcgggccacagtgagaaatcaacaatattccacagcagcccagatgcaagtggaacaacaccctcatctgcccactccacaacctcaggtcgtggagaatctacaacctcacgcatcagtccaggctcaactgaaataacaacgttacctggcagtaccacaacaccaggcctcagtgaggcatctaccaccttctacagcagccccagatcaccaaccacaacactctcacctgccagcatgacaagcctaggcgtcggtgaagaatccaccacctcccgtagccaaccaggttctactcactcaacagtgtcacctgccagcaccaccacgccaggcctcagtgaggaatctaccaccgtctacagcagcagcccaggctcaactgaaaccacagtgttccctcgcagcaccacaacctcagttcgtggtgaagagcctacaaccttccacagccggccagcctcaactcacacaacactgttcactgaggacagcaccacctcgggcctcactgaagaatctacagccttccccggcagcccagcctccacccaaacagggttacctgccacactcacaaccgcagacctcggtgaggaatcaactacctttcccagcagctcaggctcaactggaacaacactctcacctgcccgctccaccacctctggcctcgttggagaatccacaccctcacgcctcagtccaagctcaaccgaaacaacaactttacccggcagtcccacaacaccaagcctcagtgagaaatcaaccaccttctacactagccccagatcaccagatgcaacactctcacctgcaaccacaacaagctcaggcgtcagcgaagaatccagcacatcccacagtcaaccaggctcaacgcacacaacagcgttccctgacagcaccaccacctcaggcctcagtcaggaacctacaacttcccacagcagccaaggctcaacagaggcaacactgtcccctggcagtaccacagcctcatcccttggtcaacaatctacaaccttccacagcagcccaggcgacactgaaaccacactcttacctgacgacaccataacctcaggcctcgtggaggcatctacacccacccacagcagcactggctcgctacacacaacactgacccctgccagctccacaagcgctggccttcaggaagaatctaccactttccagagctggccaagctcaagtgacacaacaccttcacctcccggcaccacagcagcccctgttgaagtatccacaacctaccacagccgcccgagctcaactccaacaacacacttttctgccagttccacaaccttgggccgtagtgaggaatcaacaacagtccacagcagcccaggtgcaactggaacagcactcttccctacccgctctgcaacctcagttcttgttggagaacctacaacgtcacccatcagttcaggctcaacggaaacaacagcgttacctggcagtaccacaacancaggcctnagtnagnnatctaccaccttctacagcagcccccccgctgctgaaatgcgggatccttagagtcaccc

SEQ ID NO: 532407 - DNA, 165 bp, Homo sapiens
cgcagtggtgtgctgagtgcaggcatgccgggatgagccatgtgcgggggccgcagctgggcggcagaggcggaggtgcctggtggccggggcgcggagtgggccggggggctccggcggggctgctctcccccagcccccgccgtgctccccccgggctgggct

SEQ ID NO: 532408 - DNA, 115 bp, Homo sapiens
cagccttgagaaccagactcccaactatgtacaatgaaaacttactttcaatcttcctgacatcaaattttccatccggcctgcttcttctcacatgacaaaaactagcccccat

SEQ ID NO: 532409 - DNA, 239 bp, Homo sapiens
ctcacctccagcagatctgcaagtgtggggtgaagaaaggtgaatctgtgtgaggatggggttagctgcagctgtggtgatgggctgagcgggggcggggggtgctggaggctgagggtgtagctggcgattagctaaggagggcgatggaagaggttgccagttcggagccgcctcaagagttccagccacagcaactagccgctcccgatgggtgcccttcatgaggctgctgttct

SEQ ID NO: 532410 - DNA, 3535 bp, Homo sapiens
  misc_feature (21)..(21): n is a, c, g, or t
  misc_feature (33)..(33): n is a, c, g, or t
  misc_feature (35)..(35): n is a, c, g, or t
  misc_feature (305)..(305): n is a, c, g, or t
  misc_feature (3459)..(3459): n is a, c, g, or t
  misc_feature (3467)..(3467): n is a, c, g, or t
  misc_feature (3471)..(3471): n is a, c, g, or t
  misc_feature (3474)..(3475): n is a, c, g, or t
tgagtcggtacctcagagctncctgatggtaanancattcccttggttcacaatctactaccttccacagcagcccaggcgacactgaaaccacactcttacctgacgacaccataacctcaggcctcgtggaggcatctacacccacccacagcagcactggctcgctacacacaacactgacccctgccagctccacaagcgctggccttcaggaagaatctaccactttccagagctggccaagctcaagtgacacaacaccttcacctcccggcaccacagcagcccctgttgaagtatcnacaacctaccacagccgcccgagctcaactccaacaacacacttttctgccagttccacaaccttgggccgtagtgaggaatcaacaacagtccacagcagcccaggtgcaactggaacagcactcttccctacccgctctgcaacctcagttcttgttggagaacctacaacgtcacccatcagttcaggctcaacggaaacaacagcgttacctggcagtaccacaacagcaggcctgagtgagaaatctaccaccttctacagtagccccagatcaccggacacaacactctcacctgccagcacgacaagctcaggcgtcagtgaagaatccaccacctcccacagccgaccaggctcaacgcacacaacagcattccctggcagtaccaccatgccaggcgtcagtcaggaatctacagcttcccacagcagcccaggctccacagacacaacactgtcccctggcagtaccacagcatcatcccttggtccagaatctactaccttccacagcggcccaggctccactgaaacaacactcttacctgcccgctccacaacctcaggcctcgttgaagaatctacgacctaccacagcagcccgggctcaactcaaacaatgcacttccctgaaagcgacacaacttcaggccgtggtgaagaatcaacaacttcccacagcagcacaacacacacaatatcttcagctcctagcaccacatctgcccttgttgaagaacctaccagctaccacagcagcccgggctcaactgcaacaacacacttccctgacagctccacaacctcaggccgtagtgaggaatcaacagcatcccacagcagccaagacgcaacgggaacaatagtcctacctgcccgctccacaacctcagttcttcttggagaatctacgacctcacccatcagttcaggctcaatggaaacgacagcgttacccggcagtaccacaacgccaggcctcagtgagaaatctaccactttccacagtagccccagatcaccagccacaacactctcacctgccagcacgacaagctcaggcgtcagtgaagaatccaccacctcccacagccgaccaggctcaacgcacacaacagcattccctgacagcaccaccacgccaggcctcagtcggcattctacaacttcccacagcagcccaggctcaacggatacaacactgttacctgccagcaccaccacctcaggccccagtcaggaatcaacaacttcccacagcagcccaggttcaactgacacagcactgtcccctggcagtaccacagccttatcctttggtcaagaatctacaaccttccacagcagcccaggctccactcacacaacactcttccctgacagcaccacaagctcaggcatcgttgaagcatctacacgcgtccacagcagcactggctcaccacgcacaacactgtcccctgccagctccacaagccctggacttcagggagaatctaccgccttccagacccacccagcctcaactcacacgacgccttcacctcctagcaccgcaacagcccctgttgaagaatctacaacctaccaccgcagcccaggctcgactccaacaacacacttccctgccagctccacaacttcgggccacagtgagaaatcaacaatattccacagcagcccagatgcaagtggaacaacaccctcatctgcccactccacaacctcaggtcgtggagaatctacaacctcacgcatcagtccaggctcaactgaaataacaacgttacctggcagtaccacaacaccaggcctcagtgaggcatctaccaccttctacagcagccccagatcaccaaccacaacactctcacctgccagcatgacaagcctaggcgtcggtgaagaatccaccacctcccgtagccaaccaggttctactcactcaacagtgtcacctgccagcaccaccacgccaggcctcagtgaggaatctaccaccgtctacagcagcagcccaggctcaactgaaaccacagtgttccctcgcagcaccacaacctcagttcgtggtgaagagcctacaaccttccacagccggccagcctcaactcacacaacactgttcactgaggacagcaccacctcgggcctcactgaagaatctacagccttccccggcagcccagcctccacccaaacagggttacctgccacactcacaaccgcagacctcggtgaggaatcaactacctttcccagcagctcaggctcaactggaacaacactctcacctgcccgctccaccacctctggcctcgttggagaatccacaccctcacgcctcagtccaagctcaaccgaaacaacaactttacccggcagtcccacaacaccaagcctcagtgagaaatcaaccaccttctacactagccccagatcaccagatgcaacactctcacctgcaaccacaacaagctcaggcgtcagcgaagaatccagcacatcccacagtcaaccaggctcaacgcacacaacagcgttccctgacagcaccaccacctcaggcctcagtcaggaacctacaacttcccacagcagccaaggctcaacagaggcaacactgtcccctggcagtaccacagcctcatcccttggtcaacaatctacaaccttccacagcagcccaggcgacactgaaaccacactcttacctgacgacaccataacctcaggcctcgtggaggcatctacacccacccacagcagcactggctcgctacacacaacactgacccctgccagctccacaagcgctggccttcaggaagaatctaccactttccagagctggccaagctcaagtgacacaacaccttcacctcccggcaccacagcagcccctgttgaagtatccacaacctaccacagccgcccgagctcaactccaacaacacacttttctgccagttccacaaccttgggccgtagtgaggaatcaacaacagtccacagcagcccaggtgcaactggaacagcactcttccctacccgctctgcaacctcagttcttgttggagaacctacaacgtcacccatcagttcaggctcaacggaaacaacagcgttacctggcagtaccacaacancaggcctnagtnagnnatctaccaccttctacagcagcccccccgctgctgaaatgcgggatccttagagtcaccc

SEQ ID NO: 532411 - DNA, 431 bp, Homo sapiens
gtcaagtcaacatgctctggctcatatagcagagcctcggcctccacatctagctcgcccctctccgtcgccttgctcgccgatctgctgcagtacccaccgcagccggagataatgggcatcgaggcggtcggatccattgtccatcgcctgagctgagcttctctgctgccactggtgccatggcaacgacagatcctaaaagcatggaagtggaggtgctggttggtcgcattacaattaaggttcatcatggccgggatatataacctgagattgacaccggcctacacacagcagatttcaactacatctccataataaattttcgtatgtgcaattcagatggatcatgtactgtatgattgtggtggttacttgtgactgccggtggagtcaactacgatattatttcgagtttgtgtgtctat

SEQ ID NO: 532412 - DNA, 158 bp, Homo sapiens
tactacaatgtaaataactcacgtatagtggggaggggagttccaagtgtgccctcctctcttactcctgcctggattatttaaaaagccatgtgtggaaaccactatttaataaaagtaatagaatctgcaaagttggacggagcgagaattcgtgg

SEQ ID NO: 532413 - DNA, 238 bp, Homo sapiens
gtcgacgggtggttagggcacaggctgaaattagcttttgctgagaggaggaaggagagggagtctatgagagagagttcagctgaagaatgggagaccctgaatgcaagctaatatggacgttggctgggaggcagccagattagcctagttggttaagataaatcattagacttcccaggtattgaggcaaaacttgaaaataaattatggtctctctgtgtcgttgtcgacgcgg

SEQ ID NO: 532414 - DNA, 443 bp, Homo sapiens
  misc_feature (14)..(14): n is a, c, g, or t
  misc_feature (22)..(22): n is a, c, g, or t
  misc_feature (87)..(87): n is a, c, g, or t
cctacctttctccnggaagtcncccattggagctccatcaagactgaccgtgtcttacatcagttcagagaggtcccagcagacccnggagcacagatgggtcagcctactcagttctcccactgggctccctgttttcagaatggtctgtgtgtggagaagactcctaagtgccctgggaataggtgggctgtgggtgaagcggatgaaggcgatacagagcgaggacgtggcctgaaaccgagagcagcattctcccttccctgcttccatccgttcctggtctgcgtcccagccctggtacgtaaggctgtcccagaatccctgtaaattcacttttctgttaaatgattccagatcattcggttatgtgcaaccaaaagtcctcacccatacgtcatcttacagcattaaagcttcaggcgacttgggtatgttttaaa

SEQ ID NO: 532415 - DNA, 583 bp, Homo sapiens
gatgaaacataaagtggcaggcagatacaagtatcacatccccttccccacaagggactgtgaatatgggattaatgtccttgccattacctaggtggtctacagccctatcactaacattttacatcgtttctcagtagggatttgggcatgctaacttactgtatagaaagtttcaactttatcctcacgcgccatgtgatagaaaatgccttgccatctcaagagatggtgcatagggcggggccagggtgcatgtggctaccacgccgtgtcaatcccgagcacgttctggggacgggccgaggcaacgtggatcatgtcgaggtcaccgagttctgacgatcagcctggccaatatggtgaaaccccgtcttctacgaataatacaagagaattagctgggggatggtggcatgctaccgtagtcaccattgatatcgtcgggaagcgagaggtaggagaatcacttgagcctgggacgctgaagttgcagtgagcccgagatcgcatccacgtgctactccagcctgggtaacaagaagtgagactctgtctaaagagaccaagattgttctccaag

SEQ ID NO: 532416 - DNA, 171 bp, Homo sapiens
  misc_feature (41)..(41): n is a, c, g, or t
  misc_feature (82)..(82): n is a, c, g, or t
  misc_feature (106)..(106): n is a, c, g, or t
  misc_feature (125)..(125): n is a, c, g, or t
  misc_feature (154)..(154): n is a, c, g, or t
  misc_feature (167)..(167): n is a, c, g, or t
tactccattcgccattccataagtatgcctgctatgagganttctcctactttcaaatcatttgaggagagggttgagacanctgtcacaagcctcaagacgaaantaggcggtacgacccctantggaggcagtttttagggaggtcctcagnttccacgggcccnttcc

SEQ ID NO: 532417 - DNA, 285 bp, Homo sapiens
attttttacatattgccaattgtgacttagccaagtgtctttattcaaagactaataaagccttcacagcttccgaaacaccgcgctagatctggtagccgcggacaatttggattccttactccagtagggaaacgattcaacaactagcagcgtttcacgacagcctattaaagagcttctatgtatagtgtagatggttcatttgaaatggcaaatttctttttcggcaaaataaatgggcctggcaaacttggtttttaaaagaaaattaaaacttcattc

SEQ ID NO: 532418 - DNA, 113 bp, Homo sapiens
ttggggctcccccccggggggggcccctttaaaaaaattggatcccccggggtgcaggaatttggcccaaaaataaatcacccacccccccagaagggaaaccttggggggcc

SEQ ID NO: 532419 - DNA, 258 bp, Homo sapiens
cagcaatcgcagctcggtaccctttttttttaagcacaggcaaacacatttcttgcagcagccagtggggtgcgcccaagccctgtgctttggcaaccgccatccacagcgccccttcacaaccagcccgtgtgcaggtcaggtgcaaggcagccccacttccccacatgcagcaccactgcaaggctcaaccagctccccttaggcactccccaggagcaaggggcatcctctagcagtcgcacctgccaggctatg

SEQ ID NO: 532420 - DNA, 169 bp, Homo sapiens
  misc_feature (16)..(16): n is a, c, g, or t
gccggccagcggacangcaagagacagaaatcaaagaaataaccaaaaagaaacatagagattttttttttttggagacggagtctcgcccggtcgcccaggcgggagtgcaagggtgtgatctcggctcacggcaagctccgcctccggggttcacgacattctccgg

SEQ ID NO: 532421 - DNA, 616 bp, Homo sapiens
gccaaactctttggttcccgcaacactctgggggacaaaacaaaagggtgcacacgccccccggccccaaaacaggactttgggtgccaaaaggcaacgaggggctcacaagtaaatacgcccgcggtcgaggatgtccccgcgatgtccccgtgcgggcgtgagctggattctttataacaaccatgtgtcaaaccgccgccgatgtatccacgccagggtgctcgcgacacgtccccctgtatatgtggctgtttactttttaaacagacagtaccgccgctggcccccacagggggtatgtgaaaccaggtacgtccaatggtgggacgttcaccaacaaagacctttgcagctaccaggttaaatgtccctcaagagaccaccccaccttgagcacgttatcgcccgccgtagaaaagaccgccctatagagttcaggcggggctggaattccccttgtttagaaagggggtggcaacgaacacgggctcgatgttcttcggcgtttgaaatagcaaaacaacaaggggcgctactcaccgggaaggaaaaacagaggcgaaaaggtccaaaaaaaaagaaacaagcaaaattccgccccgccacaaatcaa

SEQ ID NO: 532422 - DNA, 221 bp, Homo sapiens
gctgccatgaggagacttgttgaaataacacggggggatgggaaggagcttacggtggccagcctggtgcagtgtgagcgtgagaataaacaggctgggcgcagcggctcacgcctgcaatcccagcactttaggaggccaaggtggtaggatcacttgaggctaggagttcaagaccagcctgggcaacatggtcgaaaccctgtctctacaaaacaaga

SEQ ID NO: 532423 - DNA, 118 bp, Homo sapiens
taacaatcactggataccgaagtaaactgatatactgaattccatagtacataacattcaatattttaccacttctgtttagcgaacgtgtatacttattttctgttcggtttaatga

SEQ ID NO: 532424 - DNA, 178 bp, Homo sapiens
tgtttcagttttgatgttttctattaaccatttatctaacttactaatattctgttctattgattctaacctatacaatttattcagtcatttaaaccaatggttgtattttttccagttataggatttctatatgattacttttaatgattccggacccattatttgataatatttt

SEQ ID NO: 532425 - DNA, 113 bp, Homo sapiens
tgtagttgagcaggtgtaggtgggagcatacctggtaccctggggtcgggggagactctggggtgcccagtgacgggaaagagggcatgctagtcattgctgtgcactgcatg

SEQ ID NO: 532426 - DNA, 654 bp, Homo sapiens
ggtggcacccatacatgcctgcccatatgcgatgcaccacatacagccacttcctggaaccgctgaatgacttcacggagcgatcgctacacagcacattttgcacgcgccacgcagccccgacttgctcgaaactcaacttgagctggctggtggtccctggatcctggagcccttcagttaggattactccctctttcttgcgctatatttgatagttggaagaaatatactgacagttatggtgcaatctttatgcggggaaagtaaagcctcacgaatgcccacagcctttctttcaaagactttgactctgacacctcttaagagataagattaaaggcccctggatggtgttgctgtgtagatgatgtggagagaagagggggaccaaaaatagggcctagctcccccaaaagtagaaaaacctgcagcgatcaccctcatgaggggcccctgcctgtaccgtcgcgcccctcttctgcccttctgccagtgtgtattgtagaaatgagatgttgtatggcgcatccccttatacgaggccgtccctgtcgatggggcagatggttctaaaaaaatgtcaataaatgaccaggataagtgccctcctacggccacgcaagtaacatgagaagatggaatctgagagtg

SEQ ID NO: 532427 - DNA, 373 bp, Homo sapiens
  misc_feature (204)..(204): n is a, c, g, or t
gcggtatctagaggatcccgaaaccctaataacgccgcacaaaaaacttttaattcataaaagaaactacagtacacaggaagacagtattactattcaaaataactactaacctcctgacctctctacctctccatgggcaaaaattattgctgcatgagtaaaaacacgcagtaatcaacctctccagcttctccccattgnacacactgctttctaagaatgagtgccactcattcatagcaatttctggcctattgacacatgactttggaatattaaaaatgtagtttcaaccataacaatttttgggagagaagcctttagcgtatgggacaaatggcatataattataaaactaaaatacaatatc

SEQ ID NO: 532428 - DNA, 178 bp, Homo sapiens
cgcttgtaccctctcggtctatcggggttatcgattatagaacaggctcctctaggtggatgtgaagcaccgccaagtcctttgagttttaggcagttgcgagtagtactctggcgaatagtttggttatgtaactatttgggtttaggatcaggtatagggaggaattataacccag

SEQ ID NO: 532429 - DNA, 3704 bp, Homo sapiens
  misc_feature (21)..(21): n is a, c, g, or t
  misc_feature (33)..(33): n is a, c, g, or t
  misc_feature (35)..(35): n is a, c, g, or t
  misc_feature (305)..(305): n is a, c, g, or t
  misc_feature (3628)..(3628): n is a, c, g, or t
  misc_feature (3636)..(3636): n is a, c, g, or t
  misc_feature (3640)..(3640): n is a, c, g, or t
  misc_feature (3643)..(3644): n is a, c, g, or t
tgagtcggtacctcagagctncctgatggtaanancattcccttggttcacaatctactaccttccacagcagcccaggcgacactgaaaccacactcttacctgacgacaccataacctcaggcctcgtggaggcatctacacccacccacagcagcactggctcgctacacacaacactgacccctgccagctccacaagcgctggccttcaggaagaatctaccactttccagagctggccaagctcaagtgacacaacaccttcacctcccggcaccacagcagcccctgttgaagtatcnacaacctaccacagccgcccgagctcaactccaacaacacacttttctgccagttccacaaccttgggccgtagtgaggaatcaacaacagtccacagcagcccaggtgcaactggaacagcactcttccctacccgctctgcaacctcagttcttgttggagaacctacaacgtcacccatcagttcaggctcaacggaaacaacagcgttacctggcagtaccacaacagcaggcctgagtgagaaatctaccaccttctacagtagccccagatcaccggacacaacactctcacctgccagcacgacaagctcaggcgtcagtgaagaatccaccacctcccacagccgaccaggctcaacgcacacaacagcattccctggcagtaccaccatgccaggcgtcagtcaggaatctacagcttcccacagcagcccaggctccacagacacaacactgtcccctggcagtaccacagcatcatcccttggtccagaatctactaccttccacagcggcccaggctccactgaaacaacactcttacctgacaacaccacagcctcaggcctccttgaagcatctacgcccgtccacagcagcactggatcgccacacacaacactgtcccctgccggctctacaacccgtcagggagaatctaccaccttccagagctggccaaactcgaaggacactacccctgcacctcctactaccacatcagcctttgttgagctatctacaacctcccacggcagcccgagctcaactccaacaacccacttttctgccagctccacaaccttgggccgtagtgaggaatcgacaacagtccacagcagcccagttgcaactgcaacaacaccctcgcctgcccgctccacaacctcaggcctcgttgaagaatctacgacctaccacagcagcccgggctcaactcaaacaatgcacttccctgaaagcgacacaacttcaggccgtggtgaagaatcaacaacttcccacagcagcacaacacacacaatatcttcagctcctagcaccacatctgcccttgttgaagaacctaccagctaccacagcagcccgggctcaactgcaacaacacacttccctgacagctccacaacctcaggccgtagtgaggaatcaacagcatcccacagcagccaagacgcaacgggaacaatagtcctacctgcccgctccacaacctcagttcttcttggagaatctacgacctcacccatcagttcaggctcaatggaaacgacagcgttacccggcagtaccacaacgccaggcctcagtgagaaatctaccactttccacagtagccccagatcaccagccacaacactctcacctgccagcacgacaagctcaggcgtcagtgaagaatccaccacctcccacagccgaccaggctcaacgcacacaacagcattccctgacagcaccaccacgccaggcctcagtcggcattctacaacttcccacagcagcccaggctcaacggatacaacactgttacctgccagcaccaccacctcaggccccagtcaggaatcaacaacttcccacagcagcccaggttcaactgacacagcactgtcccctggcagtaccacagccttatcctttggtcaagaatctacaaccttccacagcagcccaggctccactcacacaacactcttccctgacagcaccacaagctcaggcatcgttgaagcatctacacgcgtccacagcagcactggctcaccacgcacaacactgtcccctgccagctccacaagccctggacttcagggagaatctaccgccttccagacccacccagcctcaactcacacgacgccttcacctcctagcaccgcaacagcccctgttgaagaatctacaacctaccaccgcagcccaggctcgactccaacaacacacttccctgccagctccacaacttcgggccacagtgagaaatcaacaatattccacagcagcccagatgcaagtggaacaacaccctcatctgcccactccacaacctcaggtcgtggagaatctacaacctcacgcatcagtccaggctcaactgaaataacaacgttacctggcagtaccacaacaccaggcctcagtgaggcatctaccaccttctacagccgtctacagcagcagcccaggctcaactgaaaccacagtgttccctcgcagcaccacaacctcagttcgtggtgaagagcctacaaccttccacagccggccagcctcaactcacacaacactgttcactgaggacagcaccacctcgggcctcactgaagaatctacagccttccccggcagcccagcctccacccaaacagggttacctgccacactcacaaccgcagacctcggtgaggaatcaactacctttcccagcagctcaggctcaactggaacaacactctcacctgcccgctccaccacctctggcctcgttggagaatccacaccctcacgcctcagtccaagctcaaccgaaacaacaactttacccggcagtcccacaacaccaagcctcagtgagaaatcaaccaccttctacactagccccagatcaccagatgcaacactctcacctgcaaccacaacaagctcaggcgtcagcgaagaatccagcacatcccacagtcaaccaggctcaacgcacacaacagcgttccctgacagcaccaccacctcaggcctcagtcaggaacctacaacttcccacagcagccaaggctcaacagaggcaacactgtcccctggcagtaccacagcctcatcccttggtcaacaatctacaaccttccacagcagcccaggcgacactgaaaccacactcttacctgacgacaccataacctcaggcctcgtggaggcatctacacccacccacagcagcactggctcgctacacacaacactgacccctgccagctccacaagcgctggccttcaggaagaatctaccactttccagagctggccaagctcaagtgacacaacaccttcacctcccggcaccacagcagcccctgttgaagtatccacaacctaccacagccgcccgagctcaactccaacaacacacttttctgccagttccacaaccttgggccgtagtgaggaatcaacaacagtccacagcagcccaggtgcaactggaacagcactcttccctacccgctctgcaacctcagttcttgttggagaacctacaacgtcacccatcagttcaggctcaacggaaacaacagcgttacctggcagtaccacaacancaggcctnagtnagnnatctaccaccttctacagcagcccccccgctgctgaaatgcgggatccttagagtcaccc

SEQ ID NO: 532430 - DNA, 819 bp, Homo sapiens
ttttggacgccatgggcaattgggaaacaaaggggtcccctactcgggaaatgggcacaacatgtagggaagggagtggaatggtagaattgccgcagttcagacctgggagaaggaaagaggaaaggatctacacgtagattcccagcattctcttgagcgacctttttccgttgggcgcaaattctttaggacataaagaagattctgagcctttgaccgcctgggaccggtatcattccagtcgttatctggacttattggaccggtgtcctcccctccgtgattcgttaattcaccgtttgcttttcatgtgcataagttgactcatttgtttcctgttagcatttgaaaccaccatattagccccccataagtcctgaccaaatgacttttaataaggagggggaaggtcccatgtcccaccctcctatgaaatttttggcctgattcgaccagtctgacccccacataagagaagtagttatgttctgtaaagaagaggttgataaaaacccttagcctggtgttttgtgacttagaagttttaagtagtcgttcttatatctaagcctttattaattttggtaaggaccatactatacgtttctgatgtcacctttactgttaagaggtgcccgggatctggtgacccgtcacttccggatttgtgtgaatcagatcatctaaatataatataaattagagactggtacttgtatttcctgatttaaaaccaagtacgtctgttttactattgaagtaagagtactttataatggataccaaaatgtatatttaatatcccgtagagcctga

SEQ ID NO: 532431 - DNA, 3340 bp, Homo sapiens
  misc_feature (21)..(21): n is a, c, g, or t
  misc_feature (33)..(33): n is a, c, g, or t
  misc_feature (35)..(35): n is a, c, g, or t
  misc_feature (305)..(305): n is a, c, g, or t
  misc_feature (3264)..(3264): n is a, c, g, or t
  misc_feature (3272)..(3272): n is a, c, g, or t
  misc_feature (3276)..(3276): n is a, c, g, or t
  misc_feature (3279)..(3280): n is a, c, g, or t
tgagtcggtacctcagagctncctgatggtaanancattcccttggttcacaatctactaccttccacagcagcccaggcgacactgaaaccacactcttacctgacgacaccataacctcaggcctcgtggaggcatctacacccacccacagcagcactggctcgctacacacaacactgacccctgccagctccacaagcgctggccttcaggaagaatctaccactttccagagctggccaagctcaagtgacacaacaccttcacctcccggcaccacagcagcccctgttgaagtatcnacaacctaccacagccgcccgagctcaactccaacaacacacttttctgccagttccacaaccttgggccgtagtgaggaatcaacaacagtccacagcagcccaggtgcaactggaacagcactcttccctacccgctctgcaacctcagttcttgttggagaacctacaacgtcacccatcagttcaggctcaacggaaacaacagcgttacctggcagtaccacaacagcaggcctgagtgagaaatctaccaccttctacagtagccccagatcaccggacacaacactctcacctgccagcacgacaagctcaggcgtcagtgaagaatccaccacctcccacagccgaccaggctcaacgcacacaacagcattccctggcagtaccaccatgccaggcgtcagtcaggaatctacagcttcccacagcagcccaggctccacagacacaacactgtcccctggcagtaccacagcatcatcccttggtccagaatctactaccttccacagcggcccaggctccactgaaacaacactcttacctgacaacaccacagcctcaggcctccttgaagcatctacgcccgtccacagcagcactggatcgccacacacaacactgtcccctgccggctctacaacccgtcagggagaatctaccaccttccagagctggccaaactcgaaggacactacccctgcacctcctactaccacatcagcctttgttgagctatctacaacctcccacggcagcccgagctcaactccaacaacccacttttctgccagctccacaaccttgggccgtagtgaggaatcgacaacagtccacagcagcccagttgcaactgcaacaacaccctcgcctgcccgctccacaacctcaggcctcgttgaagaatctacgacctaccacagcagcccgggctcaactcaaacaatgcacttccctgaaagcgacacaacttcaggccgtggtgaagaatcaacaacttcccacagcagcacaacacacacaatatcttcagctcctagcaccacatctgcccttgttgaagaacctaccagctaccacagcagcccgggctcaactgcaacaacacacttccctgacagctccacaacctcaggccgtagtgaggaatcaacagcatcccacagcagccaagacgcaacgggaacaatagtcctacctgcccgctccacaacctcagttcttcttggagaatctacgacctcaccacgcacaacactgtcccctgccagctccacaagccctggacttcagggagaatctaccgccttccagacccacccagcctcaactcacacgacgccttcacctcctagcaccgcaacagcccctgttgaagaatctacaacctaccaccgcagcccaggctcgactccaacaacacacttccctgccagctccacaacttcgggccacagtgagaaatcaacaatattccacagcagcccagatgcaagtggaacaacaccctcatctgcccactccacaacctcaggtcgtggagaatctacaacctcacgcatcagtccaggctcaactgaaataacaacgttacctggcagtaccacaacaccaggcctcagtgaggcatctaccaccttctacagcagccccagatcaccaaccacaacactctcacctgccagcatgacaagcctaggcgtcggtgaagaatccaccacctcccgtagccaaccaggttctactcactcaacagtgtcacctgccagcaccaccacgccaggcctcagtgaggaatctaccaccgtctacagcagcagcccaggctcaactgaaaccacagtgttccctcgcagcaccacaacctcagttcgtggtgaagagcctacaaccttccacagccggccagcctcaactcacacaacactgttcactgaggacagcaccacctcgggcctcactgaagaatctacagccttccccggcagcccagcctccacccaaacagggttacctgccacactcacaaccgcagacctcggtgaggaatcaactacctttcccagcagctcaggctcaactggaacaacactctcacctgcccgctccaccacctctggcctcgttggagaatccacaccctcacgcctcagtccaagctcaaccgaaacaacaactttacccggcagtcccacaacaccaagcctcagtgagaaatcaaccaccttctacactagccccagatcaccagatgcaacactctcacctgcaaccacaacaagctcaggcgtcagcgaagaatccagcacatcccacagtcaaccaggctcaacgcacacaacagcgttccctgacagcaccaccacctcaggcctcagtcaggaacctacaacttcccacagcagccaaggctcaacagaggcaacactgtcccctggcagtaccacagcctcatcccttggtcaacaatctacaaccttccacagcagcccaggcgacactgaaaccacactcttacctgacgacaccataacctcaggcctcgtggaggcatctacacccacccacagcagcactggctcgctacacacaacactgacccctgccagctccacaagcgctggccttcaggaagaatctaccactttccagagctggccaagctcaagtgacacaacaccttcacctcccggcaccacagcagcccctgttgaagtatccacaacctaccacagccgcccgagctcaactccaacaacacacttttctgccagttccacaaccttgggccgtagtgaggaatcaacaacagtccacagcagcccaggtgcaactggaacagcactcttccctacccgctctgcaacctcagttcttgttggagaacctacaacgtcacccatcagttcaggctcaacggaaacaacagcgttacctggcagtaccacaacancaggcctnagtnagnnatctaccaccttctacagcagcccccccgctgctgaaatgcgggatccttagagtcaccc

SEQ ID NO: 532432 - DNA, 637 bp, Homo sapiens
atgaatgccatctctgtgctggcagtgccttctttccatgtccatttccatgtgagttcaatcctgccctgtcaccacagatgatcacccccatgtgccccggtgtctaggcccttgatcccccaccgtccaccatccatggttgcttgaccaccatcaccagtaggtgagataccatactaaaggtggtgagacgactatttgaccctgagacagtgcttacttagcaggagacattgaattgcattactaacaaaactgctatgacataacaccatgaatcggacgcaccttgaatgtcccctgtgcattgcgcaacctgtatgacacattacgcgatgtggccaatgtgacataaatgagactgtcgacactgacacaccgttgcggacggtaggaagcatatggcacggctgatcgcgacatatagacagagcaatggaatcatctataccccataccactgtgattagtccctaccaagttgaagacattcacaatcagcttatacactctatagcctagtgccgcacaccgggtataaatcattacacaagtgtgtgcccatttgggttatgcaatcgacacgcgttaccatccccgctcttggcccgcacatctggaaacccctcatttg

SEQ ID NO: 532433 - DNA, 3026 bp, Homo sapiens
  misc_feature (21)..(21): n is a, c, g, or t
  misc_feature (33)..(33): n is a, c, g, or t
  misc_feature (35)..(35): n is a, c, g, or t
  misc_feature (305)..(305): n is a, c, g, or t
tgagtcggtacctcagagctncctgatggtaanancattcccttggttcacaatctactaccttccacagcagcccaggcgacactgaaaccacactcttacctgacgacaccataacctcaggcctcgtggaggcatctacacccacccacagcagcactggctcgctacacacaacactgacccctgccagctccacaagcgctggccttcaggaagaatctaccactttccagagctggccaagctcaagtgacacaacaccttcacctcccggcaccacagcagcccctgttgaagtatcnacaacctaccacagccgcccgagctcaactccaacaacacacttttctgccagttccacaaccttgggccgtagtgaggaatcaacaacagtccacagcagcccaggtgcaactggaacagcactcttccctacccgctctgcaacctcagttcttgttggagaacctacaacgtcacccatcagttcaggctcaacggaaacaacagcgttacctggcagtaccacaacagcaggcctgagtgagaaatctaccaccttctacagtagccccagatcaccggacacaacactctcacctgccagcacgacaagctcaggcgtcagtgaagaatccaccacctcccacagccgaccaggctcaacgcacacaacagcattccctggcagtaccaccatgccaggcgtcagtcaggaatctacagcttcccacagcagcccaggctccacagacacaacactgtcccctggcagtaccacagcatcatcccttggtccagaatctactaccttccacagcggcccaggctccactgaaacaacactcttacctgacaacaccacagcctcaggcctccttgaagcatctacgcccgtccacagcagcactggatcgccacacacaacactgtcccctgccggctctacaacccgtcagggagaatctaccaccttccagagctggccaaactcgaaggacactacccctgcacctcctactaccacatcagcctttgttgagctatctacaacctcccacggcagcccgagctcaactccaacaacccacttttctgccagctccacaaccttgggccgtagtgaggaatcgacaacagtccacagcagcccagttgcaactgcaacaacaccctcgcctgcccgctccacaacctcaggcctcgttgaagaatctacgacctaccacagcagcccgggctcaactcaaacaatgcacttccctgaaagcgacacaacttcaggccgtggtgaagaatcaacaacttcccacagcagcacaacacacacaatatcttcagctcctagcaccacatctgcccttgttgaagaacctaccagctaccacagcagcccgggctcaactgcaacaacacacttccctgacagctccacaacctcaggccgtagtgaggaatcaacagcatcccacagcagccaagacgcaacgggaacaatagtcctacctgcccgctccacaacctcagttcttcttggagaatctacgacctcacccatcagttcaggctcaatggaaacgacagcgttacccggcagtaccacaacgccaggcctcagtgagaaatctaccactttccacagtagccccagatcaccagccacaacactctcacctgccagcacgacaagctcaggcgtcagtgaagaatccaccacctcccacagccgaccaggctcaacgcacacaacagcattccctgacagcaccaccacgccaggcctcagtcggcattctacaacttcccacagcagcccaggctcaacggatacaacactgttacctgccagcaccaccacctcaggccccagtcaggaatcaacaacttcccacagcagcccaggttcaactgacacagcactgtcccctggcagtaccacagccttatcctttggtcaagaatctacaaccttccacagcagcccaggctccactcacacaacactcttccctgacagcaccacaagctcaggcatcgttgaagcatctacacgcgtccacagcagcactggctcaccacgcacaacactgtcccctgccagctccacaagccctggacttcagggagaatctaccgccttccagacccacccagcctcaactcacacgacgccttcacctcctagcaccgcaacagcccctgttgaagaatctacaacctaccaccgcagcccaggctcgactccaacaacacacttccctgccagctccacaacttcgggccacagtgagaaatcaacaatattccacagcagcccagatgcaagtggaacaacaccctcatctgcccactccacaacctcaggtcgtggagaatctacaacctcacgcatcagtccaggctcaactgaaataacaacgttacctggcagtaccacaacaccaggcctcagtgaggcatctaccaccttctacagcagccccagatcaccaaccacaacactctcacctgccagcatgacaagcctaggcgtcggtgaagaatccaccacctcccgtagccaaccaggttctactcactcaacagtgtcacctgccagcaccaccacgccaggcctcagtgaggaatctaccacaggaacctacaacttcccacagcagccaaggctcaacagaggcaacactgtcccctggcagtaccacagcctcatcccttggtcaacaatctacaaccttccacagcagcccaggcgacaccgcgagacgggttttccgagacgagacgattagatcctcagagcgtcctggaggaatgctagaacgactacaggtagacattgggtcgatacacaaaacactgacgcccttccagttccacatggcatatgccatatcaaggaagtatgtagtactttgcagatgcgcgagaggtttcacagtcacgaacctgtacctgcacggtaccaagagcagccccgtatgtgaagcatgctacaactgtacgcgcagctctgaacttgagtg

SEQ ID NO: 532434 - DNA, 129 bp, Homo sapiens
ctcgtttgtgcggacctggtaccttttttgtgaagcggcactgaggagattccggcgttcgccatggccgaggaaaagcccaaggaaggagttaagacttagacaacgatcatattaattttaggtggc

SEQ ID NO: 532435 - DNA, 3272 bp, Homo sapiens
  misc_feature (21)..(21): n is a, c, g, or t
  misc_feature (33)..(33): n is a, c, g, or t
  misc_feature (35)..(35): n is a, c, g, or t
  misc_feature (305)..(305): n is a, c, g, or t
  misc_feature (3196)..(3196): n is a, c, g, or t
  misc_feature (3204)..(3204): n is a, c, g, or t
  misc_feature (3208)..(3208): n is a, c, g, or t
  misc_feature (3211)..(3212): n is a, c, g, or t
tgagtcggtacctcagagctncctgatggtaanancattcccttggttcacaatctactaccttccacagcagcccaggcgacactgaaaccacactcttacctgacgacaccataacctcaggcctcgtggaggcatctacacccacccacagcagcactggctcgctacacacaacactgacccctgccagctccacaagcgctggccttcaggaagaatctaccactttccagagctggccaagctcaagtgacacaacaccttcacctcccggcaccacagcagcccctgttgaagtatcnacaacctaccacagccgcccgagctcaactccaacaacacacttttctgccagttccacaaccttgggccgtagtgaggaatcaacaacagtccacagcagcccaggtgcaactggaacagcactcttccctacccgctctgcaacctcagttcttgttggagaacctacaacgtcacccatcagttcaggctcaacggaaacaacagcgttacctggcagtaccacaacagcaggcctgagtgagaaatctaccaccttctacagtagccccagatcaccggacacaacactctcacctgccagcacgacaagctcaggcgtcagtgaagaatccaccacctcccacagccgaccaggctcaacgcacacaacagcattccctggcagtaccaccatgccaggcgtcagtcaggaatctacagcttcccacagcagcccaggctccacagacacaacactgtcccctggcagtaccacagcatcatcccttggtccagaatctactaccttccacagcggcccaggctccactgaaacaacactcttacctgacaacaccacagcctcaggcctccttgaagcatctacgcccgtccacagcagcactggatcgccacacacaacactgtcccctgccggctctacaacccgtcagggagaatctaccaccttccagagctggccaaactcgaaggacactacccctgcacctcctactaccacatcagcctttgttgagctatctacaacctcccacggcagcccgagctcaactccaacaacccacttttctgccagctccacaaccttgggccgtagtgaggaatcgacaacagtccacagcagcccagttgcaactgcaacaacaccctcgcctgcccgctccacaacctcaggcctcgttgaagaatctacgacctaccacagcagcccgggctcaactcaaacaatgcacttccctgaaagcgacacaacttcaggccgtggtgaagaatcaacaacttcccacagcagcacaacacacacaatatcttcagctcctagcaccacatctgcccttgttgaagaacctaccagctaccacagcagcccgggctcaactgcaacaacacacttccctgacagctccacaacctcaggccgtagtgaggaatcaacagcatcccacagcagccaagacgcaacgggaacaatagtcctacctgcccgctccacaacctcagttcttcttggagaatctacgacctcacccatcagttcaggctcaatggaaacgacagcgttacccggcagtaccacaacgccaggcctcagtgagaaatctaccactttccacagtagccccagatcaccagccacaacactctcacctgccagcacgacaagctcaggcgtcagtgaagaatccaccacctcccacagccgaccaggctcaacgcacacaacagcattccctgacagcaccaccacgccaggcctcagtcggcattctacaacttcccacagcagcccaggctcaacggatacaacactgttacctgccagcaccaccacctcaggccccagtcaggaatcaacaacttcccacagcagcccaggttcaactgacacagcactgtcccctggcagtaccacagccttatcctttggtcaagaatctacaaccttccacagcagcccaggctccactcacacaacactcttccctgacagcaccacaagctcaggcatcgttgaagcatctacacgcgtccacagcagcactggctcaccacgcacaacactgtcccctgccagctccacaagccctggacttcagggagaatctaccgccttccagacccacccagcctcaactcacacgacgccttcacctcctagcaccgcaacagcccctgttgaagaatctacaacctaccaccgcagcccaggctcgactccaacaacacacttccctgccagctccacaacttcgggccacagtgagaaatcaacaatattccacagcagcccagatgcaagtggaacaacaccctcatctgcccactccacaacctcaggtcgtggagaatctacaacctcacgtcagtccaagctcaaccgaaacaacaactttacccggcagtcccacaacaccaagcctcagtgagaaatcaaccaccttctacactagccccagatcaccagatgcaacactctcacctgcaaccacaacaagctcaggcgtcagcgaagaatccagcacatcccacagtcaaccaggctcaacgcacacaacagcgttccctgacagcaccaccacctcaggcctcagtcaggaacctacaacttcccacagcagccaaggctcaacagaggcaacactgtcccctggcagtaccacagcctcatcccttggtcaacaatctacaaccttccacagcagcccaggcgacactgaaaccacactcttacctgacgacaccataacctcaggcctcgtggaggcatctacacccacccacagcagcactggctcgctacacacaacactgacccctgccagctccacaagcgctggccttcaggaagaatctaccactttccagagctggccaagctcaagtgacacaacaccttcacctcccggcaccacagcagcccctgttgaagtatccacaacctaccacagccgcccgagctcaactccaacaacacacttttctgccagttccacaaccttgggccgtagtgaggaatcaacaacagtccacagcagcccaggtgcaactggaacagcactcttccctacccgctctgcaacctcagttcttgttggagaacctacaacgtcacccatcagttcaggctcaacggaaacaacagcgttacctggcagtaccacaacancaggcctnagtnagnnatctaccaccttctacagcagcccccccgctgctgaaatgcgggatccttagagtcaccc

SEQ ID NO: 532436 - DNA, 150 bp, Homo sapiens
cgttcatgccggagaaccaagcggcatccctgggtaggaccaggccgcgtgcgttcggcttttcttcgaggagacgcttgatgtccgcggccggcaacgctggccttcgcatcacgtatcctgccgatctcgcgccgctgtggcatggag

SEQ ID NO: 532437 - DNA, 301 bp, Homo sapiens
  misc_feature (1)..(1): n is a, c, g, or t
  misc_feature (137)..(137): n is a, c, g, or t
  misc_feature (171)..(171): n is a, c, g, or t
  misc_feature (174)..(175): n is a, c, g, or t
  misc_feature (181)..(181): n is a, c, g, or t
  misc_feature (184)..(184): n is a, c, g, or t
  misc_feature (188)..(188): n is a, c, g, or t
  misc_feature (194)..(194): n is a, c, g, or t
  misc_feature (200)..(200): n is a, c, g, or t
  misc_feature (216)..(216): n is a, c, g, or t
  misc_feature (233)..(233): n is a, c, g, or t
  misc_feature (241)..(242): n is a, c, g, or t
  misc_feature (246)..(246): n is a, c, g, or t
  misc_feature (248)..(249): n is a, c, g, or t
  misc_feature (253)..(254): n is a, c, g, or t
  misc_feature (256)..(256): n is a, c, g, or t
  misc_feature (259)..(259): n is a, c, g, or t
  misc_feature (261)..(264): n is a, c, g, or t
  misc_feature (272)..(272): n is a, c, g, or t
  misc_feature (274)..(274): n is a, c, g, or t
  misc_feature (279)..(279): n is a, c, g, or t
  misc_feature (282)..(282): n is a, c, g, or t
  misc_feature (289)..(289): n is a, c, g, or t
  misc_feature (292)..(292): n is a, c, g, or t
ngggtaagtagacttgaaggttttttattttttaatgaagaaacaatttatcctgtgtttgataccagatgagactgtcagggtcacatactccttaagcctacacatcaattccaggtgaagtgcttcaggctttnctcattctgacacttttataagggccctctatgncanngttggnaanactntttttnccttancgccgtgcatgtttgngcattatataaatcgtngtacattnntttntnntttnntnttntnnnnttttattntnttttncanctttttnttntatttttat

SEQ ID NO: 532438 - DNA, 2632 bp, Homo sapiens
  misc_feature (36)..(36): n is a, c, g, or t
  misc_feature (135)..(135): n is a, c, g, or t
  misc_feature (2556)..(2556): n is a, c, g, or t
  misc_feature (2564)..(2564): n is a, c, g, or t
  misc_feature (2568)..(2568): n is a, c, g, or t
  misc_feature (2571)..(2572): n is a, c, g, or t
cggtgcatgatgtgatctggatctgagctggtctcnggtctggcgtcgttactaagtgacacaggctcaacagtaaacaccagtatggaggtaatacaacttctgcatccacacccagttcaagcgaccttttancacctttagtgactatggggtgtcagtcacatttatcacgggctcaactgcaacaaaacacttccttgacagctccacaaactcaggccacagtgaggaatcaacagtatcccacagcagcccaggtgcaactggaacagcactcttccctacccgctctgcaacctcagttcttgttggagaacctacaacgtcacccatcagttcaggctcaacggaaacaacagcgttacctggcagtaccacaacagcaggcctgagtgagaaatctaccaccttctacagtagccccagatcaccgaacactctcacctgccagcacgacaagctcaggcgtcagtgaagaatccaccacctcccacagccgaccaggctcaacgcacacaacagcattccctgacagcaccaccacgccaggcctcagtcggcattctacaacttcccacagcagcccaggctcaacggatacaacactgttacctgccagcaccaccacctcaggccccagtcaggaatcaacaacttcccacagcagcccaggttcaactgacacagcactgtcccctggcagtaccacagccttatcctttggtcaagaatctacaaccttccacagcagcccaggctccactcacacaacactcttccctgacagcaccacaagctcaggcatcgttgaagcatctacacgcgtccacagcagcactggctcaccacgcacaacactgtcccctgccagctccacaagccctggacttcagggagaatctaccgccttccagacccacccagcctcaactcacacgacgccttcacctcctagcaccgcaacagcccctgttgaagaatctacaacctaccaccgcagcccaggctcgactccaacaacacacttccctgccagctccacaacttcgggccacagtgagaaatcaacaatattccacagcagcccagatgcaagtggaacaacaccctcatctgcccactccacaacctcaggtcgtggagaatctacaacctcacgcatcagtccaggctcaactgaaataacaacgttacctggcagtaccacaacaccaggcctcagtgaggcatctaccaccttctacagcagccccagatcaccaaccacaacactctcacctgccagcatgacaagcctaggcgtcggtgaagaatccaccacctcccgtagccaaccaggttctactcactcaacagtgtcacctgccagcaccaccacgccaggcctcagtgaggaatctaccaccgtctacagcagcagcccaggctcaactgaaaccacagtgttccctcgcagcaccacaacctcagttcgtggtgaagagcctacaaccttccacagccggccagcctcaactcacacaacactgttcactgaggacagcaccacctcgggcctcactgaagaatctacagccttccccggcagcccagcctccacccaaacagggttacctgccacactcacaaccgcagacctcggtgaggaatcaactacctttcccagcagctcaggctcaactggaacaacactctcacctgcccgctccaccacctctggcctcgttggagaatccacaccctcacgcctcagtccaagctcaaccgaaacaacaactttacccggcagtcccacaacaccaagcctcagtgagaaatcaaccaccttctacactagccccagatcaccagatgcaacactctcacctgcaaccacaacaagctcaggcgtcagcgaagaatccagcacatcccacagtcaaccaggctcaacgcacacaacagcgttccctgacagcaccaccacctcaggcctcagtcaggaacctacaacttcccacagcagccaaggctcaacagaggcaacactgtcccctggcagtaccacagcctcatcccttggtcaacaatctacaaccttccacagcagcccaggcgacactgaaaccacactcttacctgacgacaccataacctcaggcctcgtggaggcatctacacccacccacagcagcactggctcgctacacacaacactgacccctgccagctccacaagcgctggccttcaggaagaatctaccactttccagagctggccaagctcaagtgacacaacaccttcacctcccggcaccacagcagcccctgttgaagtatccacaacctaccacagccgcccgagctcaactccaacaacacacttttctgccagttccacaaccttgggccgtagtgaggaatcaacaacagtccacagcagcccaggtgcaactggaacagcactcttccctacccgctctgcaacctcagttcttgttggagaacctacaacgtcacccatcagttcaggctcaacggaaacaacagcgttacctggcagtaccacaacancaggcctnagtnagnnatctaccaccttctacagcagcccccccgctgctgaaatgcgggatccttagagtcaccc

SEQ ID NO: 532439 - DNA, 592 bp, Homo sapiens
agcggaaatgtcttctgctcagtgcccggcactagtgtgtgtcatgtcccggctgcgtttctggggcccatggcccctccttatgtggcaactattgtggctactagttaaggaggctcagcctctggagtgggtcaaggacccgctccacgctcaccttcctaagtcccctgtgggcctgacatgacctccgtggtcattcccatctcctcccatattcccacgtgggaatctccccatgcgcctacgtctcccagcagacccgtgggacttatgatcacactggaggccctcatgcttcctcagagatgccagccccaaccccgaggaatccgactgaaaaatttggttaccattcctgggacacctgggattccaggctggagaagcagcccctgggggccagagcaagttcttggcttcaccagcaaggatttacaaggacaagctgagtccacaggaaagacatcccgtgtatgcgcccaaggaagctgaacgaccaggattccagctcagacgttggagcctttggcttgaagacttaatgggacaattaacaacgcccaaatttattaccaaaacctacagaaac

SEQ ID NO: 532440 - DNA, 470 bp, Homo sapiens
  misc_feature (423)..(423): n is a, c, g, or t
ttttaaaaatcaacaagagatctgaattaacagttctccaaagaagatacacaaaaggccaatgagcacatgaaaaggttctcaacatcactagccatcaggggaaagcaaatgagattcttcaattaagatatcacttaacagctcgctggtaataggatatataatcaaaggtgataattatcaaggtgttgggtgaggaatgcagagaaaattgtgaacacctcagtgcacgtgttgagtggcataccctacagtgaatataaaagacaaaatgtcatacacaaataaactgtgtgcagcagaatgtgtctttagcagacatatatttgatagatagcctcaaagatgtgaaacaggccgctagatttcctatcaacataaacaagtgcccatcccccgaaaagcgtcggcactatgctncatacaggaggagaatagttagttccacgcaccacaaataataagaa

SEQ ID NO: 532441 - DNA, 2564 bp, Homo sapiens
  misc_feature (21)..(21): n is a, c, g, or t
  misc_feature (33)..(33): n is a, c, g, or t
  misc_feature (35)..(35): n is a, c, g, or t
  misc_feature (305)..(305): n is a, c, g, or t
tgagtcggtacctcagagctncctgatggtaanancattcccttggttcacaatctactaccttccacagcagcccaggcgacactgaaaccacactcttacctgacgacaccataacctcaggcctcgtggaggcatctacacccacccacagcagcactggctcgctacacacaacactgacccctgccagctccacaagcgctggccttcaggaagaatctaccactttccagagctggccaagctcaagtgacacaacaccttcacctcccggcaccacagcagcccctgttgaagtatcnacaacctaccacagccgcccgagctcaactccaacaacacacttttctgccagttccacaaccttgggccgtagtgaggaatcaacaacagtccacagcagcccaggtgcaactggaacagcactcttccctacccgctctgcaacctcagttcttgttggagaacctacaacgtcacccatcagttcaggctcaacggaaacaacagcgttacctggcagtaccacaacagcaggcctgagtgagaaatctaccaccttctacagtagccccagatcaccggacacaacactctcacctgccagcacgacaagctcaggcgtcagtgaagaatccaccacctcccacagccgaccaggctcaacgcacacaacagcattccctggcagtaccaccatgccaggcgtcagtcaggaatctacagcttcccacagcagcccaggctccacagacacaacactgtcccctggcagtaccacagcatcatcccttggtccagaatctactaccttccacagcggcccaggctccactgaaacaacactcttacctgacaacaccacagcctcaggcctccttgaagcatctacgcccgtccacagcagcactggatcgccacacacaacactgtcccctgccggctctacaacccgtcagggagaatctaccaccttccagagctggccaaactcgaaggacactacccctgcacctcctactaccacatcagcctttgttgagctatctacaacctcccacggcagcccgagctcaactccaacaacccacttttctgccagctccacaaccttgggccgtagtgaggaatcgacaacagtccacagcagcccagttgcaactgcaacaacaccctcgcctgcccgctccacaacctcaggcctcgttgaagaatctacgacctaccacagcagcccgggctcaactcaaacaatgcacttccctgaaagcgacacaacttcaggccgtggtgaagaatcaacaacttcccacagcagcacaacacacacaatatcttcagctcctagcaccacatctgcccttgttgaagaacctaccagctaccacagcagcccgggctcaactgcaacaacacacttccctgacagctccacaacctcaggccgtagtgaggaatcaacagcatcccacagcagccaagacgcaacgggaacaatagtcctacctgcccgctccacaacctcagttcttcttggagaatctacgacctcacccatcagttcaggctcaatggaaacgacagcgttacccggcagtaccacaacgccaggcctcagtgagaaatctaccactttccacagtagccccagatcaccagccacaacactctcacctgccagcacgacaagctcaggcgtcagtgaagaatccaccacctcccacagccgaccaggctcaacgcacacaacagcattccctgacagcaccaccacgccaggcctcagtcggcattctacaacttcccacagcagcccaggctcaacggatacaacactgttacctgccagcaccaccacctcaggccccagtcaggaatcaacaacttcccacagcagcccaggttcaactgacacagcactgtcccctggcagtaccacagccttatcctttggtcaagaatctacaaccttccacagcagcccaggctccactcacacaacactcttccctgacagcaccacaagctcaggcatcgttgaagcatctacacgcgtccacagcagcactggctcaccacgcacaacactgtcccctgccagctccacaagccctggacttcagggagaatctaccgccttccagacccacccagcctcaactcacacgacgccttcacctcctagcaccgcaacagcccctgttgaagaatctacaacctaccaccgcagcccaggctcgactccaacaacacacttccctgccagctccacaacttcgggccacagtgagaaatcaacaatattccacagcagcccagatgcaagtggaacaacaccctcatctgcccactccacaacctcaggtcgtggagaatctacaacctcacgcatcagtccaggctcaactgaaataacaacgttacctggcagtaccacaacaccaggcctcagtgaggcatctaccaccttctacagccaggggacagatgtctgtgtcatttgaacctggctgctgtgggaagttgttgattcctgactggaaacctgatgcgggtgtgct

SEQ ID NO: 532442 - DNA, 3272 bp, Homo sapiens; identical to SEQ ID NO: 532435
  misc_feature (21)..(21): n is a, c, g, or t
  misc_feature (33)..(33): n is a, c, g, or t
  misc_feature (35)..(35): n is a, c, g, or t
  misc_feature (305)..(305): n is a, c, g, or t
  misc_feature (3196)..(3196): n is a, c, g, or t
  misc_feature (3204)..(3204): n is a, c, g, or t
  misc_feature (3208)..(3208): n is a, c, g, or t
  misc_feature (3211)..(3212): n is a, c, g, or t

SEQ ID NO: 532443 - DNA, 977 bp, Homo sapiens
ttcaatatctagaatttctagaaaagcttcctagcttatctccctgcttcatatctctcccttctttaccttcatttcatcctgttggctgctgccaccaaatctgtctagaatcctgctttacaggatcatgtaaatgctcaaagatgtaatgtagttcttgttcctgctttctctttcagtattaaactctcctttgatattattgtggcttttatttcagtgccatacatgttattgttttcaacctagaaacctttatccctgcttatctgaaacttcccaacttccctgttctttaagacttttttttttttttttttttggaaaaagagtctcgcttctgtcggcccaggttggagggcaggggcacgatctcagctcactgaaagctccaactccggggttaacggccattctcctgcctcagccttccaagtaggtggggactacagggtgcccgccaccggtgccccggcgttaatttttagggtattttaagtacaagaaaggggttctcaccatgtaacgccggggatgggtctggatctcttgacctcatgatccacccacctcagctcccaaagtggtggggatacagggcgtagagccattgcgcccggggcaagacctttttttaaacaaacaaaaaaaaacaaagctccactgtcttttactttcgcccaaggtgtggttctcaacattacacagaagacagtggggtcaacaatatcacggagaggacagcagacgagggacaagagagggactcccacaatgtttccaagagggctctcaactgtagcgcacaacaatttccggcctagctcaaacgtggttcaaggtgaccaaccaccgtgcgagttggtgttaaattaattgtaccccgtgtagacctttgtcttatccctattaatgaaccccttcgttaagaggtcgtccaaccatagggttgatacccagggcacaaaaggctg

SEQ ID NO: 532444 - DNA, 145 bp, Homo sapiens
ctgatgcactaaatgctgagctcgtaccaaggcatagttgcatccagcgaaaatatgattcaacccacatgcaattttagattttctagtagccataaagttagaaaaaacagatgaaattaattttaataatttaacccagata

SEQ ID NO: 532445 - DNA, 2785 bp, Homo sapiens
  misc_feature (21)..(21): n is a, c, g, or t
  misc_feature (33)..(33): n is a, c, g, or t
  misc_feature (35)..(35): n is a, c, g, or t
  misc_feature (310)..(310): n is a, c, g, or t
  misc_feature (318)..(318): n is a, c, g, or t
  misc_feature (323)..(323): n is a, c, g, or t
  misc_feature (325)..(326): n is a, c, g, or t
  misc_feature (332)..(332): n is a, c, g, or t
  misc_feature (336)..(337): n is a, c, g, or t
  misc_feature (352)..(352): n is a, c, g, or t
  misc_feature (355)..(356): n is a, c, g, or t
  misc_feature (367)..(368): n is a, c, g, or t
  misc_feature (377)..(377): n is a, c, g, or t
  misc_feature (391)..(391): n is a, c, g, or t
  misc_feature (407)..(407): n is a, c, g, or t
  misc_feature (418)..(418): n is a, c, g, or t
  misc_feature (421)..(421): n is a, c, g, or t
  misc_feature (2709)..(2709): n is a, c, g, or t
  misc_feature (2717)..(2717): n is a, c, g, or t
  misc_feature (2721)..(2721): n is a, c, g, or t
  misc_feature (2724)..(2725): n is a, c, g, or t
tgagtcggtacctcagagctncctgatggtaanancattcccttggttcacaatctactaccttccacagcagcccaggcgacactgaaaccacactcttacctgacgacaccataacctcaggcctcgtggaggcatctacacccacccacagcagcactggctcgctacacacaacactgacccctgccagctccacaagcgctggccttcaggaagaatctaccactttccagagctggccaagctcaagtgacacaacaccttcacctcccggcaccacagcagcccctgttgaagtatctacaanctaccacngcagncnnggctcnactnnaacaacacacttccntgnnagctccacaanntcaggccanagtgaggaatcaanagcatcccacagcagnccagatgcaanggnaacaacagtcttacctgccggctctacaccctcagttcttgttggagactcgacgccctcacccatcagttcaggctcaatggaaaccacagcgttacccggcagtaccacaacaccaggcctcagtgagaaatctaccactttctacagtagccccagatcaccagaaacactctcacctgccagcacgacaagctcaggcgtcagtgaagaatccaccacctcccacagccgaccaggctcaacgcacacaacagcattccctgacagcaccaccacgccaggcctcagtcggcattctacaacttcccacagcagcccaggctcaacggatacaacactgttacctgccagcaccaccacctcaggccccagtcaggaatcaacaacttcccacagcagcccaggttcaactgacacagcactgtcccctggcagtaccacagccttatcctttggtcaagaatctacaaccttccacagcagcccaggctccactcacacaacactcttccctgacagcaccacaagctcaggcatcgttgaagcatctacacgcgtccacagcagcactggctcaccacgcacaacactgtcccctgccagctccacaagccctggacttcagggagaatctaccgccttccagacccacccagcctcaactcacacgacgccttcacctcctagcaccgcaacagcccctgttgaagaatctacaacctaccaccgcagcccaggctcgactccaacaacacacttccctgccagctccacaacttcgggccacagtgagaaatcaacaatattccacagcagcccagatgcaagtggaacaacaccctcatctgcccactccacaacctcaggtcgtggagaatctacaacctcacgcatcagtccaggctcaactgaaataacaacgttacctggcagtaccacaacaccaggcctcagtgaggcatctaccaccttctacagcagccccagatcaccaaccacaacactctcacctgccagcatgacaagcctaggcgtcggtgaagaatccaccacctcccgtagccaaccaggttctactcactcaacagtgtcacctgccagcaccaccacgccaggcctcagtgaggaatctaccaccgtctacagcagcagcccaggctcaactgaaaccacagtgttccctcgcagcaccacaacctcagttcgtggtgaagagcctacaaccttccacagccggccagcctcaactcacacaacactgttcactgaggacagcaccacctcgggcctcactgaagaatctacagccttccccggcagcccagcctccacccaaacagggttacctgccacactcacaaccgcagacctcggtgaggaatcaactacctttcccagcagctcaggctcaactggaacaacactctcacctgcccgctccaccacctctggcctcgttggagaatccacaccctcacgcctcagtccaagctcaaccgaaacaacaactttacccggcagtcccacaacaccaagcctcagtgagaaatcaaccaccttctacactagccccagatcaccagatgcaacactctcacctgcaaccacaacaagctcaggcgtcagcgaagaatccagcacatcccacagtcaaccaggctcaacgcacacaacagcgttccctgacagcaccaccacctcaggcctcagtcaggaacctacaacttcccacagcagccaaggctcaacagaggcaacactgtcccctggcagtaccacagcctcatcccttggtcaacaatctacaaccttccacagcagcccaggcgacactgaaaccacactcttacctgacgacaccataacctcaggcctcgtggaggcatctacacccacccacagcagcactggctcgctacacacaacactgacccctgccagctccacaagcgctggccttcaggaagaatctaccactttccagagctggccaagctcaagtgacacaacaccttcacctcccggcaccacagcagcccctgttgaagtatccacaacctaccacagccgcccgagctcaactccaacaacacacttttctgccagttccacaaccttgggccgtagtgaggaatcaacaacagtccacagcagcccaggtgcaactggaacagcactcttccctacccgctctgcaacctcagttcttgttggagaacctacaacgtcacccatcagttcaggctcaacggaaacaacagcgttacctggcagtaccacaacancaggcctnagtnagnnatctaccaccttctacagcagcccccccgctgctgaaatgcgggatccttagagtcaccc

SEQ ID NO: 532446 - DNA, 703 bp, Homo sapiens
atattatactagcatttaccatctcacttctaggaatactagtatatcgctcacacctcatgtcctccctactatgcctagaaggaataatactatcgctgttcattatagctactctcataaccctcgaacacccagctccctcttagccaatatggtgcctattgccatactagtctttgcgcgcctgcgaagcagcggtgggcctagccctagtagtctcaatcgtccaacacatatgggcctagacgtacgtacataaccgtaaagccgtactccaatgcgtaagagctaatcgtcccaagcaatgtatattagctaccactgacatgacgttgtccaaaaaacacataatttgaatcaacgacgaagcacccgacagcgcgtaagttattagcatcatccctctactattgttttaaccaagatcaacaggacaagcctatttagctgttccccaagcgctttgtcgctccgatccctctaacaagcctccttgcctaatacgtaagcattggtcctgactcctgtccctcacaatcagtggcaagccaagcgccacgttatccagtgaaccacgtatcactgaaaaaaatctatctctctgatggctgaatctcgcctagcaacatctccttaattataacattcagagcacaggaactaatcatattgatatcgtcttcgagaccacattattccg

SEQ ID NO: 532447 - DNA, 2538 bp, Homo sapiens
  misc_feature (21)..(21): n is a, c, g, or t
  misc_feature (33)..(33): n is a, c, g, or t
  misc_feature (35)..(35): n is a, c, g, or t
  misc_feature (305)..(305): n is a, c, g, or t
  misc_feature (2462)..(2462): n is a, c, g, or t
  misc_feature (2470)..(2470): n is a, c, g, or t
  misc_feature (2474)..(2474): n is a, c, g, or t
  misc_feature (2477)..(2478): n is a, c, g, or t
tgagtcggtacctcagagctncctgatggtaanancattcccttggttcacaatctactaccttccacagcagcccaggcgacactgaaaccacactcttacctgacgacaccataacctcaggcctcgtggaggcatctacacccacccacagcagcactggctcgctacacacaacactgacccctgccagctccacaagcgctggccttcaggaagaatctaccactttccagagctggccaagctcaagtgacacaacaccttcacctcccggcaccacagcagcccctgttgaagtatcnacaacctaccacagccgcccgagctcaactccaacaacacacttttctgccagttccacaaccttgggccgtagtgaggaatcaacaacagtccacagcagcccaggtgcaactggaacagcactcttccctacccgctctgcaacctcagttcttgttggagaacctacaacgtcacccatagcagcccaggctcaacggatacaacactgttacctgccagcaccaccacctcaggccccagtcaggaatcaacaacttcccacagcagcccaggttcaactgacacagcactgtcccctggcagtaccacagccttatcctttggtcaagaatctacaaccttccacagcagcccaggctccactcacacaacactcttccctgacagcaccacaagctcaggcatcgttgaagcatctacacgcgtccacagcagcactggctcaccacgcacaacactgtcccctgccagctccacaagccctggacttcagggagaatctaccgccttccagacccacccagcctcaactcacacgacgccttcacctcctagcaccgcaacagcccctgttgaagaatctacaacctaccaccgcagcccaggctcgactccaacaacacacttccctgccagctccacaacttcgggccacagtgagaaatcaacaatattccacagcagcccagatgcaagtggaacaacaccctcatctgcccactccacaacctcaggtcgtggagaatctacaacctcacgcatcagtccaggctcaactgaaataacaacgttacctggcagtaccacaacaccaggcctcagtgaggcatctaccaccttctacagcagccccagatcaccaaccacaacactctcacctgccagcatgacaagcctaggcgtcggtgaagaatccaccacctcccgtagccaaccaggttctactcactcaacagtgtcacctgccagcaccaccacgccaggcctcagtgaggaatctaccaccgtctacagcagcagcccaggctcaactgaaaccacagtgttccctcgcagcaccacaacctcagttcgtggtgaagagcctacaaccttccacagccggccagcctcaactcacacaacactgttcactgaggacagcaccacctcgggcctcactgaagaatctacagccttccccggcagcccagcctccacccaaacagggttacctgccacactcacaaccgcagacctcggtgaggaatcaactacctttcccagcagctcaggctcaactggaacaacactctcacctgcccgctccaccacctctggcctcgttggagaatccacaccctcacgcctcagtccaagctcaaccgaaacaacaactttacccggcagtcccacaacaccaagcctcagtgagaaatcaaccaccttctacactagccccagatcaccagatgcaacactctcacctgcaaccacaacaagctcaggcgtcagcgaagaatccagcacatcccacagtcaaccaggctcaacgcacacaacagcgttccctgacagcaccaccacctcaggcctcagtcaggaacctacaacttcccacagcagccaaggctcaacagaggcaacactgtcccctggcagtaccacagcctcatcccttggtcaacaatctacaaccttccacagcagcccaggcgacactgaaaccacactcttacctgacgacaccataacctcaggcctcgtggaggcatctacacccacccacagcagcactggctcgctacacacaacactgacccctgccagctccacaagcgctggccttcaggaagaatctaccactttccagagctggccaagctcaagtgacacaacaccttcacctcccggcaccacagcagcccctgttgaagtatccacaacctaccacagccgcccgagctcaactccaacaacacacttttctgccagttccacaaccttgggccgtagtgaggaatcaacaacagtccacagcagcccaggtgcaactggaacagcactcttccctacccgctctgcaacctcagttcttgttggagaacctacaacgtcacccatcagttcaggctcaacggaaacaacagcgttacctggcagtaccacaacancaggcctnagtnagnnatctaccaccttctacagcagcccccccgctgctgaaatgcgggatccttagagtcaccc

SEQ ID NO: 532448 - DNA, 231 bp, Homo sapiens
gttccacagaacagtaatattttgtgacaataggtacaatagaggtcttctgtcatttacctcgtaaggcaggctggaggggaaataatcattaagcctttgagtacggcagatatatggctgtaggtccattttcatggtcattcttatgtcaatactgcacactgagatgaagggaaataatgaatttactttcgtgcatgtcatgactaactgtggagagtatcaagc

SEQ ID NO: 532449 - DNA, 480 bp, Homo sapiens
  misc_feature (27)..(27): n is a, c, g, or t
  misc_feature (126)..(126): n is a, c, g, or t
  misc_feature (128)..(128): n is a, c, g, or t
  misc_feature (132)..(133): n is a, c, g, or t
  misc_feature (138)..(138): n is a, c, g, or t
cctaaactttataataggaaaaggggnaattgtgagttataatggttttaccaaaggttactggccaagtttcattatctctgcaagggaaataaaaagggggacgcccctctggttgtttttttntntttnnttttnttaaacaaagtcttcctctgctgcccaggctggagagcaagactttgtttaaaaaaaaaaaaaaaattgtctagtttccctcacagacttaatgctgtgacaaaagaacaattcatacagaggggctaacaagccaaaccagcagccttcagtgggagggaacttggaaagttggaatgttcaaggaaaatgacaaaatacaagtttacaaaaattgttttttcaaaaaatgctcaaatggccaggcacagtggctcatgcctgtattcccaacacttgggaggctgaggtgggtggatcacttgagtctaggagttcgagaccagcctgggtgacgtggca

SEQ ID NO: 532450 - DNA, 2214 bp, Homo sapiens
  misc_feature (21)..(21): n is a, c, g, or t
  misc_feature (33)..(33): n is a, c, g, or t
  misc_feature (35)..(35): n is a, c, g, or t
  misc_feature (305)..(305): n is a, c, g, or t
tgagtcggtacctcagagctncctgatggtaanancattcccttggttcacaatctactaccttccacagcagcccaggcgacactgaaaccacactcttacctgacgacaccataacctcaggcctcgtggaggcatctacacccacccacagcagcactggctcgctacacacaacactgacccctgccagctccacaagcgctggccttcaggaagaatctaccactttccagagctggccaagctcaagtgacacaacaccttcacctcccggcaccacagcagcccctgttgaagtatcnacaacctaccacagccgcccgagctcaactccaacaacacacttttctgccagttccacaaccttgggccgtagtgaggaatcaacaacagtccacagcagcccaggtgcaactggaacagcactcttccctacccgctctgcaacctcagttcttgttggagaacctacaacgtcacccatcagttcaggctcaacggaaacaacagcgttacctggcagtaccacaacagcaggcctgagtgagaaatctaccaccttctacagtagccccagatcaccggacacaacactctcacctgccagcacgacaagctcaggcgtcagtgaagaatccaccacctcccacagccgaccaggctcaacgcacacaacagcattccctggcagtaccaccatgccaggcgtcagtcaggaatctacagcttcccacagcagcccaggctccacagacacaacactgtcccctggcagtaccacagcatcatcccttggtccagaatctactaccttccacagcggcccaggctccactgaaacaacactcttacctgacaacaccacagcctcaggcctccttgaagcatctacgcccgtccacagcagcactggatcgccacacacaacactgtcccctgccggctctacaacccgtcagggagaatctaccaccttccagagctggccaaactcgaaggacactacccctgcacctcctactaccacatcagcctttgttgagctatctacaacctcccacggcagcccgagctcaactccaacaacccacttttctgccagctccacaaccttgggccgtagtgaggaatcgacaacagtccacagcagcccagttgcaactgcaacaacaccctcgcctgcccgctccacaacctcaggcctcgttgaagaatctacgacctaccacagcagcccgggctcaactcaaacaatgcacttccctgaaagcgacacaacttcaggccgtggtgaagaatcaacaacttcccacagcagcacaacacacacaatatcttcagctcctagcaccacatctgcccttgttgaagaacctaccagctaccacagcagcccgggctcaactgcaacaacacacttccctgacagctccacaacctcaggccgtagtgaggaatcaacagcatcccacagcagccaagacgcaacgggaacaatagtcctacctgcccgctccacaacctcagttcttcttggagaatctacgacctcacccatcagttcaggctcaatggaaacgacagcgttacccggcagtaccacaacgccaggcctcagtgagaaatctaccactttccacagtagccccagatcaccagccacaacactctcacctgccagcacgacaagctcaggcgtcagtgaagaatccaccacctcccacagccgaccaggctcaacgcacacaacagcattccctgacagcaccaccacgccaggcctcagtcggcattctacaacttcccacagcagcccaggctcaacggatacaacactgttacctgccagcaccaccacctcaggccccagtcaggaatcaacaacttcccacagcagcccaggttcaactgacacagcactgtcccctggcagtaccacagccttatcctttggtcaagaatctacaaccttccacagcagcccaggctccactcacacaacactcttccctgacagcaccacaagctcaggcatcgttgaagcatctacacgcgtccacagcagcactggctcaccacgcacaacactgtcccctgccagctccacaagccctggacttcagggagaatctaccgccttccagacccacccagcctcaactcacacgacgccttcacccgcaatgtgctattgaaacttctaaaactagg

SEQ ID NO: 532451 - DNA, 1197 bp, Homo sapiens
  misc_feature (49)..(49): n is a, c, g, or t
  misc_feature (55)..(55): n is a, c, g, or t
gctctaacgtcgtggtgccgccttcccttcttgtacccaaggttataanggactngtctttctcttaggaatcataaagtggaacagagtccccagaactcatgtggccatttccgccagcatcactccccggtgcctatggggtcccggtgtacctaaagggagaaggaccccatgtgctagccagaaatatactgtctcttgaaggaaagcaggagctcagactcttagagccagctgtggcttcggacccaaggcctgacctaggctgctatcctaatattgcaggaggggcctctcttccaagccccaccctaagggttagcccttggccaaatcttttgccgtctaggcccagccaggcttttctgactaaataagcaataagaggctctaagctgactgagttgcaaggaccctttccgccctcccttggatctccatgtttttccagatggcggaagagcatgtgccacccctttcctaacagacttgtccaagtgcttggcgtgggacccatgaccaaagcccaggatggcttggtgggagtgtccctgctgcatctgcatgaagcccctgctttttaggcctcactcccatcagaaccctgcctgcccacctgcaactcccccccaaaatgccattcccacttgccccagagaagctactcggcaaactagccagggtctgttcttgtggaccagagccagcctagtcattatttgctgtcgggtttccagtttcaccggtgtagggtgagggatgatgtcaaatttagctcctcaaaggaatcaggcctagtactcaattttaggaggggcaagacagggaggaggccgcttcatcccagactctcttctagggcttcccaccatcagcccctcccacttgagactggtcttctgggaggcaatcaggccaccatgcctggtcagcaccgaattcaagccatgccgaggaatctgcctagcctgccaggttcagttcttttgaggtcgcctcttcagggacacgagtgtgtctctctgattgggcttctagctcaaacagcctgatgttcgtgtccctgctcatagggggagctttggacgcaggaccagtctggccgagggtcggtacgggtcccacgtctgcacattgtggaggggacactctgtatgccatgggtcccttactaaagaggttgagtgaatttgc

SEQ ID NO: 532452 - DNA, 288 bp, Homo sapiens
ttgtgcagctaggcttattatgtggggcagaaaggttgttgacaactgccagtcagggagaaggtgttctgtctgctgctagagaaaaatctgaagttcagaatctacttccatgacactataactgaggaagagaaagagagaatatattgtattcttggacaggctgtgtgtcggccggctggggatacaggatgaagatataacacttcagataactgagaggtgaagacaacgaagaagatacatggttgatgtaatcctaggcgtcagttgaaatcaagctgc

SEQ ID NO: 532453 - DNA, 1258 bp, Homo sapiens
gacggagttaagtgtttattgagtatctattataaatgaagcagacttatgcttccagatgagatggagtaacaaggatgaggtttatgctactgcctgaaacaaccaaatatttgggcaaaaatatataaaattacggttttcaagacactggatttcagacaacgaaggataaggacagtgatccctgagatgggaacaagtgaggcacgtcccacaccgccccaggctcctgccttgatagatttttaggttgtagtataggcagaaagaacccaggtgggacccaggattcaaactggattagaatttgcaaggcagagttccacaggggagacagctgcacacagagaagaactacagtgatttatttgtagaggtcactcaactattcagcagagtacagatcagcatatttgtgtgagaaaactaccagaggttgggaaaagaaccacctgaaaggattagtgagaacccagtacttgttcggtgctgtgaacagtggctgttcccaccaaccagatgggacagattcataatccataggggcactggcttcctaatcagaaatggctcaggcgtggagaataattagctctggtttaaaataactgttcctgcctaaacttttgaaaaggcggaactgacagatcaaactatttccaggtacttaattgattcccaacaaatttcaagacctgaattgcgaattggcctaacaaagaaaatcacatggcagacatcaatcaaaatttccggaccgcaagaaaccagacaaggtttttatgggaagaaaaccttcaatggcctaacctgaatgcccaattgttaaatggcatcaaggccgtaatccgtttgttccaaaggttctctgcctcaaaatttttaaaggcccatctacccttggttgctaccaattttcccccagattttaatcttaaacatggtcctctattaaatagccgcaagtttctctacaatctacatatattatcaacagttatttacttactctctctgcacttcctagttccagacataatttctgcgtctcttatcatcatccatttaactcactccccttcggtcctcaccatgcggcttcgtctaatattcgtcgatcctcttactccctcctctatcacattctcacttcactcctccttcggccattcatcttctctaccttcatactctcggtggtacctgtctagctagctccaccctagtcccctcttctgactcacctctcgctccc

SEQ ID NO: 532454 - DNA, 397 bp, Homo sapiens
  misc_feature (12)..(12): n is a, c, g, or t
  misc_feature (19)..(19): n is a, c, g, or t
  misc_feature (25)..(25): n is a, c, g, or t
  misc_feature (189)..(189): n is a, c, g, or t
  misc_feature (304)..(304): n is a, c, g, or t
  misc_feature (318)..(318): n is a, c, g, or t
ttggcctcagangcatgtnatcttnttctcccttttgccctttgaagcatgtgatctttgtgacctactccctgttcatacaccccctccccttttgaaatccttaataaaaacttgctggttttgtggctcggggcctcacggtcctgctgatatgtgacatcacccccggaggcccagctgtaaatncctctctttgtactctttctctttatttctcagaccagccgacacttagggaaaatagaacctacgctgaaattttggggggcaggttcttcttgctaggtatgtaatttttttncatttacttaattnccattcttttaatgtaatttttcaccacaatccagactctcagtaatccctttccctggttttgttttaaagatttact

SEQ ID NO: 532455 - DNA, 353 bp, Homo sapiens
ctcacatgcgcatgatactgggtcgtgtgtgaagacggcccatctttcttgccagagattgaggcactgtgggagcaagggagatcctggagttcagacaggtgttgggggcagcctgtattttaccctaggggcaggtctgcatgagtgaccccgacagttgcacgtggtaaacacatttgcagtcccacatcatcatcctaggaagatgggaactaggagtcccacccacacgtgcattcagacacgcatgctgtgtagggggctgcttctcaggaggccaggcccttctgagcggaaccgtcctggagagagcctgccctcgtttccaggctgcagccttcagataaaat

SEQ ID NO: 532456 - DNA, 349 bp, Homo sapiens
taacacacagaaggaaacaggcctggctgggcgcggtggctcacgcctgtaatcccagcactttgggaggccgaggccggtggatcacctgaggtcaggagatcgagaccagcctggccaacgtggtgaaaccccgtctctactaaaaatacaaaaaatgatccaggcatggtggcacatgcctgtcgttccagctactagggaggctgaggcaggagagtcacttgaacaagactgaaattccgtcttgattttttttttttttgcactctgttacccaggctgcagcgtggtgagctgagatcacaccactgcactccagcctgggtgacagagcgagactctgtcc

SEQ ID NO: 532457 - DNA, 260 bp, Homo sapiens
cacccgggagggaaaatttttttaaaacaaccaaaaagtggcacatgtccggcagtgggagatttgctgtatataagtgccctgctttgtattttggaatctctgcatcactcattgaagtgctctgaagagaagctgctctgtgttcattgactggtttgtgtcctgttgaaacttgctgaatgtaaggcaggctactatgcgttataatctaatcacaatttgtcaatatggtcttggcaatcatctgtgcattactc

SEQ ID NO: 532458 - DNA, 234 bp, Homo sapiens
cttacaggatctaatgctgctccctcttcactccaggccgtaattccttgatggcacttatttcctaccaccaacaggaactacacatgctctctgcttttaaactgtgtacacttccttgcctagtacattccttgctagggaaagcctttcctgacccccagaccaggtcaaactctacatgatcttcttggacacaattgcagtttgtattgttacatactctaaaatcca

SEQ ID NO: 532459 - DNA, 394 bp, Homo sapiens
tactactactaaattcgcggccgcgtcgacggatggctgtaagagcggaaccataagcggccgttaccgaagaaaacggatatgtacacaggaatcacagtaatccccccgcgaagccaagcaatccccccaatcccaactaagctcaccccccaacaaaaacaacaccgagcgccccccaatgacccaccccaccgaggccttccgcgccgcctaccgcacaagcatcaccccccactacaacccatggctccacgccggtttcgtcctcggctacggcctgctctgcatcaccctgttctggtcaaccacccaacaaatccaccccctggaatggctgaccatccccttcaccctgatcttcttcaacctgtgcgtcgacgcggccgcgaat

SEQ ID NO: 532460 - DNA, 1066 bp, Homo sapiens
  misc_feature (624)..(624): n is a, c, g, or t
ctcgcccagaacgctgaatattattcgaccgggattggaagaggaaacggaagaactggcggagcccggggagccgagccgaccaaatcagactacctgaaggagggaggtgggaagtcggatcggataccgagtatattacatactccagaagataatcccccttggcttgggatctcggattgtgggactgagcgtttagcatagtcacaacttactcctgaaatacatgcgaacaccttattgagacacagtttattgtccagatgcctgcatcgagttgcaggcaatagaactcgtcctgtgagagagagagatgtgccctcgagtaacactagcaagaatacgcataccgtggtggcaggcgattatgtagcctcgtagtgaaggaagtgcacttcgcctttcataacgaaatatagcattgtgatcctcgggtgggtttacggcatgcttccaatgctctatgcgagtccggcgtagagaatggacccttacccataaaagtcacctatgcatgtcacgcatttcactagaatagtctctatacatacacgcaggaatcgggacgttgttttcaatcggaggtagccataaccgtatggcacggcgtacacacctctnatgaagctaacggctgattccgtgtacaggttacgacgggaaaaccgggaactaggggaccgggcacggcatttgtcgtccagcaagatatgcatcctggggcattaggttgtgcaagtgactctggggacagtctgacttggagacgagtgtggaggtgaaaatagctctgatgtgtgcgacgactgaatgagagatgcaaggttgaacgtatcctgggaatgttttgaacttcgggtggtcagattactaccactgaacgaaaaagtactagaactgtttgacctgaatttagaagaacaagcttgcctttaagggagatcgaatgcgtgagaaatgttccaaggttgcagaagggggtaaaggatggggggggagaaccgtgcgggagataaaaaaccctgtgtcggacaccggggggggcccggggaggaaatccaga

SEQ ID NO: 532461 - DNA, 791 bp, Homo sapiens
gtcggtgggcccccaaattggcttgcccccccctcccccagccctgcgggccctgcctaccgtgtttcacacccagctggcccatggcagtcccactggcctgcatcgagtgtgatatcaccaacgtcaaggagctgtatggcaagatctgccgaagtgcctatcccgccatgcacaactgcctgatgtgtgatgttctagcaccctgaacacccacaaatgtggacgatggacaagctcctggtgtggggccagagtcggtgcttggagtgacttcatcttcgcccactgtgaattgggcatgctccaacggcagagctgcgagttgttgttcaaagtgtcgcgagcgatcgcactctgcggctcaccattcacttgacacactgggtacattgtcttacgccttcatcacagcgcactcacaggcgacgtggccagcgttgactcgaccaccagtccaccttcattcagctgttggtagccgggcaattgactctggaggagcccagctcaagcttggcgcaatgatgccccttggcatttgggcttagccctgtgcaccttagcagttggtttggcccctgggctatggcttcaaagcgaagtcctgctccccatcagcgcccggtaacccttttcaccgccagaaatccttctacgggagagccatcgccacatgtgcacattcgacagactgactcaacaccagacgtccttcagctaggatttggcctccccctggctcttggcccacgcgcttggccattggccgaggagacccttcggctcca

SEQ ID NO: 532462 - DNA, 878 bp, Homo sapiens
gcgccggcaagacagcacagacagattgacctatggggtgtcgcgagtgtgagagggaagcgccgcgggctgtatttctagacctgcccttcgcctggttcgtggcgcctttgtgaccccgggccctgccgcctgcaggtcggaaatttgcgctgtgctcctgtgctacggcctgtggctggaatgccttgtctgctgcccaactggctggcaagatgaagctctccctggtggcccgcgatgctggttgtgctcaagcgcggcgcgggccgaggaggaggacaacgaaggagcgacgttggagcacgggtggctccgggcattcgaccccgggggggaccccactataccttcagtggcggtcggcgatgtcccaagaacggggccgggtggggagaatcatccgccaaacggattcaagggacaagcacggaatcaaagcgcccgtcccttatggtgcgcctatccacctccgtgaagggggaacacggtcctgattggggcagaggcccgcccaaagaacaccaggttcaccattccaagacccggaggaacaagggtccttgtggacggcccaagggggtatcatcggccgcacggtggaattggacccgttctgtgccaggcaggacatcaaggttctggccggtacacgggtgggttgaaacacgaaacactagaccatacttcccggtggatactggggggtgcgcaacccaagagaattggcccctgaagaaaatttctgccagggtcccactaaagtgaaagaaccgtgaagcttattgggaaagaggtccccatgcgttgtcagtgtcccgcctattttagtgtgcccaggccagacaccaagaggtggaatatgcgacacatgttgg

SEQ ID NO: 532463 - DNA, 239 bp, Homo sapiens
ggcctggtccgcattagtgaacggcgctagcggcattaagtgaacggaatcgggaagcataaagggagagaactttttcatgccattaaacaagactttggttttttattcacttatgagttctacagaagaagctcaaagatcaacaagactatcttgtaatatctttaatctacccaatactctgtatcatgcagtgaggtcagtctgttcaaggcgttcacttaatgccgctagcg

SEQ ID NO: 532464 - DNA, 105 bp, Homo sapiens
  misc_feature (10)..(10): n is a, c, g, or t
  misc_feature (68)..(68): n is a, c, g, or t
  misc_feature (101)..(101): n is a, c, g, or t
caagcaccanatctgggtgggggtcgtccccagaggccccgatggagcccagttgagctccgcgtttnacagacggttttccgaggagtgcttatcctccntggg

SEQ ID NO: 532465 - DNA, 155 bp, Homo sapiens
gtctgactactggtagtgtatggagtgtcagcattgctgatccttctctgatatctcctgtcatggttcccctactacaacatgctgaagtgtggcttcctggttgtggtgcatcgggccctagccacttctagatggggctgaactagctctac

SEQ ID NO: 532466 - DNA, 474 bp, Homo sapiens
taggaattcggcacgagaggacacccactgcacatgactctcagacgggcttagacgcactatgtatcggagtgtcggatatgcggagtgacagatgactgcccggcgcacacatatatatgagccgctatggcactgagcctgtaattagtgaccacggacatatactagtgaggactatatgactgtacacttctgcgctatatgtgattaactctgaaacatactgtctttaggggagaccgaagtcttacactcgctgagaaccatgacgagactgtcctaagagacacactatgagagagggcacatcgcggtatagtatctctagacatctgggaagagattatatagtatttgagggacatgagctatacgagcgctgtgagagtagctgtgatgagccaagtatagagatactatggtcacaacttagaatttaggccacagtaaccctcttccctgttgggtttg

SEQ ID NO: 532467 - DNA, 211 bp, Homo sapiens
ctccaatggttccttccaccgcagtcagaacatagacctccttctgtgaggtcaccgtgtactccaggtcactgtgtaggggggcaacactgtaggcacctttgtcatcagtaaagagtgtgatcagcggtgaacttggccccccccccactgatgacaaactcgactctttccacctcggggtgggtcttggcttctaataaacaaacag

SEQ ID NO: 532468 - DNA, 219 bp, Homo sapiens
tgttgtactccatcgtggaggttgtactccaccggtagtttgtactccaccggcaggttgtactccaccggcaggttgtactccaccgtgcaggttgtactccaccgtgcaggttgtactcctctgccctccagcagttggctggtaggtggcgatctcgcatgtccaaggccagatttcacactcattgagctcctgtggtactcaccgcagcaattc

SEQ ID NO: 532469 - DNA, 145 bp, Homo sapiens
aaccccggttttttttaaagcccccccccccccctggccccctggggggtaggtttccccttttccttttggtcccgcccaaggagggggtgctttttagggcgggggctttttttccctttaaaaaaccccctgccccgtggga

SEQ ID NO: 532470 - DNA, 266 bp, Homo sapiens
gactgcatctgtgcctcacgcctcctaaatagtagagctgtgttttcagtcttttttgacgcgtttgcaactccaggtttgacatggtaagtttagattcattctgacatttacagattttacatcctacttcataagatgcccatagccttaatccattacagccgctgcctcatccatctctgcttatagccttgatctattacagtagccacctcgtccatctctgctcatagcctaaactaatagaagccagagggaagaaa

SEQ ID NO: 532471 - DNA, 208 bp, Homo sapiens
atacactctaatgcaaaacactgtctctctaatttctataggtaacctgccatctgcattcaaatttagctcacttactgatgagtttcttttggccatgacgaggtcttgtgtctcctgtggtttggaaccttgggagtcgggggtgggaaagagtctgctgacatttgtgaactgtgcctatgtcaagtgggcacacattatggag

SEQ ID NO: 532472 - DNA, 127 bp, Homo sapiens
gatgaagcgctcgagatctactatccagaggcacaacctcagagtttatctagaactcatcacttgtggagagcttaccaagtcaaggaactctgtattgaacagctgcagtttccctacttcccta

SEQ ID NO: 532473 - DNA, 737 bp, Homo sapiens
actacagatcttgctgaaagagaccagttggtactaattatgagcatttattcaaacaaaagtttttgaaatattacaactggggatttaaaaaatgcagcttagaatctgatggttgttttcttctgtgatgttgtatggtaggtataggagaatcgagttttggctctggattgtccaggctggaatgcaatggccacaatctcggctcactgcaacctcgtgccttcggggttcaagcgattctccgtgccttagcctcccgagtagctgggattacaggcgccgtgccaccacgtccggctaatttttgggtatttgggagctagagaacggggttttcaccataatggtcaggcgtgtcttcaaactccgtgatctcagggtgatccacccatctcggccttccaaagtgctgggattactggcgtgagccaccggaacccgggcctttgactgttaacttatataaagcactgtaatttggtagctgatgacaaaaggcagccaaagtgttttggataaattcagtggcaactgtatttaggtctttggaaataactctgaaaactttcaggacaacatagatttcaacctgatagcacaccacacacagtgagctgtgggctttttaaattctgaagcctggtacaggtaggagttcctaagattcaagtgtttaaaataattctatctatgaaattgaaggatgaaagcagatctctgactgacatgta

SEQ ID NO: 532474 - DNA, 227 bp, Homo sapiens
cggatggcattgagtttgatggcactgcctcctcctcactctggtctccagacaggaaggtatcccagtgacacgcggggggcactgtgcggcgcaccgctggacggtcgccatggcaatctcctcatgagacaacttctgagtgcaagcatgccctgtggtgaccattgttgggcttcagaaagtgtgcctttccaggcacgatgtaggtggacactcaagagcct

SEQ ID NO: 532475 - DNA, 2239 bp, Homo sapiens
  misc_feature (21)..(21): n is a, c, g, or t
  misc_feature (33)..(33): n is a, c, g, or t
  misc_feature (35)..(35): n is a, c, g, or t
  misc_feature (305)..(305): n is a, c, g, or t
  misc_feature (2121)..(2121): n is a, c, g, or t
  misc_feature (2125)..(2125): n is a, c, g, or t
tgagtcggtacctcagagctncctgatggtaanancattcccttggttcacaatctactaccttccacagcagcccaggcgacactgaaaccacactcttacctgacgacaccataacctcaggcctcgtggaggcatctacacccacccacagcagcactggctcgctacacacaacactgacccctgccagctccacaagcgctggccttcaggaagaatctaccactttccagagctggccaagctcaagtgacacaacaccttcacctcccggcaccacagcagcccctgttgaagtatcnacaacctaccacagccgcccgagctcaactccaacaacacacttttctgccagttccacaaccttgggccgtagtgaggaatcaacaacagtccacagcagcccaggtgcaactggaacagcactcttccctacccgctctgcaacctcagttcttgttggagaacctacaacgtcacccatcagttcaggctcaacggaaacaacagcgttacctggcagtaccacaacagcaggcctgagtgagaaatctaccaccttctacagtagccccagatcaccggacacaacactctcacctgccagcacgacaagctcaggcgtcagtgaagaatccaccacctcccacagccgaccaggctcaacgcacacaacagcattccctggcagtaccaccatgccaggcgtcagtcaggaatctacagcttcccacagcagcccaggctccacagacacaacactgtcccctggcagtaccacagcatcatcccttggtccagaatctactaccttccacagcggcccaggctccactgaaacaacactcttacctgacaacaccacagcctcaggcctccttgaagcatctacgcccgtccacagcagcactggatcgccacacacaacactgtcccctgccggctctacaacccgtcagggagaatctaccaccttccagagctggccaaactcgaaggacactacccctgcacctcctactaccacatcagcctttgttgagctatctacaacctcccacggcagcccgagctcaactccaacaacccacttttctgccagctccacaaccttgggccgtagtgaggaatcgacaacagtccacagcagcccagttgcaactgcaacaacaccctcgcctgcccgctccacaacctcaggcctcgttgaagaatctacgacctaccacagcagcccgggctcaactcaaacaatgcacttccctgaaagcgacacaacttcaggccgtggtgaagaatcaacaacttcccacagcagcacaacacacacaatatcttcagctcctagcaccacatctgcccttgttgaagaacctaccagctaccacagcagcccgggctcaactgcaacaacacacttccctgacagctccacaacctcaggccgtagtgaggaatcaacagcatcccacagcagccaagacgcaacgggaacaatagtcctacctgcccgctccacaacctcagttcttcttggagaatctacgacctcacccatcagttcaggctcaatggaaacgacagcgttacccggcagtaccacaacgccaggcctcagtgagaaatctaccactttccacagtagccccagatcaccagccacaacactctcacctgccagcacgacaagctcaggcgtcagtgaagaatccaccacctcccacagccgaccaggctcaacgcacacaacagcattccctgacagcaccaccacgccaggcctcagtcggcattctacaacttcccacagcagcccaggctcaacggatacaacactgttacctgccagcaccaccacctcaggccccagtcaggaatcaacaacttcccacagcagcccaggttcaactgacacagcactgtcccctggcagtaccacagccttatcctttggtcaagaatctacaaccttccacagcagcccaggctccactcacacaacactcttccctgacagcaccacaagctcaggcatcgttgaagcatctacacgcgtccacagcagcactggctcaccacgcacaacactgtcccctgccagctccacaagcctgactncagngagaactttctccatcacagaccatcccaacctcaatcacaccacgtcatcactacccaggcccatatcctacaacttctataatagcggtaccagctcaattcgatcatgtca

SEQ ID NO: 532476 - DNA, 379 bp, Homo sapiens
  misc_feature (149)..(149): n is a, c, g, or t
tgagcaggggaagcacgctgcttgaggctcgtggacggagtcctagcagcaatcgtccaagctgacaagcccttgcgcctgcctctccagggagtgtctacaacatttgggggggtattggtaacctgtatcctgttggccggagtggnagacctgggtgggtttctcgaaaaccccacgggtgattggggtaggtgcaacgcgttagacgtccgagttcgaagggtatgacagacgggagaggtcacacaatctgttcgtattaatgtctactatgagaggctgttgaagatgatagcgtcttttcgcttgtgggagaacaaattgttgggtgtctttcctaaaatgttccaatgaaatgtgtgcgattcaagaggat

SEQ ID NO: 532477 - DNA, 2098 bp, Homo sapiens
  misc_feature (21)..(21): n is a, c, g, or t
  misc_feature (33)..(33): n is a, c, g, or t
  misc_feature (35)..(35): n is a, c, g, or t
  misc_feature (305)..(305): n is a, c, g, or t
tgagtcggtacctcagagctncctgatggtaanancattcccttggttcacaatctactaccttccacagcagcccaggcgacactgaaaccacactcttacctgacgacaccataacctcaggcctcgtggaggcatctacacccacccacagcagcactggctcgctacacacaacactgacccctgccagctccacaagcgctggccttcaggaagaatctaccactttccagagctggccaagctcaagtgacacaacaccttcacctcccggcaccacagcagcccctgttgaagtatcnacaacctaccacagccgcccgagctcaactccaacaacacacttttctgccagttccacaaccttgggccgtagtgaggaatcaacaacagtccacagcagcccaggtgcaactggaacagcactcttccctacccgctctgcaacctcagttcttgttggagaacctacaacgtcacccatcagttcaggctcaacggaaacaacagcgttacctggcagtaccacaacagcaggcctgagtgagaaatctaccaccttctacagtagccccagatcaccggacacaacactctcacctgccagcacgacaagctcaggcgtcagtgaagaatccaccacctcccacagccgaccaggctcaacgcacacaacagcattccctggcagtaccaccatgccaggcgtcagtcaggaatctacagcttcccacagcagcccaggctccacagacacaacactgtcccctggcagtaccacagcatcatcccttggtccagaatctactaccttccacagcggcccaggctccactgaaacaacactcttacctgacaacaccacagcctcaggcctccttgaagcatctacgcccgtccacagcagcactggatcgccacacacaacactgtcccctgccggctctacaacccgtcagggagaatctaccaccttccagagctggccaaactcgaaggacactacccctgcacctcctactaccacatcagcctttgttgagctatctacaacctcccacggcagcccgagctcaactccaacaacccacttttctgccagctccacaaccttgggccgtagtgaggaatcgacaacagtccacagcagcccagttgcaactgcaacaacaccctcgcctgcccgctccacaacctcaggcctcgttgaagaatctacgacctaccacagcagcccgggctcaactcaaacaatgcacttccctgaaagcgacacaacttcaggccgtggtgaagaatcaacaacttcccacagcagcacaacacacacaatatcttcagctcctagcaccacatctgcccttgttgaagaacctaccagctaccacagcagcccgggctcaactgcaacaacacacttccctgacagctccacaacctcaggccgtagtgaggaatcaacagcatcccacagcagccaagacgcaacgggaacaatagtcctacctgcccgctccacaacctcagttcttcttggagaatctacgacctcacccatcagttcaggctcaatggaaacgacagcgttacccggcagtaccacaacgccaggcctcagtgagaaatctaccactttccacagtagccccagatcaccagccacaacactctcacctgccagcacgacaagctcaggcgtcagtgaagaatccaccacctcccacagccgaccaggctcaacgcacacaacagcattccctgacagcaccaccacgccaggcctcagtcggcattctacaacttcccacagcagcccaggctcaacggatacaacactgttacctgccagcaccaccacctcaggccccagtcaggaatcaacaacttcccacagcagcccaggttcaactgacacagcactgtcccctggcagtaccacagccttatcctttggtcaagaatctacaaccttccacagcagcccaggctccactcacacaacactcttccctgacagcaccacaagctcaggcatcctctcatgcacacccgagagcactaatgggagaaaacaaactcagccagccccaatgcg

SEQ ID NO: 532478 - DNA, 2279 bp, Homo sapiens
  misc_feature (21)..(21): n is a, c, g, or t
  misc_feature (33)..(33): n is a, c, g, or t
  misc_feature (35)..(35): n is a, c, g, or t
  misc_feature (305)..(305): n is a, c, g, or t
tgagtcggtacctcagagctncctgatggtaanancattcccttggttcacaatctactaccttccacagcagcccaggcgacactgaaaccacactcttacctgacgacaccataacctcaggcctcgtggaggcatctacacccacccacagcagcactggctcgctacacacaacactgacccctgccagctccacaagcgctggccttcaggaagaatctaccactttccagagctggccaagctcaagtgacacaacaccttcacctcccggcaccacagcagcccctgttgaagtatcnacaacctaccacagccgcccgagctcaactccaacaacacacttttctgccagttccacaaccttgggccgtagtgaggaatcaacaacagtccacagcagcccaggtgcaactggaacagcactcttccctacccgctctgcaacctcagttcttgttggagaacctacaacgtcacccatcagttcaggctcaacggaaacaacagcgttacctggcagtaccacaacagcaggcctgagtgagaaatctaccaccttctacagtagccccagatcaccggacacaacactctcacctgccagcacgacaagctcaggcgtcagtgaagaatccaccacctcccacagccgaccaggctcaacgcacacaacagcattccctggcagtaccaccatgccaggcgtcagtcaggaatctacagcttcccacagcagcccaggctccacagacacaacactgtcccctggcagtaccacagcatcatcccttggtccagaatctactaccttccacagcggcccaggctccactgaaacaacactcttacctgacaacaccacagcctcaggcctccttgaagcatctacgcccgtccacagcagcactggatcgccacacacaacactgtcccctgccggctctacaacccgtcagggagaatctaccaccttccagagctggccaaactcgaaggacactacccctgcacctcctactaccacatcagcctttgttgagctatctacaacctcccacggcagcccgagctcaactccaacaacccacttttctgccagctccacaaccttgggccgtagtgaggaatcgacaacagtccacagcagcccagttgcaactgcaacaacaccctcgcctgcccgctccacaacctcaggcctcgttgaagaatctacgacctaccacagcagcccgggctcaactcaaacaatgcacttccctgaaagcgacacaacttcaggccgtggtgaagaatcaacaacttcccacagcagcacaacacacacaatatcttcagctcctagcaccacatctgcccttgttgaagaacctaccagctaccacagcagcccgggctcaactgcaacaacacacttccctgacagctccacaacctcaggccgtagtgaggaatcaacagcatcccacagcagccaagacgcaacgggaacaatagtcctacctgcccgctccacaacctcagttcttcttggagaatctacgacctcacccatcagttcaggctcaatggaaacgacagcgttacccggcagtaccacaacgccaggcctcagtgagaaatctaccactttccacagtagccccagatcaccagccacaacactctcacctgccagcacgacaagctcaggcgtcagtgaagaatccaccacctcccacagccgaccaggctcaacgcacacaacagcattccctgacagcaccaccacgccaggcctcagtcggcattctacaacttcccacagcagcccaggctcaacggatacaacactgttacctgccagcaccaccacctcaggccccagtcaggaatcaacaacttcccacagcagcccaggttcaacttagacaataactcttttacgcactcctttttagttatccccacctgcccagttcccttattaggccgagacactttaactaaattatctgcttccctgactactcctggactacagctgcatctcattgccgcccttattcctaatccaaagcctcctttgcgtcctcctcttgtatccccccaccttaacccacaagtataagatacctctactccctccttggcgaccgatcatgcaccccttaccatctcattaaaacctaatcacccttaccccgctcaacaccaatatcccatcccacagcatgctttaaaaggattaaagcctgttatcacttgcctgctacagcatgggctccttaaac

SEQ ID NO: 532479 - DNA, 1868 bp, Homo sapiens
  misc_feature (21)..(21): n is a, c, g, or t
  misc_feature (33)..(33): n is a, c, g, or t
  misc_feature (35)..(35): n is a, c, g, or t
  misc_feature (305)..(305): n is a, c, g, or t
tgagtcggtacctcagagctncctgatggtaanancattcccttggttcacaatctactaccttccacagcagcccaggcgacactgaaaccacactcttacctgacgacaccataacctcaggcctcgtggaggcatctacacccacccacagcagcactggctcgctacacacaacactgacccctgccagctccacaagcgctggccttcaggaagaatctaccactttccagagctggccaagctcaagtgacacaacaccttcacctcccggcaccacagcagcccctgttgaagtatcnacaacctaccacagccgcccgagctcaactccaacaacacacttttctgccagttccacaaccttgggccgtagtgaggaatcaacaacagtccacagcagcccaggtgcaactggaacagcactcttccctacccgctctgcaacctcagttcttgttggagaacctacaacgtcacccatcagttcaggctcaacggaaacaacagcgttacctggcagtaccacaacagcaggcctgagtgagaaatctaccaccttctacagtagccccagatcaccggacacaacactctcacctgccagcacgacaagctcaggcgtcagtgaagaatccaccacctcccacagccgaccaggctcaacgcacacaacagcattccctggcagtaccaccatgccaggcgtcagtcaggaatctacagcttcccacagcagcccaggctccacagacacaacactgtcccctggcagtaccacagcatcatcccttggtccagaatctactaccttccacagcggcccaggctccactgaaacaacactcttacctgacaacaccacagcctcaggcctccttgaagcatctacgcccgtccacagcagcactggatcgccacacacaacactgtcccctgccggctctacaacccgtcagggagaatctaccaccttccagagctggccaaactcgaaggacactacccctgcacctcctactaccacatcagcctttgttgagctatctacaacctcccacggcagcccgagctcaactccaacaacccacttttctgccagctccacaaccttgggccgtagtgaggaatcgacaacagtccacagcagcccagttgcaactgcaacaacaccctcgcctgcccgctccacaacctcaggcctcgttgaagaatctacgacctaccacagcagcccgggctcaactcaaacaatgcacttccctgaaagcgacacaacttcaggccgtggtgaagaatcaacaacttcccacagcagcacaacacacacaatatcttcagctcctagcaccacatctgcccttgttgaagaacctaccagctaccacagcagcccgggctcaactgcaacaacacacttccctgacagctccacaacctcaggccgtagtgaggaatcaacagcatcccacagcagccaagacgcaacgggaacaatagtcctacctgcccgctccacaacctcagttcttcttggagaatctacgacctcacccatcagttcaggctcaatggaaacgacagcgttacccggcagtaccacaacgccaggcctcagtgagaaatctaccactttccacagtagccccagatcaccagccacaacactctcacctgccagcacgacaagctcaggcgtcagtgaagaatccaccacctccccaaccaggttctactcactcaacagtgtcacctgccagcaccaccacgccaggcctcagtgaggaatctaccaccacctcccgtagccaaccaggttctactcactcacagtgtcatcactccaacgcaccggccagccatca

SEQ ID NO: 532480 - DNA, 118 bp, Homo sapiens
ttgctgtagtcccggtactcttgaagctgaactgagcccaggaaatcaaggctgcagtgggccgagattgagccactgcacttcagagctgggcacaacagaagtgagaacttgtctc

SEQ ID NO: 532481 - DNA, 2310 bp, Homo sapiens
  misc_feature (21)..(21): n is a, c, g, or t
  misc_feature (33)..(33): n is a, c, g, or t
  misc_feature (35)..(35): n is a, c, g, or t
  misc_feature (305)..(305): n is a, c, g, or t
  misc_feature (2234)..(2234): n is a, c, g, or t
  misc_feature (2242)..(2242): n is a, c, g, or t
  misc_feature (2246)..(2246): n is a, c, g, or t
  misc_feature (2249)..(2250): n is a, c, g, or t
tgagtcggtacctcagagctncctgatggtaanancattcccttggttcacaatctactaccttccacagcagcccaggcgacactgaaaccacactcttacctgacgacaccataacctcaggcctcgtggaggcatctacacccacccacagcagcactggctcgctacacacaacactgacccctgccagctccacaagcgctggccttcaggaagaatctaccactttccagagctggccaagctcaagtgacacaacaccttcacctcccggcaccacagcagcccctgttgaagtatcnacaacctaccacagccgcccgagctcaactccaacaacacacttttctgccagttccacaaccttgggccgtagtgaggaatcaacaacagtccacagcagcccaggtgcaactggaacagcactcttccctacccgctctgcaacctcagttcttgttggagaacctacaacgtcacccatcagttcaggctcaacggaaacaacagcgttacctggcagtaccacaacagcaggcctgagtgagaaatctaccaccttctacagtagccccagatcaccggacacaacactctcacctgccagcacgacaagctcaggcgtcagtgaagaatccaccacctcccacagccgaccaggctcaacgcacacaacagcattccctggcagtaccaccatgccaggcgtcagtcaggaatctacagcttcccacagcagcccaggctccacagacacaacactgtcccctggcagtaccacagcatcatcccttggtccagaatctactaccttccacagcggcccaggctccactgaaacaacactcttacctgacaacaccacagcctcaggccccacagacacaacattgtccccagtcaggaatcaacaactttccatagtagccccagatcaccaaccacaacactctcacctgccagcatgacaagcctaggcgtcggtgaagaatccaccacctcccgtagccaaccaggttctactcactcaacagtgtcacctgccagcaccaccacgccaggcctcagtgaggaatctaccaccgtctacagcagcagcccaggctcaactgaaaccacagtgttccctcgcagcaccacaacctcagttcgtggtgaagagcctacaaccttccacagccggccagcctcaactcacacaacactgttcactgaggacagcaccacctcgggcctcactgaagaatctacagccttccccggcagcccagcctccacccaaacagggttacctgccacactcacaaccgcagacctcggtgaggaatcaactacctttcccagcagctcaggctcaactggaacaacactctcacctgcccgctccaccacctctggcctcgttggagaatccacaccctcacgcctcagtccaagctcaaccgaaacaacaactttacccggcagtcccacaacaccaagcctcagtgagaaatcaaccaccttctacactagccccagatcaccagatgcaacactctcacctgcaaccacaacaagctcaggcgtcagcgaagaatccagcacatcccacagtcaaccaggctcaacgcacacaacagcgttccctgacagcaccaccacctcaggcctcagtcaggaacctacaacttcccacagcagccaaggctcaacagaggcaacactgtcccctggcagtaccacagcctcatcccttggtcaacaatctacaaccttccacagcagcccaggcgacactgaaaccacactcttacctgacgacaccataacctcaggcctcgtggaggcatctacacccacccacagcagcactggctcgctacacacaacactgacccctgccagctccacaagcgctggccttcaggaagaatctaccactttccagagctggccaagctcaagtgacacaacaccttcacctcccggcaccacagcagcccctgttgaagtatccacaacctaccacagccgcccgagctcaactccaacaacacacttttctgccagttccacaaccttgggccgtagtgaggaatcaacaacagtccacagcagcccaggtgcaactggaacagcactcttccctacccgctctgcaacctcagttcttgttggagaacctacaacgtcacccatcagttcaggctcaacggaaacaacagcgttacctggcagtaccacaacancaggcctnagtnagnnatctaccaccttctacagcagcccccccgctgctgaaatgcgggatccttagagtcaccc

SEQ ID NO: 532482 - DNA, 712 bp, Homo sapiens
tggcacgaggggctcactgtaatccccttctcccaggttcaagcgattctcatgcctcagcctcctgagtagctgggattataagcatgtgccaccacacctggctaatttttgtattttttagtagagactgggtttcaccatgttggctgggctggtctcgaacgcctgacctccacctttcttggcctcccaaagtgctgggattaccgtcatgagccactgcacctagccttcatagagaggtttttgccatcaggccacactggcccgattccctctgtttcccagcttctcatgtttttccatatggcactttagctttctttcttgtgaggccagcggggtaagcacggacctgctctgtaagctcccccaaaaccttagagtgaggggagagcagtcatggcttcagctcttactctaattagagaggatcaaaggagaggggccggaaaaaggccaaataaaatatagcccctttaatgtagaatttgtccagtttgaagaaaaccatttctgtcacattgttttaacttgagtttgaggtcccttctatgtttccttatggttagaattagtcagctcagtactcttattaatgttgctaagcaccagatacctttggatgtcttggacccacagagagttagctctaaagcataattgaaaacttttgtctgagttttttgcagttttcagttagcaacta

SEQ ID NO: 532483 - DNA, 746 bp, Homo sapiens
aggtcaagctgggtactgcctgacttgagggaagggagagtaaaagccatcagtgactcagatggggtgagctacccttggtacgggaacaccacagaaactgtgaccctggttggccccaccaacaagatctccaggttctccgtcagcatgaatgacaacttctaccccagtgtgacatgggcagtgcctgtgagtgacagcaatgtgccactgctcacaagaatcaagagagaccaaagtttcacgacctggctggtggccatgaacaccaccacaaaggagaagatcattctgcagaccatcaagtggaggatgagggtggacattgaagtggaccctcttcagctcttggggcagcgggcccggctggtgggcaggactcagcaggagcagccccggatcctgagccggatggaacccatcccccctaatgcactagtgaaacccaatgccaatgatgcccaggtcctcatgtggaggcccaagcgggggccacctctggttgtgatccctcctaagtagaagcagactggcctgactgtgtgtggatcacacgcctctgagacatgcagtgagggtgccaggggtggcaggagccaaacagagtttctgagccaaagcagacctctcggtttgccagcctttgcagccacttttgaagagtagggctgctccttgggtggtagaaccataatccttaggaaaaatcccttcctcttaggaataaagaaatcactgatttg

SEQ ID NO: 532484 - DNA, 220 bp, Homo sapiens
gccctggtttcctcctcgaggagtcgcatgtcgcctgcctattcatgtgaaatggtgggtccgtggttcctctccagcactcgatgtcgcctgactcttcatgtgaaatggtggcgtccgaggttcctctccagcattcgcatgtcgcctgactcttcatgtgaaatggtgaagtccgggggtcctctccaggactcgcattttgcctgactcttccatg

SEQ ID NO: 532485 - DNA, 1641 bp, Homo sapiens
  misc_feature (21)..(21): n is a, c, g, or t
  misc_feature (33)..(33): n is a, c, g, or t
  misc_feature (35)..(35): n is a, c, g, or t
  misc_feature (305)..(305): n is a, c, g, or t
tgagtcggtacctcagagctncctgatggtaanancattcccttggttcacaatctactaccttccacagcagcccaggcgacactgaaaccacactcttacctgacgacaccataacctcaggcctcgtggaggcatctacacccacccacagcagcactggctcgctacacacaacactgacccctgccagctccacaagcgctggccttcaggaagaatctaccactttccagagctggccaagctcaagtgacacaacaccttcacctcccggcaccacagcagcccctgttgaagtatcnacaacctaccacagccgcccgagctcaactccaacaacacacttttctgccagttccacaaccttgggccgtagtgaggaatcaacaacagtccacagcagcccaggtgcaactggaacagcactcttccctacccgctctgcaacctcagttcttgttggagaacctacaacgtcacccatcagttcaggctcaacggaaacaacagcgttacctggcagtaccacaacagcaggcctgagtgagaaatctaccaccttctacagtagccccagatcaccggacacaacactctcacctgccagcacgacaagctcaggcgtcagtgaagaatccaccacctcccacagccgaccaggctcaacgcacacaacagcattccctggcagtaccaccatgccaggcgtcagtcaggaatctacagcttcccacagcagcccaggctccacagacacaacactgtcccctggcagtaccacagcatcatcccttggtccagaatctactaccttccacagcggcccaggctccactgaaacaacactcttacctgacaacaccacagcctcaggcctccttgaagcatctacgcccgtccacagcagcactggatcgccacacacaacactgtcccctgccggctctacaacccgtcagggagaatctaccaccttccagagctggccaaactcgaaggacactacccctgcacctcctactaccacatcagcctttgttgagctatctacaacctcccacggcagcccgagctcaactccaacaacccacttttctgccagctccacaaccttgggccgtagtgaggaatcgacaacagtccacagcagcccagttgcaactgcaacaacaccctcgcctgcccgctccacaacctcaggcctcgttgaagaatctacgacctaccacagcagcccgggctcaactcaaacaatgcacttccctgaaagcgacacaacttcaggccgtggtgaagaatcaacaacttcccacagcagcacaacacacacaatatcttcagctcctagcaccacatctgcccttgttgaagaacctaccagctaccacagcagcccgggctcaactgcaacaacacacttccctgacagctccacaacctcaggccgtagtgaggaatcaacagcatcccacagcagccaagacgcaacgggaacaatagtcctacctgcccgctccacaacctcagttcttcttggagaatctacgacctcacccatcagttcaggctcaatggaaacgacagcgttacccggcagtaccacaaccgcaatgtgctattgaaacttctaaaactagg

SEQ ID NO: 532486 - DNA, 798 bp, Homo sapiens
  misc_feature (798)..(798): n is a, c, g, or t
aggtcaagctgggtactgcctgacttgagggaagggagagtaaaagccatcagtgactcagatggggtgagctacccttggtacgggaacaccacagaaactgtgaccctggttggccccaccaacaagatctccaggttctccgtcagcatgaatgacaacttctaccccagtgtgacatgggcagtgcctgtgagtgacagcaatgtgccactgctcacaagaatcaagagagaccaaagtttcacgacctggctggtggccatgaacaccaccacaaaggagaagatcattctgcagaccatcaagtggaggatgagggtggacattgaagtggaccctcttcagctcttggggcagcgggcccggctggtgggcaggactcagcaggagcagccccggatcctgagccggatggaacccatcccccctaatgcactagtgaaacccaatgccaatgatgcccaggtcctcatgtggaggcccaagcgggggccacctctggttgtgatccctcctaagtagaagcagactggcctgactgtgtgtggatcacacgcctctgagacatgcagtgagggtgccaggggtggcaggagccaaacagagtttctgagccaaagcagacctctcggtttgccagcctttgcagccacttttgaagagtagggctgctccttgggtggtagaaccataatccttaggaaaaatcccttcctcttaggaataaagaaatcactgatttggcagacttgctgtgattaccatgcaggtagccatattttggagctgaccagn

SEQ ID NO: 532487 - DNA, 342 bp, Homo sapiens
  misc_feature (1)..(1): n is a, c, g, or t
ngggagggctcagctgtccccagatccaggtgcctctgaccagcctggtcacctcctgaggaataaatgctgaacctcacaagccccatcattcatttcttctcaattcacagtgcccctctttgtttctggggtggaactaggtcctgagggcacagcctagctgagtgcaaagaaatataggataacagaaaacccaaaatcaggaggagaaggctgggtttggtggctcatgactgtaatcccagcactgtgggaggctgaggagggcagatcacctgaggtcaggagttcgagaccagcctgtgcaatatggtgaaaccccttctctaccaaaaatac

SEQ ID NO: 532488 - DNA, 533 bp, Homo sapiens
atctagaggattcggagaggcgagaagaggactggtgtgtgtgaagagatgacgatgcactcacctgagcagtcacgagagaaatcagaaacagtcgctacagaagagattgtggagtgtggaaaagcttcggattcggagaggctggcctgaagctgcagaaggacctggagtttgtgctgaaggacaagctggagccacagagtgcagagttcctggcccaggaggagcggttcgcagcagtcctgaaggaatacgagctcaagtgtcgggtacgtgcctgctctgtctgccttttagtctcatgtccaggctctgggtctccacacgcaggtggtccacagtaacgcaggagtgtctgctccagggagagcctctgtttgcgggcatgcttgaccatggtcttgccacactcctagacttagggttccctggctctcgttgccacctatcctgaaggccgcctctgtgtgtccagggaccatgcagggcattgttgtcttcctgtggtcatgtttagctttcctgggcca

SEQ ID NO: 532489 - DNA, 1422 bp, Homo sapiens
  misc_feature (1346)..(1346): n is a, c, g, or t
  misc_feature (1354)..(1354): n is a, c, g, or t
  misc_feature (1358)..(1358): n is a, c, g, or t
  misc_feature (1361)..(1362): n is a, c, g, or t
aggatctgatcagtgcattgtgatcacgtgcattgtgatcacgtgcattgtgatcacgtgcattgtgatccagtgcattgtgacaagcctaggcgtcggtgaagaatccaccacctcccgtagccaaccaggttctactcactcaacagtgtcacctgccagcaccaccacgccaggcctcagtgaggaatctaccaccgtctacagcagcagcccaggctcaactgaaaccacagtgttccctcgcagcaccacaacctcagttcgtggtgaagagcctacaaccttccacagccggccagcctcaactcacacaacactgttcactgaggacagcaccacctcgggcctcactgaagaatctacagccttccccggcagcccagcctccacccaaacagggttacctgccacactcacaaccgcagacctcggtgaggaatcaactacctttcccagcagctcaggctcaactggaacaacactctcacctgcccgctccaccacctctggcctcgttggagaatccacaccctcacgcctcagtccaagctcaaccgaaacaacaactttacccggcagtcccacaacaccaagcctcagtgagaaatcaaccaccttctacactagccccagatcaccagatgcaacactctcacctgcaaccacaacaagctcaggcgtcagcgaagaatccagcacatcccacagtcaaccaggctcaacgcacacaacagcgttccctgacagcaccaccacctcaggcctcagtcaggaacctacaacttcccacagcagccaaggctcaacagaggcaacactgtcccctggcagtaccacagcctcatcccttggtcaacaatctacaaccttccacagcagcccaggcgacactgaaaccacactcttacctgacgacaccataacctcaggcctcgtggaggcatctacacccacccacagcagcactggctcgctacacacaacactgacccctgccagctccacaagcgctggccttcaggaagaatctaccactttccagagctggccaagctcaagtgacacaacaccttcacctcccggcaccacagcagcccctgttgaagtatccacaacctaccacagccgcccgagctcaactccaacaacacacttttctgccagttccacaaccttgggccgtagtgaggaatcaacaacagtccacagcagcccaggtgcaactggaacagcactcttccctacccgctctgcaacctcagttcttgttggagaacctacaacgtcacccatcagttcaggctcaacggaaacaacagcgttacctggcagtaccacaacancaggcctnagtnagnnatctaccaccttctacagcagcccccccgctgctgaaatgcgggatccttagagtcaccc

SEQ ID NO: 532490 - DNA, 1928 bp, Homo sapiens
  misc_feature (21)..(21): n is a, c, g, or t
  misc_feature (33)..(33): n is a, c, g, or t
  misc_feature (35)..(35): n is a, c, g, or t
  misc_feature (305)..(305): n is a, c, g, or t
  misc_feature (1852)..(1852): n is a, c, g, or t
  misc_feature (1860)..(1860): n is a, c, g, or t
  misc_feature (1864)..(1864): n is a, c, g, or t
  misc_feature (1867)..(1868): n is a, c, g, or t
tgagtcggtacctcagagctncctgatggtaanancattcccttggttcacaatctactaccttccacagcagcccaggcgacactgaaaccacactcttacctgacgacaccataacctcaggcctcgtggaggcatctacacccacccacagcagcactggctcgctacacacaacactgacccctgccagctccacaagcgctggccttcaggaagaatctaccactttccagagctggccaagctcaagtgacacaacaccttcacctcccggcaccacagcagcccctgttgaagtatcnacaacctaccacagccgcccgagctcaactccaacaacacacttttctgccagttccacaaccttgggccgtagtgaggaatcaacaacagtccacagcagcccaggtgcaactggaacagcactcttccctacccgctctgcaacctcagttcttgttggagaacctacaacgtcacccatcagttcaggctcaacggaaacaacagcgttacctggcagtaccacaacagcaggcctgagtgagaaatctaccaccttctacagtagccccagatcaccggacacaacactctcacctgccagcacgacaagctcaggcgtcagtgaagaatccaccacctcccacagccgaccaggctcaacgcacacaacagcattccctggcagtaccaccatgccaggcgtcagtcaggaatctacagcttcccacagcagcccaggctccacagacacaacactgtcccctggcagtaccacagcatcatcccttggtccagaatctactaccttccacagcggcccaggctccactgaaacaacactcttacctgacaacaccacagcctcaggcctccttgaagcatctacgcccgtccacagcagcactggatcgccacacacaacactgtcccctgccggctctacaacccgtcagggagaatctaccaccttccagagctggccaaactcgaaggacactacccctgcacctcctactaccacatcagcctttgttgagctatctacaacctcccacggcagcccgagctcaactccaacaacccacttttctgccagctccacaaccttgggccgtagtgaggaatcgacaacagtccacagcagcccagttgcaactgcaacaacaccctcgcctgcccgctccacaacctcaggcctcgttgaagaatctacgacctaccacagcagcccgggctcaactcaaacaatgcacttccctgaaagcgacacaacttcaggccgtggtgaagaatcaacaacttcccacagcagcacaacacacacaatatcttcagctcctagcaccacatctgcccttgttgaagaacctaccagctaccacagcagcccgtgaaaccacactcttacctgacgacaccataacctcaggcctcgtggaggcatctacacccacccacagcagcactggctcgctacacacaacactgacccctgccagctccacaagcgctggccttcaggaagaatctaccactttccagagctggccaagctcaagtgacacaacaccttcacctcccggcaccacagcagcccctgttgaagtatccacaacctaccacagccgcccgagctcaactccaacaacacacttttctgccagttccacaaccttgggccgtagtgaggaatcaacaacagtccacagcagcccaggtgcaactggaacagcactcttccctacccgctctgcaacctcagttcttgttggagaacctacaacgtcacccatcagttcaggctcaacggaaacaacagcgttacctggcagtaccacaacancaggcctnagtnagnnatctaccaccttctacagcagcccccccgctgctgaaatgcgggatccttagagtcaccc

SEQ ID NO: 532491 - DNA, 1578 bp, Homo sapiens
  misc_feature (21)..(21): n is a, c, g, or t
  misc_feature (33)..(33): n is a, c, g, or t
  misc_feature (35)..(35): n is a, c, g, or t
  misc_feature (305)..(305): n is a, c, g, or t
tgagtcggtacctcagagctncctgatggtaanancattcccttggttcacaatctactaccttccacagcagcccaggcgacactgaaaccacactcttacctgacgacaccataacctcaggcctcgtggaggcatctacacccacccacagcagcactggctcgctacacacaacactgacccctgccagctccacaagcgctggccttcaggaagaatctaccactttccagagctggccaagctcaagtgacacaacaccttcacctcccggcaccacagcagcccctgttgaagtatcnacaacctaccacagccgcccgagctcaactccaacaacacacttttctgccagttccacaaccttgggccgtagtgaggaatcaacaacagtccacagcagcccaggtgcaactggaacagcactcttccctacccgctctgcaacctcagttcttgttggagaacctacaacgtcacccatcagttcaggctcaacggaaacaacagcgttacctggcagtaccacaacagcaggcctgagtgagaaatctaccaccttctacagtagccccagatcaccggacacaacactctcacctgccagcacgacaagctcaggcgtcagtgaagaatccaccacctcccacagccgaccaggctcaacgcacacaacagcattccctggcagtaccaccatgccaggcgtcagtcaggaatctacagcttcccacagcagcccaggctccacagacacaacactgtcccctggcagtaccacagcatcatcccttggtccagaatctactaccttccacagcggcccaggctccactgaaacaacactcttacctgacaacaccacagcctcaggcctccttgaagcatctacgcccgtccacagcagcactggatcgccacacacaacactgtcccctgccggctctacaacccgtcagggagaatctaccaccttccagagctggccaaactcgaaggacactacccctgcacctcctactaccacatcagcctttgttgagctatctacaacctcccacggcagcccgagctcaactccaacaacccacttttctgccagctccacaaccttgggccgtagtgaggaatcgacaacagtccacagcagcccagttgcaactgcaacaacaccctcgcctgcccgctccacaacctcaggcctcgttgaagaatctacgacctaccacagcagcccgggctcaactcaaacaatgcacttccctgaaagcgacacaacttcaggccgtggtgaagaatcaacaacttcccacagcagcacaacacacacaatatcttcagctcctagcaccacatctgcccttgttgaagaacctaccagctaccacagcagcccgggctcaactgcaacaacacacttccctgacagctccacaacctcaggccgtagtgaggaatcaacagcatcccacagcagccaagacgcaacgggaacatacaaatggaatcacacccttacctgcccattttactacctcaggccgcattgctactaccacccccggtacatgcaag

SEQ ID NO: 532492 - DNA, 144 bp, Homo sapiens
agaggacccttcagacagcggacccctccccgcatagagctacagtgcttcattcaggacgtcttgcttccctcacatgctgtggtgctttcctaccagagtagagttcgcaaactccaagactgaagtacacaaagagggggt

SEQ ID NO: 532493 - DNA, 1373 bp, Homo sapiens
  misc_feature (1297)..(1297): n is a, c, g, or t
  misc_feature (1305)..(1305): n is a, c, g, or t
  misc_feature (1309)..(1309): n is a, c, g, or t
  misc_feature (1312)..(1313): n is a, c, g, or t
aggtgctctagaggatgctatcacgtgcatgtgacaagcctaggcgtcggtgaagaatccaccacctcccgtagccaaccaggttctactcactcaacagtgtcacctgccagcaccaccacgccaggcctcagtgaggaatctaccaccgtctacagcagcagcccaggctcaactgaaaccacagtgttccctcgcagcaccacaacctcagttcgtggtgaagagcctacaaccttccacagccggccagcctcaactcacacaacactgttcactgaggacagcaccacctcgggcctcactgaagaatctacagccttccccggcagcccagcctccacccaaacagggttacctgccacactcacaaccgcagacctcggtgaggaatcaactacctttcccagcagctcaggctcaactggaacaacactctcacctgcccgctccaccacctctggcctcgttggagaatccacaccctcacgcctcagtccaagctcaaccgaaacaacaactttacccggcagtcccacaacaccaagcctcagtgagaaatcaaccaccttctacactagccccagatcaccagatgcaacactctcacctgcaaccacaacaagctcaggcgtcagcgaagaatccagcacatcccacagtcaaccaggctcaacgcacacaacagcgttccctgacagcaccaccacctcaggcctcagtcaggaacctacaacttcccacagcagccaaggctcaacagaggcaacactgtcccctggcagtaccacagcctcatcccttggtcaacaatctacaaccttccacagcagcccaggcgacactgaaaccacactcttacctgacgacaccataacctcaggcctcgtggaggcatctacacccacccacagcagcactggctcgctacacacaacactgacccctgccagctccacaagcgctggccttcaggaagaatctaccactttccagagctggccaagctcaagtgacacaacaccttcacctcccggcaccacagcagcccctgttgaagtatccacaacctaccacagccgcccgagctcaactccaacaacacacttttctgccagttccacaaccttgggccgtagtgaggaatcaacaacagtccacagcagcccaggtgcaactggaacagcactcttccctacccgctctgcaacctcagttcttgttggagaacctacaacgtcacccatcagttcaggctcaacggaaacaacagcgttacctggcagtaccacaacancaggcctnagtnagnnatctaccaccttctacagcagcccccccgctgctgaaatgcgggatccttagagtcaccc

SEQ ID NO: 532494 - DNA, 266 bp, Homo sapiens
  misc_feature (33)..(33): n is a, c, g, or t
  misc_feature (35)..(35): n is a, c, g, or t
  misc_feature (61)..(61): n is a, c, g, or t
  misc_feature (82)..(82): n is a, c, g, or t
  misc_feature (142)..(142): n is a, c, g, or t
cccagcattttgggaacccaaggtggggggatncncttgaccccaggagttccgagaccancctgggacaacatgagtgagnccacatctcctacaaaaaatttcaaaaatgcacccaggccatggtggtgccacacctgtnagtctctgctattcaggcaggctgagggcgggattcattgtttgagccccaggagaacagattgcagtgagctatgatggcaccactgcatggcagcctgggtgacaaagggagactcagtctc

SEQ ID NO: 532495 - DNA, 273 bp, Homo sapiens
  misc_feature (36)..(37): n is a, c, g, or t
tacctttcatatgctctggctactctataatgcatnngaaggtagcaaaacaattccaaggggctacttattacctaaagaataggtagtgaaatttagccattgtcttttaggtaggaagttcctgtttttagaccttgaggccatccctcttaaactatcctcctagattataaatcctttagagcagagatgccatcctattttgtttggcacatatcactctagagcctttgtactatacaaagtcctttaaaaggactttatatattt

SEQ ID NO: 532496 - DNA, 199 bp, Homo sapiens
tgctggtcgtgggtgtatggtgatggcacagcacgaaaggcaaaccagagctcagcaaaacaggtcatcagccagtggtcattcgacaacgaatgtcataccgtagaaaagatggcgtgtttctttattttgaagctactgcaggagtcatagtgaacaataaaggcgagctgcaaggttctgccattccaggacccgt

SEQ ID NO: 532497 - DNA, 284 bp, Homo sapiens
caccaacatgcccagcaactccagcacagcagcaatacgggtggggaaggggcaagagcaagacaagttatatcattaaggaaacactaactactatcttatacctaatcttcaatacacacaatttaaacaactaccagctgctgttacaccactttacacaattcctatgtactggagcaataacaagatctcaataccattatatgtttaaacattgcaacacggtctctcatgagagaccgtgccacacatagcaacacggtctctcagggtaccgagct

SEQ ID NO: 532498 - DNA, 189 bp, Homo sapiens
gatcacttgagcccaggagttcaaggctgcagagagccatgatcttgtcactatatttcagcctaggcaacagagcgaaaactggtcttaaaaaacaaaacaaaacaaaactttttttaaaggtttattgctgtgttgtttttcagcaaaaccaaacgctagtcaggctgacgtagcatttgacacgta

SEQ ID NO: 532499 - DNA, 198 bp, Homo sapiens
cagtgattacgttgtttcggtacttcgcccgccgagcgccgctcggctgcaccgcgctcgcaccgagtttcacggctcgtgctaagctagcagccgtcgtcgtctccctacagtcgcgatcgtgattatctaccgggacctcatcagccacgatgagatgtactcctacatctagaagatccgggatatcgcggacgg

SEQ ID NO: 532500 - DNA, 189 bp, Homo sapiens
ctgtcaagaactttctactgctgagcttggcaaggtcaagcctgtgttgcagtgcgggcaagctggcccagcctggagctggcgctgtgcagcactcaccccgtggcagtgtgcggccctcagttgtcagtggccccatcctcactgcttgttgtcatatgctccagtcttgtgttttgtactatatca

SEQ ID NO: 532501 - DNA, 152 bp, Homo sapiens
gcgcattgcagcgcttcacggcaatgatgtaacaaaggtattcacaaaggtgacgaattatcaaatttgcggaggcaccagagagttgcggataacaaaagattagatggtattcaatctcagctgattgatgccagtcagagggcgaccca

SEQ ID NO: 532502 - DNA, 710 bp, Homo sapiens
tggccaaatcataagtgcgaaaagaagatacgcccaacggggtagatagtagtcaaggggcatcgtctccgatccagaggaaagagatcaggaggcagaaggcgaggccacagtcagcgaggccctgcaggcccctccgaaccgtcaccacggtggccgtggaggagacaataccactcattcaacggggaggagcccaaaccacatgacccacagactcggcaccccgacgccagagatacctggagcgacggcagcatcaaagaggctagtccacctggcgaaaccacgcggagcccggaaggcttgcggggctccgacctgggctggcttccgtcctcatgccagtggagggacgagataggggcccctagctggggtagagctgagggacgccacgtgccattcccatgggccagtgagggcccggggctctgttctgctgtggctgagctccccagagtcatgaggaggagcgccagttgcccctaggctcactagaccacacacacagccctcctgggccagcccatgagggcccattctagaccgccagctgtctgcgcgtctgactctttgtggtgcctcagcaggacaaggccaccgggcactgcctcacagccaaggctggatctgggttggctccagtgtggtgtttagtgatccacatcaggaagtgattttctaaactggattgattcggctctacc

SEQ ID NO: 532503 - DNA, 342 bp, Homo sapiens
ggccagtgtgcccagcgcgctccacgccctctctataagtacatccgaagagcagagatcgtcgaataccgcccttaagtgatgttgccatgtatcttgacaccgtgccaaagcttccatcacgggaaaatgagaaacactgggtaccaagtgataactcagaggtttctcggttgtgggatacctctctgtatatcagaatgtcgttggcttccgaaatcttaaactacgctcattttacgcactttgtagcttctgcttttatgcttcctctgtcgtcttcactgcacgatgtctttctgttgctctttgttgcggctgtggatcgtggggatcctctag

SEQ ID NO: 532504 - DNA, 167 bp, Homo sapiens
  misc_feature (22)..(22): n is a, c, g, or t
gagccaaacaccggtagaggcnggggaggtgggtactacacaaccgtctccagccttggtctgacgtggactgtcctgcagcgaccatgccccgtaaaggcacccagcctccactgcccggccgcagagaggaagggccgccgcgccgtcccctgacgactagcagc

SEQ ID NO: 532505 - DNA, 825 bp, Homo sapiens
atagtgtctctagtgccgcccctttcagaggttggacgctggctgtggtgtttcgcatagtaggcctgtgggaccccgttgtgttccccacgatgtggtttatcataaaattccctcccgatggaattgtgtctgcgagactgtctcctatggttgtttctcctctcgagtgtttgccgcaatcgcggtctgtcgtatggctcgtaataggggccgctcgtggcggtagttagttctccgttgtccctccgtgtgttcacgagatagccgctgtaccctactgggtgtgttgtcccgcggcgactgtcgctcgggtgtttgggactttattgtgcaagcctcgtcctatggagcttgttgtgggccacgtttttgaatgtgctcccgggcgagtctccctcacttattgtttgcacaccccgcgctgtttgtctgtgcccatgacatgcctcgtgagtcactctcgtccttgtggctggacaggactgaacattctgtgtccctacgacaagtgtggctggtggggtggttgactttggtgagtatgtcgctctcagctccgccgtcacctgattgtgtgaggacactagtgcgctcgtgactcttgctgcctcactgttatcgagcgtgttgtccgtcctgttctgtccgagatactcgccccagatagtagtggtcgcccaccattggtggtaaggatcttctatggatgaggaacacatctgcgggggaaactcctttctggactactggttctctgtggtggaacaatatgtggtgttcaagaaatcggcgtctcatgcctccggcgcccacatatacaag

SEQ ID NO: 532506 - DNA, 679 bp, Homo sapiens
tggccggggttaggtgattttgcaatcgtgttccaccgcacccggccttcattcactttctttagaggcctccaaggtgattattctcctagctcatatctccttgatgtgcatgagggagcactgggtctaatttttgggggctgagaaggctagaaggtgaggtcagcttttcccaggagtcctaaaaaattctggttccttacattgcgggtgtggtagaaagggtgtcatagttctgaaaataggcagttgcctgaagcaccagacctgtctcattccttattagatgtctatctcaaataacagactttgaaaaatattgtgtttatcatcttgacttttccatgcctgtctcgggaaaataactttttctcgacctcttttactctattgccctgcacagactctacctggttcaatttcctatctctcagctcatagtgtctattccccgtgttgcctggtttgtcatctgccctcacttttctggaattgaaatatattgccagtctggggaccgtggatgataccaacctggattcctccattccttctggcagacaggctcctcttgcatggccacttttatccctaccttgcttactggcttgtgtcgcgttcattatgttatgactgccgtttaccattctcgttgaaatctttcccctgtgtacaa

SEQ ID NO: 532507 - DNA, 496 bp, Homo sapiens
ggcacgaggttaaggacgtactcgtcttggtgagagcgtgagctgctgagatttgggagtctgcgctaggcccgcttggagttctgagccgatgggagagttcactcatgtttgcacccgcggtgatgcgtgcttttcgcaagaactagagtctcggctatggagtccccatgctgttgctgattgttggagggtcctttggtctttgggaggtgtctctgatccgatatgatgctgcgtagagttagatggatcctgcgcctgcaaaaattccgaaagagaatacaatatctttagggtcggtaatatcgagtcaatcaaaggcttccagtttgatgactggaagaatattccaggactcgggccttgggcagttcgtgacctccttcaaggcagtggtccagaaggccctgagatttagtccacttcactctgttgtctttaattctccctttttccttttttgaatacaaaatcctttaatgggcaaaaaaaa

SEQ ID NO: 532508 - DNA, 233 bp, Homo sapiens
ttgtatgaagagtattattatacatgcgtgctatataaagtcatctatagtcattgacaaccagaggcacactagtccaatgtataaacttaggtgccggacagtgctacagacatatagatttactaaatatgaatcagtgacccacaaagttacatttacatattattcaccagcctcaaaagtaatataactgaaaacaaactttcacaattgggtactacgctttggca

SEQ ID NO: 532509 - DNA, 1958 bp, Homo sapiens
  misc_feature (21)..(21): n is a, c, g, or t
  misc_feature (33)..(33): n is a, c, g, or t
  misc_feature (35)..(35): n is a, c, g, or t
  misc_feature (310)..(310): n is a, c, g, or t
  misc_feature (318)..(318): n is a, c, g, or t
  misc_feature (323)..(323): n is a, c, g, or t
  misc_feature (325)..(326): n is a, c, g, or t
  misc_feature (332)..(332): n is a, c, g, or t
  misc_feature (336)..(337): n is a, c, g, or t
  misc_feature (352)..(352): n is a, c, g, or t
  misc_feature (355)..(356): n is a, c, g, or t
  misc_feature (367)..(368): n is a, c, g, or t
  misc_feature (377)..(377): n is a, c, g, or t
  misc_feature (391)..(391): n is a, c, g, or t
  misc_feature (407)..(407): n is a, c, g, or t
  misc_feature (418)..(418): n is a, c, g, or t
  misc_feature (421)..(421): n is a, c, g, or t
  misc_feature (511)..(511): n is a, c, g, or t
  misc_feature (1882)..(1882): n is a, c, g, or t
  misc_feature (1890)..(1890): n is a, c, g, or t
  misc_feature (1894)..(1894): n is a, c, g, or t
  misc_feature (1897)..(1898): n is a, c, g, or t
tgagtcggtacctcagagctncctgatggtaanancattcccttggttcacaatctactaccttccacagcagcccaggcgacactgaaaccacactcttacctgacgacaccataacctcaggcctcgtggaggcatctacacccacccacagcagcactggctcgctacacacaacactgacccctgccagctccacaagcgctggccttcaggaagaatctaccactttccagagctggccaagctcaagtgacacaacaccttcacctcccggcaccacagcagcccctgttgaagtatctacaanctaccacngcagncnnggctcnactnnaacaacacacttccntgnnagctccacaanntcaggccanagtgaggaatcaanagcatcccacagcagnccagatgcaanggnaagtggaacaacaccctcatctgcccactccacaacctcaggtcgtggagaatctacaacctcacgcatcagtccaggctcaactgaaanaacacgttacccggcagtaccacaacaccaggcctcagtgagaaatctaccactttctacagtagccccagatcaccagaaccacaacactctcacctgctagtatgacaagcctaggcgtcggtgaagaatccaccacctcccgtagccaaccaggttctactcactcaacagtgtcacctgccagcaccaccacgccaggcctcagtgaggaatctaccaccgtctacagcagcagcccaggctcaactgaaaccacagtgttccctcgcagcaccacaacctcagttcgtggtgaagagcctacaaccttccacagccggccagcctcaactcacacaacactgttcactgaggacagcaccacctcgggcctcactgaagaatctacagccttccccggcagcccagcctccacccaaacagggttacctgccacactcacaaccgcagacctcggtgaggaatcaactacctttcccagcagctcaggctcaactggaacaacactctcacctgcccgctccaccacctctggcctcgttggagaatccacaccctcacgcctcagtccaagctcaaccgaaacaacaactttacccggcagtcccacaacaccaagcctcagtgagaaatcaaccaccttctacactagccccagatcaccagatgcaacactctcacctgcaaccacaacaagctcaggcgtcagcgaagaatccagcacatcccacagtcaaccaggctcaacgcacacaacagcgttccctgacagcaccaccacctcaggcctcagtcaggaacctacaacttcccacagcagccaaggctcaacagaggcaacactgtcccctggcagtaccacagcctcatcccttggtcaacaatctacaaccttccacagcagcccaggcgacactgaaaccacactcttacctgacgacaccataacctcaggcctcgtggaggcatctacacccacccacagcagcactggctcgctacacacaacactgacccctgccagctccacaagcgctggccttcaggaagaatctaccactttccagagctggccaagctcaagtgacacaacaccttcacctcccggcaccacagcagcccctgttgaagtatccacaacctaccacagccgcccgagctcaactccaacaacacacttttctgccagttccacaaccttgggccgtagtgaggaatcaacaacagtccacagcagcccaggtgcaactggaacagcactcttccctacccgctctgcaacctcagttcttgttggagaacctacaacgtcacccatcagttcaggctcaacggaaacaacagcgttacctggcagtaccacaacancaggcctnagtnagnnatctaccaccttctacagcagcccccccgctgctgaaatgcgggatccttagagtcaccc

SEQ ID NO: 532510 - DNA, 215 bp, Homo sapiens
  misc_feature (163)..(163): n is a, c, g, or t
  misc_feature (186)..(186): n is a, c, g, or t
agctggtgaaaaagaagaaacaattccctccatgatatagattagaagaggtcaaggataaagatggaaagccactcctggccaagaagagtctaaggaacaggcttccacccgatgagtgaagacttccttctggtatgctttgtctgagcgacttctctgngtccacacaaatgcttcatctcnttaaatttgaagatgccaagcttgcatgc

SEQ ID NO: 532511 - DNA, 1887 bp, Homo sapiens
  misc_feature (21)..(21): n is a, c, g, or t
  misc_feature (33)..(33): n is a, c, g, or t
  misc_feature (35)..(35): n is a, c, g, or t
  misc_feature (305)..(305): n is a, c, g, or t
  misc_feature (437)..(437): n is a, c, g, or t
  misc_feature (1811)..(1811): n is a, c, g, or t
  misc_feature (1819)..(1819): n is a, c, g, or t
  misc_feature (1823)..(1823): n is a, c, g, or t
  misc_feature (1826)..(1827): n is a, c, g, or t
tgagtcggtacctcagagctncctgatggtaanancattcccttggttcacaatctactaccttccacagcagcccaggcgacactgaaaccacactcttacctgacgacaccataacctcaggcctcgtggaggcatctacacccacccacagcagcactggctcgctacacacaacactgacccctgccagctccacaagcgctggccttcaggaagaatctaccactttccagagctggccaagctcaagtgacacaacaccttcacctcccggcaccacagcagcccctgttgaagtatcnacaacctaccacagccgcccgagctcaactccaacaacacacttttctgccagttccacaaccttgggccgtggtagcgcagtgatctacaacctcacgcatcagtccaggctcaaatgaaataacaacgtnacctggcagtaccacaacaccaggcctcagtgaggcatctaccaccttctacagcagccccagatcaccaccccagatcaccaaccacaacactctcacctgccagcatgacaagcctaggcgtcggtgaagaatccaccacctcccgtagccaaccaggttctactcactcaacagtgtcacctgccagcaccaccacgccaggcctcagtgaggaatctaccaccgtctacagcagcagcccaggctcaactgaaaccacagtgttccctcgcagcaccacaacctcagttcgtggtgaagagcctacaaccttccacagccggccagcctcaactcacacaacactgttcactgaggacagcaccacctcgggcctcactgaagaatctacagccttccccggcagcccagcctccacccaaacagggttacctgccacactcacaaccgcagacctcggtgaggaatcaactacctttcccagcagctcaggctcaactggaacaacactctcacctgcccgctccaccacctctggcctcgttggagaatccacaccctcacgcctcagtccaagctcaaccgaaacaacaactttacccggcagtcccacaacaccaagcctcagtgagaaatcaaccaccttctacactagccccagatcaccagatgcaacactctcacctgcaaccacaacaagctcaggcgtcagcgaagaatccagcacatcccacagtcaaccaggctcaacgcacacaacagcgttccctgacagcaccaccacctcaggcctcagtcaggaacctacaacttcccacagcagccaaggctcaacagaggcaacactgtcccctggcagtaccacagcctcatcccttggtcaacaatctacaaccttccacagcagcccaggcgacactgaaaccacactcttacctgacgacaccataacctcaggcctcgtggaggcatctacacccacccacagcagcactggctcgctacacacaacactgacccctgccagctccacaagcgctggccttcaggaagaatctaccactttccagagctggccaagctcaagtgacacaacaccttcacctcccggcaccacagcagcccctgttgaagtatccacaacctaccacagccgcccgagctcaactccaacaacacacttttctgccagttccacaaccttgggccgtagtgaggaatcaacaacagtccacagcagcccaggtgcaactggaacagcactcttccctacccgctctgcaacctcagttcttgttggagaacctacaacgtcacccatcagttcaggctcaacggaaacaacagcgttacctggcagtaccacaacancaggcctnagtnagnnatctaccaccttctacagcagcccccccgctgctgaaatgcgggatccttagagtcaccc

SEQ ID NO: 532512 - DNA, 1363 bp, Homo sapiens
  misc_feature (21)..(21): n is a, c, g, or t
  misc_feature (33)..(33): n is a, c, g, or t
  misc_feature (35)..(35): n is a, c, g, or t
  misc_feature (305)..(305): n is a, c, g, or t
  misc_feature (1287)..(1287): n is a, c, g, or t
  misc_feature (1295)..(1295): n is a, c, g, or t
  misc_feature (1299)..(1299): n is a, c, g, or t
  misc_feature (1302)..(1303): n is a, c, g, or t
tgagtcggtacctcagagctncctgatggtaanancattcccttggttcacaatctactaccttccacagcagcccaggcgacactgaaaccacactcttacctgacgacaccataacctcaggcctcgtggaggcatctacacccacccacagcagcactggctcgctacacacaacactgacccctgccagctccacaagcgctggccttcaggaagaatctaccactttccagagctggccaagctcaagtgacacaacaccttcacctcccggcaccacagcagcccctgttgaagtatcnacaacctaccacagccgcccgagctcaactccaacaacacacttttctgccagttccacaaccttgggccgtagtgaggaatcaacaacagtccacagcagcccaggtgcaactggaacagcactcttccctacccgctctgcaacctcagttcttgttggagaacctacaacgtcacccatcagttcaggctcaacggaaacaacagcgttacctggcagtaccacaacagcaggcctgagtgagaaatctaccaccttctacagtagccccagatcaccggacacaacactctcacctgccagcacgacaagctcaggcgtcagtgaagaatccaccacctcccacagccgaccaggctcaacgcacacaacagcattccctggcagtaccaccatgccaggcgtcagtcaggaatctacagcttcccacagcagcccaggctccacagacacaacactgtcccctggcagtaccacagcatcatcccttggtccagaatctactaccttccacagcggcccaggctccactgaaacaacactcttacctgacaacaccacagcctcaggcctccttgaagcatctacgcccgtccacagcagcactggatcgccacacacaacactgtcccctgccggctctacaacccgtcagggagaatctaccaccttccagagctggccaaactcgaaggacactacccctgcacctcctactaccacatcagcctttgttgagctatctacaacctcccacggcagcccgagctcaactccaacaacccaccacttttctgccagttccacaaccttgggccgtagtgaggaatcaacaacagtccacagcagcccaggtgcaactggaacagcactcttccctacccgctctgcaacctcagttcttgttggagaacctacaacgtcacccatcagttcaggctcaacggaaacaacagcgttacctggcagtaccacaacancaggcctnagtnagnnatctaccaccttctacagcagcccccccgctgctgaaatgcgggatccttagagtcaccc

SEQ ID NO: 532513 - DNA, 135 bp, Homo sapiens
tcatcaagaaacaactttgatcaagattacggggtggacgtacgtctgtgatgatggattaacattacatattcacaagctttaccaattcatggaaaggattcctctaggattttggtggatctcttgaagcac

SEQ ID NO: 532514 - DNA, 1798 bp, Homo sapiens
  misc_feature (21)..(21): n is a, c, g, or t
  misc_feature (33)..(33): n is a, c, g, or t
  misc_feature (35)..(35): n is a, c, g, or t
  misc_feature (305)..(305): n is a, c, g, or t
  misc_feature (1722)..(1722): n is a, c, g, or t
  misc_feature (1730)..(1730): n is a, c, g, or t
  misc_feature (1734)..(1734): n is a, c, g, or t
  misc_feature (1737)..(1738): n is a, c, g, or t
tgagtcggtacctcagagctncctgatggtaanancattcccttggttcacaatctactaccttccacagcagcccaggcgacactgaaaccacactcttacctgacgacaccataacctcaggcctcgtggaggcatctacacccacccacagcagcactggctcgctacacacaacactgacccctgccagctccacaagcgctggccttcaggaagaatctaccactttccagagctggccaagctcaagtgacacaacaccttcacctcccggcaccacagcagcccctgttgaagtatcnacaacctaccacagccgcccgagctcaactccaacaacacacttttctgccagttccacaaccttgggccgtagtgaggaatcaacaacagtccacagcagcccaggtgcaactggaacagcactcttccctacccgctctgcaacctcagttcttgttggagaacctacaacgtcacccatcagttcaggctcaacggaaacaacagcgttacctggcagtaccacaacagcaggcctgagtgagaaatctaccaccttctacagtagccccagatcaccggacacaacactctcacctgccagcacgacaagctcaggcgtcagtgaagaatccaccacctcccacagccgaccaggctcaacgcacacaacagcattccctggcagtaccaccatgccaggcgtcagtcaggaatctacagcttcccacagcagcccaggctccacagacacaacactgtcccctggcagtaccacagcatcatcccttggtccagaatctactaccttccacagcggcccaggctccactgaaacaacactcttacctgacaacaccacagcctcaggcctccttgaagcatctacgcccgtccacagcagcactggatcgccacacacaacactgtcccctgccggctctacaacccgtcagggagaatctaccaccttccagagctggcccaccttctacactagccccagatcaccagatgcaacactctcacctgcaaccacaacaagctcaggcgtcagcgaagaatccagcacatcccacagtcaaccaggctcaacgcacacaacagcgttccctgacagcaccaccacctcaggcctcagtcaggaacctacaacttcccacagcagccaaggctcaacagaggcaacactgtcccctggcagtaccacagcctcatcccttggtcaacaatctacaaccttccacagcagcccaggcgacactgaaaccacactcttacctgacgacaccataacctcaggcctcgtggaggcatctacacccacccacagcagcactggctcgctacacacaacactgacccctgccagctccacaagcgctggccttcaggaagaatctaccactttccagagctggccaagctcaagtgacacaacaccttcacctcccggcaccacagcagcccctgttgaagtatccacaacctaccacagccgcccgagctcaactccaacaacacacttttctgccagttccacaaccttgggccgtagtgaggaatcaacaacagtccacagcagcccaggtgcaactggaacagcactcttccctacccgctctgcaacctcagttcttgttggagaacctacaacgtcacccatcagttcaggctcaacggaaacaacagcgttacctggcagtaccacaacancaggcctnagtnagnnatctaccaccttctacagcagcccccccgctgctgaaatgcgggatccttagagtcaccc

SEQ ID NO: 532515 - DNA, 192 bp, Homo sapiens
tatcggccccatcagaaagggcatttgaaggggagaagaacatgctattgccatattccacaacatcccctgtctgtgtttatgctcaggtcatacatattgctgacaactattcttgatattcatgggaatgtgggaaatctctactggactgagtcatttaagctagaaagagctcctatgatactcttt

SEQ ID NO: 532516 - DNA, 1121 bp, Homo sapiens
  misc_feature (21)..(21): n is a, c, g, or t
  misc_feature (33)..(33): n is a, c, g, or t
  misc_feature (35)..(35): n is a, c, g, or t
  misc_feature (305)..(305): n is a, c, g, or t
tgagtcggtacctcagagctncctgatggtaanancattcccttggttcacaatctactaccttccacagcagcccaggcgacactgaaaccacactcttacctgacgacaccataacctcaggcctcgtggaggcatctacacccacccacagcagcactggctcgctacacacaacactgacccctgccagctccacaagcgctggccttcaggaagaatctaccactttccagagctggccaagctcaagtgacacaacaccttcacctcccggcaccacagcagcccctgttgaagtatcnacaacctaccacagccgcccgagctcaactccaacaacacacttttctgccagttccacaaccttgggccgtagtgaggaatcaacaacagtccacagcagcccaggtgcaactggaacagcactcttccctacccgctctgcaacctcagttcttgttggagaacctacaacgtcacccatcagttcaggctcaacggaaacaacagcgttacctggcagtaccacaacagcaggcctgagtgagaaatctaccaccttctacagtagccccagatcaccggacacaacactctcacctgccagcacgacaagctcaggcgtcagtgaagaatccaccacctcccacagccgaccaggctcaacgcacacaacagcattccctggcagtaccaccatgccaggcgtcagtcaggaatctacagcttcccacagcagcccaggctccacagacacaacactgtcccctggcagtaccacagcatcatcccttggtccagaatctactaccttccacagcggcccaggctccactgaaacaacactcttacctgacaacaccacagcctcaggcctccttgaagcatctacgcccgtccacagcagcactggatcgccacacacaacactgtcccctgccggctctacaacccgtcagggagaatctaccaccttccagagctggccaagctcaaaggacacttcgcctgcaccttctggtaccacatcagcctttgttaaactatctacaacttatcacagcagcccgagctcaactcccaaacccactccaccttactaccagacaaccttaaaa

SEQ ID NO: 532517 - DNA, 1363 bp, Homo sapiens
  misc_feature (21)..(21): n is a, c, g, or t
  misc_feature (33)..(33): n is a, c, g, or t
  misc_feature (35)..(35): n is a, c, g, or t
  misc_feature (310)..(310): n is a, c, g, or t
  misc_feature (318)..(318): n is a, c, g, or t
  misc_feature (323)..(323): n is a, c, g, or t
  misc_feature (325)..(326): n is a, c, g, or t
  misc_feature (332)..(332): n is a, c, g, or t
  misc_feature (336)..(337): n is a, c, g, or t
  misc_feature (352)..(352): n is a, c, g, or t
  misc_feature (355)..(356): n is a, c, g, or t
  misc_feature (367)..(368): n is a, c, g, or t
  misc_feature (377)..(377): n is a, c, g, or t
  misc_feature (391)..(391): n is a, c, g, or t
  misc_feature (407)..(407): n is a, c, g, or t
  misc_feature (418)..(418): n is a, c, g, or t
  misc_feature (421)..(421): n is a, c, g, or t
  misc_feature (1287)..(1287): n is a, c, g, or t
  misc_feature (1295)..(1295): n is a, c, g, or t
  misc_feature (1299)..(1299): n is a, c, g, or t
  misc_feature (1302)..(1303): n is a, c, g, or t
tgagtcggtacctcagagctncctgatggtaanancattcccttggttcacaatctactaccttccacagcagcccaggcgacactgaaaccacactcttacctgacgacaccataacctcaggcctcgtggaggcatctacacccacccacagcagcactggctcgctacacacaacactgacccctgccagctccacaagcgctggccttcaggaagaatctaccactttccagagctggccaagctcaagtgacacaacaccttcacctcccggcaccacagcagcccctgttgaagtatctacaanctaccacngcagncnnggctcnactnnaacaacacacttccntgnnagctccacaanntcaggccanagtgaggaatcaanagcatcccacagcagnccagatgcaanggnaacaacagtcttacctgccggctctacaccctcagttcttgttggagactcgacgccctcacccatcagttcaggctcaatggaaaccacagcgttacccggcagtaccacaacaccaggcctcagtgagaaatctaccactttctacagtagccccagatcaccagaaacactctcacctgccagcacgacaagctcaggcgtcagtgaagaatccaccacctcccacagccgaccaggctcaacgcacacaacagcattccctgacagcaccaccacgccaggcctcagtcaggaacctacaacttcccacagcagccaaggctcaacagaggcaacactgtcccctggcagtaccacagcctcatcccttggtcaacaatctacaaccttccacagcagcccaggcgacactgaaaccacactcttacctgacgacaccataacctcaggcctcgtggaggcatctacacccacccacagcagcactggctcgctacacacaacactgacccctgccagctccacaagcgctggccttcaggaagaatctaccactttccagagctggccaagctcaagtgacacaacaccttcacctcccggcaccacagcagcccctgttgaagtatccacaacctaccacagccgcccgagctcaactccaacaacacacttttctgccagttccacaaccttgggccgtagtgaggaatcaacaacagtccacagcagcccaggtgcaactggaacagcactcttccctacccgctctgcaacctcagttcttgttggagaacctacaacgtcacccatcagttcaggctcaacggaaacaacagcgttacctggcagtaccacaacancaggcctnagtnagnnatctaccaccttctacagcagcccccccgctgctgaaatgcgggatccttagagtcaccc

SEQ ID NO: 532518 - DNA, 300 bp, Homo sapiens
  misc_feature (64)..(64): n is a, c, g, or t
  misc_feature (83)..(83): n is a, c, g, or t
  misc_feature (87)..(87): n is a, c, g, or t
  misc_feature (102)..(102): n is a, c, g, or t
  misc_feature (116)..(116): n is a, c, g, or t
  misc_feature (123)..(123): n is a, c, g, or t
  misc_feature (153)..(153): n is a, c, g, or t
  misc_feature (171)..(171): n is a, c, g, or t
  misc_feature (176)..(176): n is a, c, g, or t
  misc_feature (182)..(182): n is a, c, g, or t
  misc_feature (184)..(184): n is a, c, g, or t
  misc_feature (189)..(189): n is a, c, g, or t
  misc_feature (195)..(195): n is a, c, g, or t
  misc_feature (203)..(203): n is a, c, g, or t
  misc_feature (213)..(213): n is a, c, g, or t
  misc_feature (218)..(218): n is a, c, g, or t
  misc_feature (221)..(221): n is a, c, g, or t
  misc_feature (227)..(227): n is a, c, g, or t
  misc_feature (229)..(229): n is a, c, g, or t
  misc_feature (231)..(231): n is a, c, g, or t
  misc_feature (237)..(237): n is a, c, g, or t
  misc_feature (240)..(240): n is a, c, g, or t
  misc_feature (260)..(260): n is a, c, g, or t
  misc_feature (263)..(263): n is a, c, g, or t
  misc_feature (267)..(268): n is a, c, g, or t
  misc_feature (272)..(272): n is a, c, g, or t
  misc_feature (276)..(276): n is a, c, g, or t
  misc_feature (280)..(280): n is a, c, g, or t
  misc_feature (282)..(283): n is a, c, g, or t
  misc_feature (285)..(285): n is a, c, g, or t
  misc_feature (296)..(296): n is a, c, g, or t
  misc_feature (300)..(300): n is a, c, g, or t
aaagtaccccataccgttgacgcgctgtggcagacctgtgggtgcggtctcccctccccaaatnccacctcttcctgctcccncccncttttggcccctacncagtagttccattntgggctncagtaatataaggacctgttctggacacancactgggccccctggggntttantagggnanccccntccctncaggagtnaggcatggtnacagnagncccctntntncccccnagncatctgagcattggtgtgcnttnaggnncttnatcntccnannanaaattccattngtgn

SEQ ID NO: 532519 - DNA, 245 bp, Homo sapiens
ttgcttggttggatggactgagggcccgggagggaagttgcctggaaactccaccatcagcatcagagcgccagatttaccgtgggatcacctccatacaggtaaacctagaagagcctccccacaaacagtctttgtgaggatgcctgactgaacttgcagctagaattcaaaaccgcttgtattcccctgtcttcgagtcttcggggctgtctgtcctgccttggagtggctccgttcgtgca

SEQ ID NO: 532520 - DNA, 142 bp, Homo sapiens
acccccagaatctgggcgctgtggtggtgccttctggagaagagcagagatacacgtgccatgtgcagcacgaggggctgccggagcccctcaccctgagatggggtggaaaaggagggagctgctctcaggctgcgtccag

SEQ ID NO: 532521 - DNA, 360 bp, Homo sapiens
tccaagagggggaaaaaatcccccgggtcccctccggcccaaggggaaggggtgaaggagggccccccccaaattttccttttcccccggaaacccccggccccccaaaaaggggacagttttttttaaaaaatttaaatggcccccccccttgccggggcggtttttcccccccgggaagttttttaaaaagaaaaaaccccggttcccccctggggaaaaaaaaatttttaaacccttccttgtttcccgttgggcccggcccccccccgggtttttgggaattggggcaaaaaaaccccagaaaccccccccccgggttttttaaaaaaaaaaaaaaaccccccctgggggttggga

SEQ ID NO: 532522 - DNA, 636 bp, Homo sapiens
  misc_feature (560)..(560): n is a, c, g, or t
  misc_feature (568)..(568): n is a, c, g, or t
  misc_feature (572)..(572): n is a, c, g, or t
  misc_feature (575)..(576): n is a, c, g, or t
aggtgctctagaggatgctatcacgtgcatgacaacactgtcccctggcagtaccacagcatcatcccttggtccagaatctactaccttccacagcggcccaggctccactgaaacaacactcttacctgacaacaccacagcctcaggcctccttgaagcatctacgcccgtccacagcagcactggatcgccacacacaacactgtcccctgccggctctacaacccgtcagggagaatctaccaccttccagagctggccaaactcgaaggacactacccctgcacctcctactaccacatcagcctttgttgagctatctacaacctcccacggcagcccgagctcaactccaacaacccaccacttttctgccagttccacaaccttgggccgtagtgaggaatcaacaacagtccacagcagcccaggtgcaactggaacagcactcttccctacccgctctgcaacctcagttcttgttggagaacctacaacgtcacccatcagttcaggctcaacggaaacaacagcgttacctggcagtaccacaacancaggcctnagtnagnnatctaccaccttctacagcagcccccccgctgctgaaatgcgggatccttagagtcaccc

SEQ ID NO: 532523 - DNA, 758 bp, Homo sapiens
gcatttatgaagaattagcaataagttcttagaaaatgaagcaaatggaaaaaaaaaaaaaaaaaaaaaaaaaaattaaaaaggcagtttgggcaaacagttaaagtgtttgggcaggtgggtaaaaggattctgggccccagggggcggggttaacgggatgaccccccgcaccttgggggttttttaaattttaaatgccagtaaaattgtccgccaggcctctaagaaactcttggggaacatacttggatatattatactctaggaggcttgatctggaggtaaaataccctccttttgtgtttcataaggggggtaaagccgaaacacaggtggtaattaacattccgggtgttttcagaagagattatataacaataactacctttggggcatggacaaactccgggtacattaaaaacaagggcaaaaaaaaaactctttggtgtgtcagataaattcccctttaaaatgtgggggacaatattatgatgcctcgttcgtttattccccttgtttgttacccccaaaaagaaaagttggggagatacaaaatagggagttgagggagttgtatgaaaccccatgatggggggcacataatttttccccccattacccaagtaaaatattccataattagggggtttactaaagcacaatcaatcactgttaaccgataatttgaatcctcatctcccatggacagaagaatattgcccgcaggagggagaatataaaccaaaaagccagga

SEQ ID NO: 532524 - DNA, 260 bp, Homo sapiens
gtcccccaactagagatgtatggtgcttcggcgtgtgaatgcacacgccgaataaccacacctcaggtgatcacaaccgcctcggactcccagcttctcttggaattttaaagctgtttgtagttatcagagctaatgctgctttagacagcttctctctgtacctcttggttaagcttcctgaagtttgtctccattacaggctttagcaaacagccagcccttcgtgtctctgagttgttgtttatgctggttaatcc

SEQ ID NO: 532525 - DNA, 1162 bp, Homo sapiens
  misc_feature (21)..(21): n is a, c, g, or t
  misc_feature (33)..(33): n is a, c, g, or t
  misc_feature (35)..(35): n is a, c, g, or t
  misc_feature (310)..(310): n is a, c, g, or t
  misc_feature (318)..(318): n is a, c, g, or t
  misc_feature (323)..(323): n is a, c, g, or t
  misc_feature (325)..(326): n is a, c, g, or t
  misc_feature (332)..(332): n is a, c, g, or t
  misc_feature (336)..(337): n is a, c, g, or t
  misc_feature (352)..(352): n is a, c, g, or t
  misc_feature (355)..(356): n is a, c, g, or t
  misc_feature (367)..(368): n is a, c, g, or t
  misc_feature (377)..(377): n is a, c, g, or t
  misc_feature (391)..(391): n is a, c, g, or t
  misc_feature (407)..(407): n is a, c, g, or t
  misc_feature (418)..(418): n is a, c, g, or t
  misc_feature (421)..(421): n is a, c, g, or t
  misc_feature (1044)..(1044): n is a, c, g, or t
  misc_feature (1048)..(1048): n is a, c, g, or t
tgagtcggtacctcagagctncctgatggtaanancattcccttggttcacaatctactaccttccacagcagcccaggcgacactgaaaccacactcttacctgacgacaccataacctcaggcctcgtggaggcatctacacccacccacagcagcactggctcgctacacacaacactgacccctgccagctccacaagcgctggccttcaggaagaatctaccactttccagagctggccaagctcaagtgacacaacaccttcacctcccggcaccacagcagcccctgttgaagtatctacaanctaccacngcagncnnggctcnactnnaacaacacacttccntgnnagctccacaanntcaggccanagtgaggaatcaanagcatcccacagcagnccagatgcaanggnaacaacagtcttacctgccggctctacaccctcagttcttgttggagactcgacgccctcacccatcagttcaggctcaatggaaaccacagcgttacccggcagtaccacaacaccaggcctcagtgagaaatctaccactttctacagtagccccagatcaccagaaacactctcacctgccagcacgacaagctcaggcgtcagtgaagaatccaccacctcccacagccgaccaggctcaacgcacacaacagcattccctgacagcaccaccacgccaggcctcagtcggcattctacaacttcccacagcagcccaggctcaacggatacaacactgttacctgccagcaccaccacctcaggccccagtcaggaatcaacaacttcccacagcagcccaggttcaactgacacagcactgtcccctggcagtaccacagccttatcctttggtcaagaatctacaaccttccacagcagcccaggctccactcacacaacactcttccctgacagcaccacaagctcaggcatcgttgaagcatctacacgcgtccacagcagcactggctcaccacgcacaacactgtcccctgccagctccacaagcctgactncagngagaactttctccatcacagaccatcccaacctcaatcacaccacgtcatcactacccaggcccatatcctacaacttctataatagcggtaccagctcaattcgatcatgtca

SEQ ID NO: 532526 - DNA, 818 bp, Homo sapiens
  misc_feature (21)..(21): n is a, c, g, or t
  misc_feature (33)..(33): n is a, c, g, or t
  misc_feature (35)..(35): n is a, c, g, or t
  misc_feature (305)..(305): n is a, c, g, or t
  misc_feature (437)..(437): n is a, c, g, or t
tgagtcggtacctcagagctncctgatggtaanancattcccttggttcacaatctactaccttccacagcagcccaggcgacactgaaaccacactcttacctgacgacaccataacctcaggcctcgtggaggcatctacacccacccacagcagcactggctcgctacacacaacactgacccctgccagctccacaagcgctggccttcaggaagaatctaccactttccagagctggccaagctcaagtgacacaacaccttcacctcccggcaccacagcagcccctgttgaagtatcnacaacctaccacagccgcccgagctcaactccaacaacacacttttctgccagttccacaaccttgggccgtggtagcgcagtgatctacaacctcacgcatcagtccaggctcaaatgaaataacaacgtnacctggcagtaccacaacaccaggcctcagtgaggcatctaccaccttctacagcagccccagatcaccaccccagatcaccaaccacaacactctcacctgccagcatgacaagcctaggcgtcggtgaagaatccaccacctcccgtagccaaccaggttctactcactcaacagtgtcacctgccagcaccaccacgccaggcctcagtgaggaatctaccaccggcattctacaacttcccacagcagcccaggctcaacggatacaacactgtacctgcctggtgtccgcctatggcacgggactcgaagggggcaccacaggtatccagtcggaattctttataaccaccacccgagatccagggctcaatggtc

SEQ ID NO: 532527 - DNA, 703 bp, Homo sapiens
  misc_feature (21)..(21): n is a, c, g, or t
  misc_feature (33)..(33): n is a, c, g, or t
  misc_feature (35)..(35): n is a, c, g, or t
  misc_feature (305)..(305): n is a, c, g, or t
  misc_feature (437)..(437): n is a, c, g, or t
tgagtcggtacctcagagctncctgatggtaanancattcccttggttcacaatctactaccttccacagcagcccaggcgacactgaaaccacactcttacctgacgacaccataacctcaggcctcgtggaggcatctacacccacccacagcagcactggctcgctacacacaacactgacccctgccagctccacaagcgctggccttcaggaagaatctaccactttccagagctggccaagctcaagtgacacaacaccttcacctcccggcaccacagcagcccctgttgaagtatcnacaacctaccacagccgcccgagctcaactccaacaacacacttttctgccagttccacaaccttgggccgtggtagcgcagtgatctacaacctcacgcatcagtccaggctcaaatgaaataacaacgtnacctggcagtaccacaacaccaggcctcagtgaggcatctaccaccttctacagcagccccagatcaccaaccacaacactctcacctgccagcatgacaagcctaggcgtcggtgaagaatccaccacctcccgtagccaaccaggttctactcactcaacagtgtcacctgccagcaccaccacgccaggcctcagtgaggaatctaccaccgtccacaagccagcagcccaggagtcgacgcggccgcgaatttagtagtagt

SEQ ID NO: 532528 - DNA, 431 bp, Homo sapiens
gagcaggatgaataagaccaggaggctgaggagtatgcctgtgttcaggaagctgattgtgaggacctgagaggggcagtctgggggtggccatacctcctcacagtatctatgactgttgctgtcacagaccccaatgttccaggcattggcgttcgagcattcgtgtgccccacaggagatccgacacgctgggcatcggatggtctatacacatcgaggccaggagcgatagggctgtgctcagggagagtcaggaggggctgggccagatcgactgacgctaggtccaggtgctacaccaagatgcagttcagctcagtcccattcacatctattgtctcccagagtagatcccggatggagcccagcagaggctgggtcctacctgtctggcactggagctgcccacaaatggcatctctagagta

SEQ ID NO: 532529 - DNA, 354 bp, Homo sapiens
cagatcaagttatctctctcactagccccataagctcttctccgagtaccatgagaagcggatgctggtgtctggacggaggcccgtgatgtaaaatgcccaggtgtatcttttggtcttagctcttgcttgtgtgaaagggcagggctgaggtgttcctcccttagctgagtggggactgtagtgaggagtgctgggtgctggggtacacaggcgatgttgtgggctcaggggagggaggacagctcccgactgtggtcagtcctcatgtctggtggtttccaaaagccagttctcatacccctgcatcagaatcctctggggagcttaaaatacagatcccaggatatctgc

SEQ ID NO: 532530 - DNA, 206 bp, Homo sapiens
ggcgggaaacttttaaaaattttgtttgaacccccttaaaaccccttgggaatttttacccccctttggggggtttccgggccctttccccagggggttgtttttttggggtaagggaaaaaaaagggggggttttttttaaaaatccccctttggggggggggggggtttttaaaaaaaaaaaaaaggcccccccctttttttta

SEQ ID NO: 532531 - DNA, 336 bp, Homo sapiens
gaaaaaaattttttcccggggtgggttttaaggggtggggcggggcccggtcccccgttccccaggtttgggaaaaaaggtttttttaatttcttcccccgggtttttttttaaattaaaaaacgggggccgggggaaaaaatttggccgggggggccccccccccccggcccccttttttttaagcccccccggttttcgggggtgggggccctttttgggaacccccaaaccccattttttttgggccggggtttttttttgggggttttaaaaaggggaattttttcctttttttttgggccccaaaggggcccccgggggttgggggggcta

SEQ ID NO: 532532 - DNA, 102 bp, Homo sapiens
  misc_feature (16)..(16): n is a, c, g, or t
  misc_feature (69)..(69): n is a, c, g, or t
ggccaacccacccctncctagcaccgctcctgccccggggccggatgcgcgctggctgctgccgcgctncgggcaaaggtggaggggtgggggggcgtcact

SEQ ID NO: 532533 - DNA, 1119 bp, Homo sapiens
gctcacgcgggtacgcaatgatcgctgtgattgtgtctatgagatgtatagtcatggtctacctgtatagtatatgtgctgttaagcactctatggtgtaatgacaaacaactatgagacatttcaatacccatgaatgcgttggtcatgggcagtggtgacttgatgtgcacgcgcatagagtaggcggagtaccacaagtgatcgcgtcttgttgcttgggcagttggctcgttgagagtagctggacacgtcttgtatatctgcgttgcacgcagagcaaagtatggaagtaccgatggagacatagcgtagacacgtagcaccataatcggagaaggttgcacaaggattgttgcgagagtgacaacgttagcgagtaagagaatgcgtggttgtgtattgaacaatgtttgctccgtcatagcacaggtccaagtgcacacttgccttcaaaacacagggagctaattaacacaagagcctttggagagcgtacgtatgagcgatatgaaacagatcggttggcgacctggactccattgactttgagacattacctaatgagtattgacagacaaaacttcatattccgccagtgtagacgtaaacactatcgcacgaggtggtgctatctggcaaaaatttgagataaaagcacttcagtgataagttggtaaatttgagacaagttttgcatagcaaaattggataccgatcatacgcactttcgaaatgccaatcgcgccattttgggtacgttacagatcatatagatagaccacatggtgtgcagaactttaaaaacagcgaacaagagagatagccaatcgagcactccaatctgacacagggcactaaaagatggtgggccattgaataatagcaaaacgtcataggggccatataccacgagccgtatcagagaagcgaaaccacaccagtgatacgactgaatgacacatcaactagcacccgtaggtgttgcaggcggcgaaacgacatataccactaaataggcaaacaaggtggaaaggaccgatataacacgtataaagtgaaaacacctgtggtattgcaaattcaatagacagcactgtgcaatgagacccactccat

SEQ ID NO: 532534 - DNA, 191 bp, Homo sapiens
aaggatcctttgggtgccttcaaagcagatctggagcgtgagggattacagtgacgcattgagaagctgctcacagccattgcggttatcaaacagtcccgggttggcacatgatgagcgttgccgtgttctcatcttctactcttaaggactggcttcactgggacttgagaggggtaccgaagctcgaa

SEQ ID NO: 532535 - DNA, 624 bp, Homo sapiens
agctgtgcgtagatgctgtcgcctgtaatcccagatactcaggagactcagacaggagaatcccttgaacccaggaggcggaggttgcagtgagccgcgatcgtgccattgcacttcagtctaggcaacaagagtgaaactccgtctcaaaactttatgtgcatggaccagaggctgactctggagcccacactgttgcgttccggactgctgatgaattcaccattgtgtggcgagagtatatatgctgattgtgtgctattcctcgctgctatttgctcaatgcaccttctattttatacttaaaagaacctaaagtggtttaccaactgcacttataggcgagtgctgagtgtttggttgtacctgggcactccccgcacagaacatgtgttttctataataaaaatgaaaaaaacctgaggcggggctccgacccaaattctccttaagtggggcctattataagtaaatggacgcggaaaacaacggcttgattgtggtaaccctggctgtaccaaattaaaatgctttgggaacatacccctttcgcccgcttgcgggatttgcgggcccgacaagatgacctttccacgtgtgcacactggggggcgtggcttttgg

SEQ ID NO: 532536 - DNA, 482 bp, Homo sapiens
  misc_feature (114)..(114): n is a, c, g, or t
  misc_feature (117)..(117): n is a, c, g, or t
cagtcgtgaagagggactctattgcacatgagtttctccggcaagtaccaactgcagagccaggaaaactttgaagccttcatgaaggcaatcggtctgccggaagagctcatncanaaggggaaggatatcaagggggtgtcggaaatcgtgcaaaatggaaagcctttaaggttaaccataaccgttgggtccaaagggatccaaaccgaattcacggtggggaaggaatgtaacctgaaaacattgccagggaaaaaggtcagaacaggggttaaattggaaggggccattaaacgggggacaactttcaaaaccataaagtttggaaccgaactcaacgggaccttatatcccattcccatgacattgggggaaattgcttttaaaagattcaccagaggattttaaccaggcttgaatttaaaataatttaagggggtaaaataaaggtattaaagggaccttgtttttaaaaaaaa

SEQ ID NO: 532537 - DNA, 362 bp, Homo sapiens
gacttgagtgtgagaagtgtgatgagacttcagagatcaatagtccaactctcggccgggcgcagtggctcacgtctgtaatcccagcactttgggaggccaaggcaagtggatcacctgaggttaagagctcaagaccagcctggccaacatggcaaaaccccgtctctactaaaaatacaaaaattagctgggtgtggtggtgcgggcctgtattcccagtttctcaggaggctaaaggaggagaaccacttgaacctggtaggcagaggttgcaatgagccgagatggcgccaccacactccagcctaggcaacagcagagtaagactctgtctcaaaaaaacaaaaacctttttatac

SEQ ID NO: 532538 - DNA, 748 bp, Homo sapiens
agcggagggttggagccagcgaccgtcggtagacagcatggctctcctcaatattgtcctacccctagcttcatggcagggctgtgaagcagggctgcatgatgtggtcaccgacggaatctggggccgtcctacagatgggcatagcacgcagagcataagtgttgatcacacttgaattcctataagcatgaaaccctatcgtatatagggacgtagccagatacaggctcacagggtccctgggtattgaccggagcaggggtataataaagcaaaatggttggtgcacggacatatcacggaactggattttggattgctcgggcccatctgtgacgacttgcgacatgcgaaacacataaagaaatttgtcattattcatggattggggacactcggcaaaagccactaagagctgatgaatgtacaaactcccaggcttataaccacttaaagcgacacactttcctaacactcaaatggtggcatccgaagcagacaataaaaacccaacatatgagcatagcgtgtggatccaggcctaatactcggggaagtagctcagattagggagcgggaggaacggcggcacctccaatggatcttggtataatattcagccggggcgttgaacttctaggagcattcgaaggacaaaccgggaaaatcaccctggtaaaaaggcgcgcgaaaatcgaatctaaggaacaaaaaataaaaacaacttaaaagacgataaaccaac

SEQ ID NO: 532539 - DNA, 235 bp, Homo sapiens
ggccggtaccgatagaatccaggcgggggcaggataacaaaacctacctggggcaggcagctgattttctccagtgagatatagttatgaacagtcagcagacagcactcctggcagctggaactttgggtttggttctgtcagggaggaatgaggcattatgagctcctgcagtcctggccacggcttcacaaagagccccatagtgatgcaacatagttcagcagatatgctg

SEQ ID NO: 532540 - DNA, 92 bp, Homo sapiens
atttcatgaaacactcttgtacttatgtttataagagagcactgggtagccaagtgatcttctacttcccgagttagtaaacatctgtacta

SEQ ID NO: 532541 - DNA, 622 bp, Homo sapiens
  misc_feature (86)..(86): n is a, c, g, or t
  misc_feature (200)..(200): n is a, c, g, or t
cccagggtaagcccgacctcggacacacggaaggttccgcgccaagtcactctgcgaggaggacaacggccgggaggagcggcggncgaacctcatcagctcggagcccgtcagctgagggtgtcgacccaatcgttcatcgaagtgctcacgacgttgccagtgtggaccgtcccgaggccgttcacatatcgagaagncaacagtgccttgttgtggtcgttgagattctgctcgaagacgccgcctacgaagatcggatcggcccaccctctgcctgcttcgtgtgccaggtgagcggcgcggttgacgacgtcgcccatgtagacgacatcgttgattccgctgccgctgaatcccgccttgatcatgagcactcggccgtagtcgacgccgatgccgatcttcagggggtcgatccccttcttcgcgtagtggtggttgaggagcttgatgagtgtgttcgcctgataggcaatgccaaacacatcgtcgatgtgcgtcttctgcgtggtcttgtacacagcccagacgcagtccccaacgatattcacttcccgaacgtacagatcggagttcagcaccgccaccatctcagagatgaacgcgcgatatatcttcg

SEQ ID NO: 532542 - DNA, 265 bp, Homo sapiens
  misc_feature (197)..(197): n is a, c, g, or t
ccgggcatgcacaatggatgccctccaggagatgacggcactgctccccagcttctctgccagggcgcaggggtccttgacctcctcgtagcagtttgcttgaatttcatgcttgatccctagtcagcttcttcttagatggcgtccttggaaggtggcataacatcatttgtgctctataagggggcgcagactcngggggccccagaagataaacaccatgatcctcctatcttgctctcgcttggtctacatagtgttgcat

SEQ ID NO: 532543 - DNA, 237 bp, Homo sapiens
tccttagcgagacttctataaatatataggaatatgagacgcacagcccagaactgtacgtgatgtgacagactctgccatacgtgcgtgagctgtcttgcgaggacagctcagtctcagggctcagggaagatttccagcagaagtagtggggcataggctctaaaagattgagggtctagccaggctgcaagcaagcagactgctgtacaagcatgaagggaagagtggagcttt

SEQ ID NO: 532544 - DNA, 280 bp, Homo sapiens
tttccccgttggaccagatctccccacaccccgatgcaggtgtctcatagccataaggccaagggagtggcagaactggaccgcctcatctggattaacaagcaaactcctatgctaaggcttggagcaccgagagaatttgtgtctattggccaagaactaagccaggaagacatgggccatccctccgctttagggaagcatattttaaacctgaacgtcgaacttctgctttggcctcaccagtgaaaacttgtagtctttattacctaaagttcgc

SEQ ID NO: 532545 - DNA, 773 bp, Homo sapiens
  misc_feature (6)..(6): n is a, c, g, or t
  misc_feature (347)..(348): n is a, c, g, or t
ccttanccccctcgcccccccccaccccggggaataaagtttcatttctgttctttaaaaaaaaacggggggcttgggaaggccgacctaaaacacacgcccccccttttggcacacagggttttgggaccccatcagggccttacccgaaaaatttttggcaaagtgggggtggcgttttttaaaaggccccacaaaaaaacccatttttcacactgggcaaaggccattttggggtttcctggagacccataagagcgggggtaaaagccccccttatggtggccccaaaaaaaaatattcccccccgaccagaggaagttttttggtaaattggttttccaaannctgtcctccaaaaagaaggtggttggtttttaaaaaaaaaagtgtttgtggaaaaaaagccagagggaaaattccttttttaaattcccgttttgcccctttttttgataaaaaagggccatattcccccttttgggccccatgtatctcagtaccccatggagctgggctaagtaaataggaattggtttcacgcctgaggcaattagaccctttggaagatgggcataccctgtctcccctggacttaagggtcgggctttaattcccagggctcttttctccccccggtatccaggttccctcccaaagaagcccccagttttcatggggggcacccagtcttttttctccccagcggactaaactttttttcgggaccagttaatttttccacctactaatagaataaaggcggttttcta

SEQ ID NO: 532546 - DNA, 822 bp, Homo sapiens
aagccatctttgcattgttcctcatccgcctccttgctcgccgagccgcctccgcgcgcgctcctccgccgccgggactccggcagctttatcgccagagtccctgaactctcgctttctttttaatcccctgcatcggatcaccggcgtgccccaccattgtcagacgcagccgtagacaccagctccgaaatcaccaccaaaggacttaaaggagaagaacggaccgtcgtggaacgaggcagaaaaatggaaggagaccgcccctgctaacgggaatgctaatgaggacaatggggacgcaggagtgctgaccaatgaggtagacgaagaaagaggaacaacggttggggccgcaacgaggaggaggaagaaggcacggtgctggctgacggaaagaggatgcacgcatcacagatgaggaagctgagtcagctaccggggcaagcggggcagctgaagatgactgaggatcaccgattgtcgcataccaagaaggcagaagaccgacgaggatgactagacagcaaaacacggaaatgtcaacctacaaaaaaaaaaaggcccggcgtgtacctaattttcacccttcaatttcccggtctcagaactcttagcggtggtccccctccgagtatagaagacgcccgcccgcccaccgtgtgttagttgccccccggaaaatacacggcggctttcagcgaagccaaccagaccatgagtatttgcgccggcgcggacaaaagcaccacactccaagcccggttttcttaacatcttacaggaatggggggtgcactcccactcttttggcttgtcgca

SEQ ID NO: 532547 - DNA, 323 bp, Homo sapiens
ggctcggcctgtgtgtagcaacaataggaaggtcccaggttgtagagaccagttgagacaataatgaacaattattgtatgaacaattgttagagacagctaatcacaaacaacctgcgggcacaatgacctcattccacacgtagcacccttcagcaggaccctataaaactttcctccagcccttgcctctttgcaggtagccccttctctgctgagctgcccactgcaacatattttcacaatttctctaatcaatctgcccttctttacctacaactatcttggtaaatggctttaccacctgcaaaactgaccctagg

SEQ ID NO: 532548 - DNA, 702 bp, Homo sapiens
aggcgcgacacacccgcggtcagattgatcaggatcacgacctgaaacacacctttggcagaagaccacgtgcagcaagcgtgacagaggtagatcgcaaagcgttattggggcataagaacggcagtattacgagccactattccaccccggtgttgcagcatctgattgaggctgcgaacaaagtgttggcaactgactctcgcgagccagtgctgaccgttttgaggaggaaatcgagatgatcccccgcaaagtgcctacgtatgaaaaagccgaacaggttcgagttcggctaagtcattgaaaaatatggtcgggacggagtgattcgaacacccgccccctaacaccccgtgtacgcggacacctctacaggccgctaaacacaaggcttcgcgcctggcgctcgctgcaacgatgcccaagagtgcggaaccgtaactcacgaagtctcttgtaaagtcactgagcctatttaggctccctctggcgtcctgcagacctaacacaaaattcaaacacgagagaaaaagcccgcacgcggcgggcttaacatcagcaacgcaacttggtcgttatctttgcgcctggctctcaggatccgccagtgccctattggtaatcggcatcagatccttcgccataaattcagaacccttcgcagacaggtgatcgtcctcccggtacatcatctggccg

SEQ ID NO: 532549 - DNA, 833 bp, Homo sapiens
  misc_feature (21)..(21): n is a, c, g, or t
  misc_feature (33)..(33): n is a, c, g, or t
  misc_feature (35)..(35): n is a, c, g, or t
  misc_feature (310)..(310): n is a, c, g, or t
  misc_feature (318)..(318): n is a, c, g, or t
  misc_feature (323)..(323): n is a, c, g, or t
  misc_feature (325)..(326): n is a, c, g, or t
  misc_feature (332)..(332): n is a, c, g, or t
  misc_feature (336)..(337): n is a, c, g, or t
  misc_feature (352)..(352): n is a, c, g, or t
  misc_feature (355)..(356): n is a, c, g, or t
  misc_feature (367)..(368): n is a, c, g, or t
  misc_feature (377)..(377): n is a, c, g, or t
  misc_feature (391)..(391): n is a, c, g, or t
  misc_feature (407)..(407): n is a, c, g, or t
  misc_feature (418)..(418): n is a, c, g, or t
  misc_feature (421)..(421): n is a, c, g, or t
  misc_feature (511)..(511): n is a, c, g, or t
tgagtcggtacctcagagctncctgatggtaanancattcccttggttcacaatctactaccttccacagcagcccaggcgacactgaaaccacactcttacctgacgacaccataacctcaggcctcgtggaggcatctacacccacccacagcagcactggctcgctacacacaacactgacccctgccagctccacaagcgctggccttcaggaagaatctaccactttccagagctggccaagctcaagtgacacaacaccttcacctcccggcaccacagcagcccctgttgaagtatctacaanctaccacngcagncnnggctcnactnnaacaacacacttccntgnnagctccacaanntcaggccanagtgaggaatcaanagcatcccacagcagnccagatgcaanggnaagtggaacaacaccctcatctgcccactccacaacctcaggtcgtggagaatctacaacctcacgcatcagtccaggctcaactgaaanaacactgcccgctccacaacctcaggcctcgttgaagaatctacgacctaccacagcagcccgggctcaactcaaacaatgcacttccctgaaagcgacacaacttcaggccgtggtgaagaatcaacaacttcccacagcagcacaacacacacaatatcttcagctcctagcaccacatctgcccttgttgaagaacctaccagctaccacagcagcccgctgcaacaacacacttccctgacagctccacaacctcaggccgtagtgaggaatcaatcagcatccacacagcaagccatgatcgactacaggcgacagt

SEQ ID NO: 532550 - DNA, 121 bp, Homo sapiens
aacgctggtcctcagctttccacatactcccacaacacagtaatggggtgagctcacaaccaccattcagtcaagtgaggtgacactccagctgaggcacatcgttggggtaccgagctcg

SEQ ID NO: 532551 - DNA, 226 bp, Homo sapiens
gaggcaggaggattacttgagcccagggaggtcgaggctgcagtgagctgtgatcacgtcactgcactccagcctgggtaacaaagtgagaccctggactcaaaaataaaaaaataaaaaagaatcatcatagtgatgacaaaggaattacagggcagggggtaagattcatgtaccctctgaggccaaacccctgctgggagtcaagggctgcctgttgctgagg

SEQ ID NO: 532552 - DNA, 303 bp, Homo sapiens
  misc_feature (1)..(1): n is a, c, g, or t
  misc_feature (48)..(48): n is a, c, g, or t
  misc_feature (51)..(51): n is a, c, g, or t
nttgcaggaattcggcacgagaaaaagtaaaggagacccaggcaccangtncacgcctgtaatcccaacactttgggaggccgaggtgggtggatcacctaaggtcaggagttcgagaccagcctgaccaacatggtgaaaccccgtctctactaaaaatataaaaaattaccaggcgcctgtaatcccagctactcaggaggctgagataggagaattgcttgaacccaggaggcagaggttgcagtgagccaatcgagccactgaactccagcctgggcaacaagagcaaaactccgtctc

SEQ ID NO: 532553 - DNA, 762 bp, Homo sapiens
  misc_feature (450)..(450): n is a, c, g, or t
  misc_feature (457)..(458): n is a, c, g, or t
  misc_feature (610)..(610): n is a, c, g, or t
ggtccagagccaccgctctgccctgcaggatccctccatccggctcctgtcatcccctacattttgtcctagcaaaacgtggtagaatcactcggctgctcattccttctggaggacgcactgtctcggctccatatgccttccatgtctatcctggacccttgatgaatcatgatcctactcttccttactgatagttctgagcatctccctccatggtaatcctgcacttgtctgagagacagcacgcctggtctgtccttcactccgcgagctcctatagcgcttggctgttagttcaccaatctggcgtcatgaccagctggtggaaactcagctcagggttctgatgttcctgtgctgtctagtagtgctggtaagcctataaccaaacgttagcttgctatacgtggaatccgcgtgattacccgatttgactaccaagacacntgagtgnntcactggagttgctaagaaaccccgcaactatttaacctctgagtgctcattcctatccccgagaactgggtgccctagccgttcgagcgttctggtcgaaagggggaggtgcctccctcatagtgtgcttgttgcgttgtgtcgtgacacncagcttgtgtttcgcaagttggagagcgggacgggccaggaggcggtgtgatcgtggacgtgctcgtccgggagactgacggatgacatgcataggctacagtctactagtttagagaaaagtaaatggcagactggaccaaccctttccaa

SEQ ID NO: 532554 - DNA, 331 bp, Homo sapiens
  misc_feature (68)..(68): n is a, c, g, or t
  misc_feature (71)..(71): n is a, c, g, or t
  misc_feature (75)..(75): n is a, c, g, or t
  misc_feature (77)..(77): n is a, c, g, or t
gcgaggactgagcatcgagcagctgactacactggcagagaaactcttgggacctggtgtgaattatncanggcngncagatcacgggatcagtagattgagaccatcctgactaacacgatgaaaacctgtctctactaaaaaaacaaaaaatacaaaaaatgagccgggcatgttggaatgtgcctgtaatcccaggtactagggaggctgaggcaggagaatcgcttgaacctgggaggcggaggttgcagtgagccgagatcgcgccattgcactgcagcctgagcgacaggatgagactctgtctcaaaaaaatgtataaataaat

SEQ ID NO: 532555 - DNA, 414 bp, Homo sapiens
gtttttgttctgcttctcagtctgcacagttaaaaaaaaaaaaaaaaaaagaattagttgccaacatttaaacagaaataggttgcacataaaaatctgatttctgatttctcttaaaaattccaaagatctggccagggacagtgggtgttgcttgtaatcccagcactttgagaggctgaagcaggtggacttcttgagcccagtaattcgacactagcctggacaacatagcgagaccctgtctctataaaaaatggaaaacttagctaggtgtggtgttgcgtgcctctggtctcagctagtcaggaagctaaggtgggaagattgcctgagcccaggaggatgaggctgcagtgagccaaggtcacgccactgcactctagcctgggtgacagtgtgaaaccctgtctc

SEQ ID NO: 532556 - DNA, 100 bp, Homo sapiens
gaccatgacagaggcacacacgtctctcggcccggtggcccacggcccggcagaaatgcagcgccagctgatcttgctcccgaagcgggatgacggccgt

SEQ ID NO: 532557 - DNA, 455 bp, Homo sapiens
  misc_feature (54)..(54): n is a, c, g, or t
  misc_feature (134)..(134): n is a, c, g, or t
  misc_feature (182)..(182): n is a, c, g, or t
  misc_feature (197)..(197): n is a, c, g, or t
  misc_feature (205)..(205): n is a, c, g, or t
  misc_feature (207)..(207): n is a, c, g, or t
  misc_feature (210)..(210): n is a, c, g, or t
  misc_feature (212)..(212): n is a, c, g, or t
  misc_feature (233)..(233): n is a, c, g, or t
  misc_feature (235)..(235): n is a, c, g, or t
  misc_feature (307)..(307): n is a, c, g, or t
  misc_feature (455)..(455): n is a, c, g, or t
agcggctggaagagtacacctgtgacctgccccaggaaccccagggccagccanttgcagctgggcaccggctggctgacccaggggggcagtggagttccaggacgtggtgttggcgtaccggccagggctgncgaatgccctggatggagtgaccttctgcgtgcagccctggagagaanttgggcatcgtgganttcacagntncgncntctcttccctgttgtatgcgntnttccggctgctagagcccagttcaggtcgacgtgctgctggacggcgtggacaccagccagctggagctgcncaagctcagatcccaagttggctatcatcccccaggaagccctttttgttcagtgggactgttcgggaaaacctggacccccagggcctacataaggacagggccttgtggcaggccctgaaagcagtgccacctgagtgaaggtgan

SEQ ID NO: 532558 - DNA, 927 bp, Homo sapiens
tgttcggtgagagacgggcgagcagtcagccatgaatcttatcttggctttggatcttcagaatgagaatcagtaaccagacgacgcatgactctacctgagtgagcacggtgttttggacaatggactggttgagcccatccctattataaaaatgtctcagagcaaccgggagctggtggttgaactttctctcctactaagctttccacagaaaggataccagctggacgtcagtttaggtgatgtggaagcagaatcaggactcgagggccctagcataaggaactgaatctgagatggagacccgcgcagtgcgcaatctaatggcaacccaatcactggcacctgatcagcacagtcccgccggtgaatggtagccattggtcacagcaacagtgtggatgtcccggtgaggtgatccccatggtgcggctacgttacaagtcgaagacgctgtaggggatgcaggcggacgagttcttaagctgcggtaccggcggcgcaattcagtgatctgacatcccaggctctcagcattcactcccagggcacaagcatatcagagcttgaatcgaggtaatgaatgaacttcttccggtgatggggtaccctggggtcgcatttgtggacttcatgtccgttctgccgggcattgtggcgtgtggaatggcgtccactggtggtcatgcggtcttgggtgcgtccgctcgccgcttgggatgcgccgtgtgtgcctgtggatcggctatggtcgttgcatgccggagtcgggggctggggttcctcgggggggaaccttttggagccttgtctggcgtggagccgaagggcaggaacctccccgtggtctgcgggtctgtggcggggtttgggggccctcgcggatggcatgcacttcgccccctttgtccttccggggggtgc

SEQ ID NO: 532559 - DNA, 337 bp, Homo sapiens
agcttctgcatcttcactccctctctcctcatctggtcgcatctcgtcatcagtggcagagcggcagccaggcaacaggttgcaacagtctcacctcccttcaacagggccatcctccccccctggcagcctccgtcacactcaaccatcttctccttgccactcagccagtgtctccctctcatcttcagggcccatccaatttccatccacaacaattatcaatcataacaacccctgcgatacacccaatcatcccaaagaccctctctcgtctagatccgtcctcaattcacagcagtcctcacgtcttgcattgcacatctattggggctcc

SEQ ID NO: 532560 - DNA, 116 bp, Homo sapiens
  misc_feature (101)..(101): n is a, c, g, or t
gcattttcaagctaaagaaactggtttattttacagctttattaagatataatttacttaccatatgtctcctattcaaagtatctaactcaattattttnagtatattcatagag

SEQ ID NO: 532561 - DNA, 633 bp, Homo sapiens
tcttatcacataggttctggctatgtctttgcaccagccaccagcgccaacgacagtgagatatccagtgatgcgctgacggatgattccatgtccatgacgaacagcagtgtagatggaattcctccttatcgtgtgggcagtaagaaacagctccagagagaaatgcatcgcagtgtgaaggccaatggccaagtgtctctacctcatttcccgagaacccaccgcctgcccaaggagatgacccccgtggaacccgccacctttgcagctgagctgatctcgaggctggaaaagctgaagctggagttggagagccgccacagcctggaggagcgcctgcagcagatccgagaggatgaagagagagagggctccgagctcacactcaattcgcgggagggggcgcccacgcagcaccccctctccctactgccctccggcagctacgaggaagacccgcagacgatactggacgatcacctgtccagggtcctcaagacccctggctgccagtctccgggcgtaggccgctatagccctcgctcccgctccccggaccaccaccaccaccaccattcgcagtaccactccctgctcccgcccggtggcaagctgcctcccgcggccgct

SEQ ID NO: 532562 - DNA, 248 bp, Homo sapiens
  misc_feature (5)..(5): n is a, c, g, or t
  misc_feature (8)..(8): n is a, c, g, or t
  misc_feature (100)..(100): n is a, c, g, or t
  misc_feature (106)..(106): n is a, c, g, or t
agtangangtttgtcctgcccatctggaacgacagcagcttcagacagagagcacggctcctgcctcaggctccctgccgccactgcagccctgtggtangcccgntggtagtgtgcgaagagcagaggcaggggcacgggggcggggagtccatactccgagcagggagggtcccacgctcctgaagctcagtggctttcttttccggcccccaggtgagtgctggaggacttcgccttgagctcct

SEQ ID NO: 532563 - DNA, 513 bp, Homo sapiens
ctgtgcacagtgggagagatgaactaagctctgaagatggagaagccaaagcagttacaaaagatcaggagcccattggtgaaatgaaggaagaagaggaagacacctttgaatatcctgatactaccattgacttgtcccatcttcagtcccaacggcctctacagaaactggctccaagagaagagtctttgaactcaaatgacagtaaatcacagggccgaagacatttgtcagccaaggagagaagagaaatgaaaaagaaaaagctcccatgtgagtcaggggatttagaagtgatagaagaaaaggacaaagagagagaaagtgctgtgcacactgaagcttaccaaaacacaagcaaaaatgtggcagctggacagccaatgaaaagaggacagaagagtaaaatgaaaaaaatgaaggaaaaatacaaagaccaggatgatgaagatcgtgaacttattatgaagttgctggcatctgcaggttcgaacaaagaagaaaaaaaaa

SEQ ID NO: 532564 - DNA, 403 bp, Homo sapiens
agccaggtccattgcacttttggacaactctactaaatggattttcctcatgccattgcataactgctacctgccaccagagcctcagaaatacatggttttccatcaagcactcatggaacatgtaactgtgggcgcttctagggcggttcatgatggatcctccaagatcaactaaatataaaacaagctcccagctgaggcagctgtctcgcctcttctttcactcgctcctggcagcacagcaatctctgcaagttacttggaccctcaggactccttgttcaagtgcaatggaggaccatgcagatggcagggaaaaccaaagaaagctcaggtggcccatcatggctgtcatcggtggaagaacgtctctatttaacactgaaccttagtaatgaaa

SEQ ID NO: 532565 - DNA, 292 bp, Homo sapiens
gaatgtagagcatccccatatagcctgagcaggagatcgcgaggttgatcgtgttttatcgattacagaacaggctcctttagagggatatgaagcaccgccagttcctttgagttttaagctgtggctcgtagtgttctgccgagcagttttgttgatttaactgtggaggtttagggctaagcataggggggaatctaatcccagtttgggtcttagatattgtgtgttcagatatgttaaagccactttcgtggtctatttagtgtcaactggagttttttacgggtac

SEQ ID NO: 532566 - DNA, 192 bp, Homo sapiens
tgaatgcgccgggcaggaaccgaaccgtgcgctgcaggccgaactgcatggccgccgtgcaatgtgatagaaatctgttgaagcactcgtaggccagcgcgtattcctgctcggattcgcgcatgtccacgccatacttgcgcacgaagcgcgagatcatccagttcttgaccgcgggttcccggtagtccg

SEQ ID NO: 532567 - DNA, 354 bp, Homo sapiens
ttaattaatatatatattttgagatggactctcactctgtcgccaggctgcaagtgcagtggcgtgatcttggctcactgcagtctccacctcacaggctgaagtggacttcccagctcagcttcccgcgtagctaagaccacaggcacatgccaccacgcccagctaagtctagtatgtccagtaaagacaggattttgccatgtagaccaggctgatgtcgagtgcttgggctcaagcaatccttctgccttggactcccatagtactgagatcacaggtgtgaaccactgtgccccgtctacgtggaattgtcctatatgagaacagaggttctaccatcatccagtgata

SEQ ID NO: 532568 - DNA, 118 bp, Homo sapiens
tgatctagaggatctcttcttgtgttggaacgacaaacaaggtttcaccatgaagcaggtgtcttgaccatggcgtgtcgctgctactgagtaaggggcatcctgttacagaacaagg

SEQ ID NO: 532569 - DNA, 236 bp, Homo sapiens
cccgactagcctgacaggagacgggctagcctccgtggcccaccgtccgcggccaccaggaaagcactgtttctgccatcccccatgtctcaggttcccaaggccacggggaccgcgccagtgcaggcctacatgcaggtaggggcagctcacactgtgcccctcccacatggccacacggggtcaggccaggggctgctgtgctccttgctgtcgggctagtcgggggggtaccg

SEQ ID NO: 532570 - DNA, 864 bp, Homo sapiens
cagagccctgagcagccccacgcgtcagcggtcggccatagttaccatcacaccccgggaggagccgctgctgccgtagccggtcccagtcaccatcaccgcaaccatgagcagcgaggtcgagacccagcttgccgcccgtcgtccctccgcggtgtcgctgctcctcgaggcgcggcggaccaccaatgccctggcgactacgggcagcggcgctaggcagctggttggaccgggcgggcttcaacatcggggtgcgcttgccgggtggttcacagggagggtcatcgcaagcggaagggtttacgggggcaggcagtaaagattgggttccacgttgcttcgcgggagcggcgctattggccttgcactccgtgcagggcaacttgcaccaccaagggcagacgactggtagtgttggtacagccgagagcttggcgcctattaatggacgcgcattttgacccccgtggcagaggttaaccttttcggcgggtggttcgcgaccactggggcgtacgaccctggtgggaccggtttggactgggcttcgttgggcacgcggaccacagcggcggtggcgggaggctaggcagagatttgtttccggggtctcctggcggggtactacccaggcttccgaggggccgcgttcaaattagttgacggcaggaccggtcgccccttcactacggaccgcatttccaccggttcgtaggggggtccatccagcgcagatatcaacccaagggacacgttttccgggcattgttgcgacgttggggcacaacgaacggggggctccgcggatttggtcccgaaggccatgccgagatacgcggcgcatcgggcgggcaaaggccg

SEQ ID NO: 532571 - DNA, 261 bp, Homo sapiens
  misc_feature (201)..(201): n is a, c, g, or t
agaacagggctttggcacgtttccattggccttaccggggaatgaattaactccctcaccctctttgtgcctggtctggaattttggctaacagcattaacatctaccttaatgacaaagaggaaggggattcttagaggctcaccaaaatgggcccatggtcagaatatggccccccattatatcttgttagctcttccngggccattagtttatactgtctaagtcgtgttggtttaatagcctaaggtgaattcttca

SEQ ID NO: 532572 - DNA, 897 bp, Homo sapiens
  misc_feature (657)..(657): n is a, c, g, or t
gtaaccatgcatctaacggagtcctggtagtccgcacctgaatgtcctcgtgatgacagcagtcgcgttcattagacatcttagtaaatgaatggtatgacgtagggatatcactttacataattagatgcgtgatgttacctagggagatagtaattcaggcgaacaagagtgggagtcttcaatatgagatgaatatatcacctaattaataatgcgggtagtggcatagatgaaaaactgtgacgaaaatggtcacatttgtcaactgaatcattagtatacattcgagtgtaagaatcctaatttgttcttacaacatagtaggtttatccgagacaagtccaggatagtgacccgaatccttcacatcgagagagcgaaagacctgaatagctattactcgaggagtggagacgacaatcacgagtccactcatagtaaggactcaagtttcattgtcatgcttgaaactaggcatgatatctaatttagttgacattcttacgttggagcacagaggaaatgccctatgcggctatcggacatgcagtacatcgcttcctagagtatgctatagataagatcacctgattgatggtcgggcagtgtgctatatctagtggagtgcgcatccaggacgcaccacaacatttncgaaagaaaacccgtatacatcaaactttctgaggacggacaaaagcgggagcgagatacagaaccccccaaaaaagactgggtttgcaagggccagacgcccaatggccgttccaatggacttttttgcgacaaaaacactgtgggccccaacagagaaaacccagggcacatgtggcaggggggcggggggagcccccagaaaagtaaacaaagccccgggggggaagggaagcgcgc

SEQ ID NO: 532573 - DNA, 1360 bp, Homo sapiens
cttaagaaaagggaagtaagtgacgatactcttccttattgctcacttattctctgagcttggaaagaatataactatgaagagacgtcggaactataatagatgaggatagttatacattatacaaatagcattaggtgcggaagaacttacaagcagttgtcgacagtataagatttgcattgttttgtgagtcaatgagacatgcgtccttgttacttgggagactacttaagatagatattagtggttatgttatatggttaagcggatgtacatataatctacgtctttatataggttataaataatgagacacgcatttaaaaatgatcgtggcttctaagacgtttctgatttaaaagagttgcgagtcacttgtcttagtcttgtgtgagtaggatagattcagcgttgtcccaacttcgaaggcgtcaatttgactttgaaataagtataatgatgaatataattgggcaaatacgcgcgataacttcatgaaggtataaaacttttagattgtcttataaagaaatttaatagcagtaaaaaaatgacgttttatatgtaggaaaaaaaccgcctaaacgagttgcagtcaaccaccgcttgggtgcgtccaaggccccttattgtgccccaatgggtttacttcacgcgtttgtacacacgttttggaaacgacctttcttcgagagaaccccaaagtcttaacaccactttcttccaaaagcgtactggtgttgtacaaggggggtctcggcacggaaaaaacggcacggggttcaccttggggaaagacaaaccaattggcacagaagttgcaaagggaactcactccttatattaatatgttttgacaacacccaaaggtcattacccctatttgggcacttagggaggaacgcggaaaagaaagtttaacctacctattggaaaaaaatggcggcaaatggggcgtaaggcgtttacacacagttggaggaacacaaatataggtatttgagagttgaattaatttagagggtgtgcggaaggcaacaacttgtcttttaagcgggaaagaccaacccattttgtttgtcacacaaaaacaactctgggtgcgctacagtcttggtgttgcaaccaagttgtgtacacccaaaggattatgattggctctcctgtatatgatgatgggcacctgggcaccaggtgatagcagcaggcgatcaatttcatgggcgttcattatacttcaaacggcatgtgcgaaaccccactccattgcggaacaaacaaaaccccacataacagcccaagggtaaccacagtgggagtgggacacaggagctatacgaaacatcgtgatggattt

SEQ ID NO: 532574 - DNA, 132 bp, Homo sapiens
ccccttcgttcacaatggcccattggcagtcaatcttctcaccccactccagcccctggcaaccactgatggtttctggtccctttaggttgccttttccaaaaagtcatataaatgagtcatatagtctat

SEQ ID NO: 532575 - DNA, 486 bp, Homo sapiens
  misc_feature (118)..(118): n is a, c, g, or t
atcatttatgtgtgtaaatactcaactaagaaaaatcaaaagtgtggtataatattacaagaaaaaatattcaaaatggaaagtccatttatgaatgtattaatattaaaatccaaangttatgttttatttataagtgtctacagttatatatgtttacaaagagccatataaatcattgtcagaaaggttcctcatcctgccgagatatgtgaccatataaacacttcattgtcctagaacaaaagacagaaagtgttataattctatacaaaggatgaaaggtaagagtttgtggaatgtacggtataccttacacgcttcattgttggattatgattatttgaatgagagtgctgtaaatattctgaatatatcaacataagtgacgttagtttatacgcatcaagaaaatgtatagagttagtgatttttttgtgcatacatcacctcctcactcaagtaaatgtgaatattagagtgcga

SEQ ID NO: 532576 - DNA, 504 bp, Homo sapiens
  misc_feature (9)..(9): n is a, c, g, or t
  misc_feature (89)..(89): n is a, c, g, or t
  misc_feature (113)..(113): n is a, c, g, or t
  misc_feature (150)..(150): n is a, c, g, or t
  misc_feature (197)..(197): n is a, c, g, or t
  misc_feature (220)..(220): n is a, c, g, or t
  misc_feature (247)..(247): n is a, c, g, or t
  misc_feature (254)..(254): n is a, c, g, or t
  misc_feature (307)..(307): n is a, c, g, or t
  misc_feature (334)..(334): n is a, c, g, or t
  misc_feature (373)..(373): n is a, c, g, or t
  misc_feature (375)..(375): n is a, c, g, or t
  misc_feature (377)..(377): n is a, c, g, or t
  misc_feature (379)..(379): n is a, c, g, or t
  misc_feature (402)..(402): n is a, c, g, or t
ttatatganagtgacacttaaatcaatcagtcaactctgagtaatgcagactgtactcctcgatgtaagtcggctttaaccagtcaggngaaggtctgaagaaaaaaaaagancgtcctcttcccagaacaagaaaatcctccaacaganacctttggactggaccttgcaccatcagctttcctgggtttccagcntcctgcctcaaactccagccttnggactggtaagactaaataataacaanacaagcnaatgcttttaaggaagtctgtctggagaatcttgacaaacacaaacatctacngagagtacctgtacaagttttgctcanacccgtagcaagaggcttctggctaaccagtggggagtntnangntctttgcttgtaagaactgaacnaccagcggtacaacagccctagcccagggcaagaaagggaatttccgcaatcactgagtaggctgtagccactatctccataaggcctgaattcaccaaggg

SEQ ID NO: 532577 - DNA, 1200 bp, Homo sapiens
tcaggagatcgagaccatcctggctaacacggtgaaaccctgtctccattaaaaatacaaaaaattagccggacgtggtggcatgtgcctgtagtcccagctactcaggaggctgaggcaggagaatcgcttgaacctgggaggcagaggttgcagtgagccaagattgcgctactgcactccagcctgggcgacagagcaagactccgcctcaaaaaaaaaaaaaaaaaaaagaaaaagcgagaaaattacaggggagggcccgggggggggggcccaggcccttttaaccccaggcactttggagagagggccaagggggggagggactcccctggagggccacaagggttcccagaaccaggccgggacacaactggggaggaacccccattcttcatagctttaaaaaaaagaaaaattccaaaatttagcccaggcgctggggggggggagccctggtgtgaacgcccaggtataccggggagaacttggagcggcaggaaaatccctcttgggaccctggggagaggcgcaaaggtgtcgcgggaagaccccgagaaattgggggcccatgtgggcccctcacagccgggggggcgcaacgaggagtgcgaaaaacctcaaattctctcaaaagagggcaaatatacggaagctaaacagaacagcgggccgggggggaaacacgggggttcaaaacatagaagtcacaattttcttccaccaaaaaagacatagatgggaaccgcaagggactttttttaacacacgcacggggcggggggaccctttcggagaatatcgttggtagtgccgcgccaatgggcgcccccctgtgtttccaagcgccctggttgtgtacccccccccaatattgtggtttcccccaattttggcgctgcacaaagcggaaccccttggcgcgggggggtcccccttccagagagaaagaggggcctggaaaagcgccacaaaggtggcggcgccacacaatgccctaaaggacattgtttcccgacagcgtggccgcctctgtcagaacaaagggttcctcaagagggcgaaaaatatcgtgcctgcgcacggcgggaaaagaaatagcgttattgatgggcaccggcttccacaacaatactaggccagcatgttcaacggtgagagatcaccccccacacgaggagcggcaccgcgagcaaa

SEQ ID NO: 532578 - DNA, 1460 bp, Homo sapiens
acatggaaacacaaatacataaaacagatgcaggtggagtgactataggtggggagacaggcaaggctgcagaccctccctttaagccagcacctttacctctaagatacacgtgcagagctgtagagctttctccaagattcacagattgaaaaaccctgccatggacacacaacccttagaggcgttctgcatcatcacaggaagattctggtccagagcaactttagaggtggcagatgccagcccaattataaatcaggcctggtacagaagagcttgtacattcaggctaagtatcagcgtttacggttcactggcccaaggggatttatcactcataagttcagagaaagattaatgagaaaaaagaaggaatatacagatgttgccacaggaatctaatctgaaatcgtacaaatggaaatgacgctacaggaggatgtttgggagcatctctctctttttgtcaggagttagaagtgacactaaggcactaatactgtaacttcttgataaaataactttattttttagtagtggaatgctgcaacttttttacacctaacaattgcttttaaattacagtattcaatttaaaagttgtattaactacagtttcctttgcaaaaagtctcaaaagaatcacttgaagggcattatttgttgatgcatttttctctgagcatggtttcatagagagaacttcaccaagtaatattcagacgtttatatgttgaaagttttgcttacataataaaaacaaaaacaagtgtctgaattgtatagtgtctttacatgaaagaactttaaacagtggccttatggtagaaaattttataccagatttttctttttctgatgacattttggcttataactcgaagttttcttaagtttctgaagatcaaggcctatataattcatacatttcatattataagaaggcaagagacaaggtgcttcaaatattccatcaggtagttgtgagtgcactgaatttttagtaatatgttcattcagtttttttccacaactatttgctcttttccaatttcaaaatgctattgtggaaaatatgtaaagattttgtaatctatagtccatcttatttttccctcagggcaagcttgtgcatatcatatttttaaaggctttttaaaaatctgacaaacaaaatctcatatttgaaaattgtactttactactacagcattacacattttgcaagcacatcttatagagtgtttacttttagttcagttgatatgtattgcatacctactatgtgtaagagcaaatggatgggatttttaaatgaaatttttaggccccaataccttatttctttatgttttctgtgttctgcttaacagtacatatacattcccaattacatttttgtgaaatgtttatttgtaataaaataaaatgttgttgctctttctgcttaaataaaa

SEQ ID NO: 532579 - DNA, 348 bp, Homo sapiens
gtagctgggattataggcatgcagcaccatgcctggctagttttgtatttttagtaaagacagagtttgtccatcttggtcatgctggtctcaaactcccgacctcagatgatccgcccacagctgcctccgacattgttggaattacaggcatgatccgccgtgcctggccaaacaaaggcatttctatgctaggtcgttcttgttcctttatctgagtgagctggaggtttctacaagtttttatccaaatgggccagaggtttttctatctgtacagccacgggcatgtctccaagcacaacaacatatgctagttcccttctgtcgtcttctcgcaaaaatata

SEQ ID NO: 532580 - DNA, 314 bp, Homo sapiens
  misc_feature (24)..(24): n is a, c, g, or t
  misc_feature (301)..(301): n is a, c, g, or t
attaccaaaagtgcactcttctanatctagcagatggacaagtcaaagaaccttttaaaccgtctaagaaagacagcattgcctgtacttattcaaataaaaatgatgttgatttgcgatctagtaatgacaaatggaaggaaaaaataaagaaagaaggggattgtagaaaagagagcaattcttccagtaaccaacttgataaaagtcaaaaacttcctgatgtgaaaccctcgcctatcaatcttaggaagaaatcacttacagttaaagtagatatagaagagtgcacttttagggntcctctaggtcag

SEQ ID NO: 532581 - DNA, 2844 bp, Homo sapiens
gtaagactagctgaggacctgaggatacagaagaaaaatactcccagtcaactagaagaggctctgaagactttgagtacaaggagctcatttcagaagaggtatcctgaggatcgtgattacagaaaatatggacacacatcacaaagacctaaagacgtggagaggtatgaaagcagagagcctgccaggaacccaaagtggaagcctgagcattccctcccaccttaccaagaggacacagaccagtggaaccttgggccccaaacttatcgacatgctgagagggaacacccagagaccagttcagcaaccaaagtatcctatgactatcgtcacaaacgtcctaagctcttggatggggaccaggacttttctgatgggagaactcagaagtactgtaaggaagaagatagaaaatatagttttcaaaaaggccctctaaatagagagttagattgttttaatactggaagagggagagagactcaagatggacaagtcaaagaaccttttaaaccgtctaagaaagacagcattgcctgtacttattcaaataaaaatgatgttgatttgcgatctagtaatgacaaatggaaggaaaaaataaagaaagaaggggattgtagaaaagagagcaattcttccagtaaccaacttgataaaagtcaaaaacttcctgatgtgaaaccctcgcctatcaatcttaggaagaaatcacttacagttaaagtagatgtgaagaaaacagtagatacattcagggttgcttctagctattccacagagagacagatgtcacatgatttggttgctgttggcaggaaaagtgagaactttcatccagtgtttgaacatcttgactcaactcagaatactgaaaacaaacctacaggagaatttgctcaggaaatcataacaataatccatcaagttaaagcaaattattttccatcacctggcattactttacatgagcgtttctcaacaatgcaagatatacacaaggcagatgtaaatgaaattccattgaattcagatccagaaatacacaggagaatagatatgtctttggccgagcttcagagtaaacaagctgtgatctatgaatcggaacagactctgatcaaaataatagatccaaatgacctacgacatgacattgaaagaaggcgaaaagaacggttacagaatgaagatgagcacatttttcacatagctagtgctgcagagagggatgatcagaattccagtttttcaaagaattatactacgcagagaaaagacataattactcacaaaccatttgaggttgagggaaaccaccgaaacacaagagtaagaccttttaagagcaactttagaggtggcagatgccagcccaattataaatcaggcctggtacagaagagcttgtacattcaggctaagtatcagcgtttacggttcactggcccaaggggatttatcactcataagttcagagaaagattaatgagaaaaaagaaggtcccctagctctcaaagctagacaagccaagctggaaacgtgtcctactaattctcccagttctctttccaactttaatggtttcaagtcttctcatttccatcactcattcattactacatttgtttcatccattttaatggctgcatattattccactctgtggatatatgaattatttcagtggtcttcaacctttttgctccatactgtaaagttttgaaaagttatctaccttcttgcacattggaatatacagatgttgccacaggaatctaatctgaaatcgtacaaatggaaatgacgctacaggaggatgtttgggagcatctctctctttttgtcaggagttagaagtgacactaaggcactaatactgtaacttcttgataaaataactttattttttagtagtggaatgctgcaacttttttacacctaacaattgcttttaaattacagtattcaatttaaaagttgtattaactacagtttcctttgcaaaaagtctcaaaagaatcacttgaagggcattatttgttgatgcatttttctctgagcatggtttcatagagagaacttcaccaagtaatattcagacgtttatatgttgaaagttttgcttacataataaaaacaaaaacaagtgtctgaattgtatagtgtctttacatgaaagaactttaaacagtggccttatggtagaaaattttataccagatttttctttttctgatgacattttggcttataactcgaagttttcttaagtttctgaagatcaaggcctatataattcatacatttcatattataagaaggcaagagacaaggtgcttcaaatattccatcaggtagttgtgagtgcactgaatttttagtaatatgttcattcagtttttttccacaactatttgctcttttccaatttcaaaatgctattgtggaaaatatgtaaagattttgtaatctatagtccatcttatttttccctcagggcaagcttgtgcatatcatatttttaaaggctttttaaaaatctgacaaacaaaatctcatatttgaaaattgtactttactactacagcattacacattttgcaagcacatcttatagagtgtttacttttagttcagttgatatgtattgcatacctactatgtgtaagagcaaatggatgggatttttaaatgaaatttttaggccccaataccttatttctttatgttttctgtgttctgcttaacagtacatatacattcccaattacatttttgtgaaatgtttatttgtaataaaataaaatgttgttgctctttctgcttaaataaaa

SEQ ID NO: 532582 - DNA, 268 bp, Homo sapiens
gctgtactcggacggaagggatatctggatgcatgcacgtatggctcacggataattctatttgtagaaagaacccaacctcctagagaagcacaacggtcaggagtctgtacacacaagttcagcttagcatcacgagtctggtataccaagaaaatcaaagtggtacaagtggttggtctacactatgatactttctaaataaactcgtttgtttttttttttttttttttttttttattcccctacggggggggggggagggggg

SEQ ID NO: 532583 - DNA, 2622 bp, Homo sapiens
gtaagactagctgaggacctgaggatacagaagaaaaatactcccagtcaactagaagaggctctgaagactttgagtacaaggagctcatttcagaagaggtatcctgaggatcgtgattacagaaaatatggacacacatcacaaagacctaaagacgtggagaggtatgaaagcagagagcctgccaggaacccaaagtggaagcctgagcattccctcccaccttaccaagaggacacagaccagtggaaccttgggccccaaacttatcgacatgctgagagggaacacccagagaccagttcagcaaccaaagtatcctatgactatcgtcacaaacgtcctaagctcttggatggggaccaggacttttctgatgggagaactcagaagtactgtaaggaagaagatagaaaatatagttttcaaaaaggccctctaaatagagagttagattgttttaatactggaagagggagagagactcaagatggacaagtcaaagaaccttttaaaccgtctaagaaagacagcattgcctgtacttattcaaataaaaatgatgttgatttgcgatctagtaatgacaaatggaaggaaaaaataaagaaagaaggggattgtagaaaagagagcaattcttccagtaaccaacttgataaaagtcaaaaacttcctgatgtgaaaccctcgcctatcaatcttaggaagaaatcacttacagttaaagtagatgtgaagaaaacagtagatacattcagggttgcttctagctattccacagagagacagatgtcacatgatttggttgctgttggcaggaaaagtgagaactttcatccagtgtttgaacatcttgactcaactcagaatactgaaaacaaacctacaggagaatttgctcaggaaatcataacaataatccatcaagttaaagcaaattattttccatcacctggcattactttacatgagcgtttctcaacaatgcaagatatacacaaggcagatgtaaatgaaattccattgaattcagatccagaaatacacaggagaatagatatgtctttggccgagcttcagagtaaacaagctgtgatctatgaatcggaacagactctgatcaaaataatagatccaaatgacctacgacatgacattgaaagaaggcgaaaagaacggttacagaatgaagatgagcacatttttcacatagctagtgctgcagagagggatgatcagaattccagtttttcaaagaattatactacgcagagaaaagacataattactcacaaaccatttgaggttgagggaaaccaccgaaacacaagagtaagaccttttaagagcaactttagaggtggcagatgccagcccaattataaatcaggcctggtacagaagagcttgtacattcaggctaagtatcagcgtttacggttcactggcccaaggggatttatcactcataagttcagagaaagattaatgagaaaaaagaagttttaatagtgtaagatcctagtgaaaggaatatacagatgttgccacaggaatctaatctgaaatcgtacaaatggaaatgacgctacaggaggatgtttgggagcatctctctctttttgtcaggagttagaagtgacactaaggcactaatactgtaacttcttgataaaataactttattttttagtagtggaatgctgcaacttttttacacctaacaattgcttttaaattacagtattcaatttaaaagttgtattaactacagtttcctttgcaaaaagtctcaaaagaatcacttgaagggcattatttgttgatgcatttttctctgagcatggtttcatagagagaacttcaccaagtaatattcagacgtttatatgttgaaagttttgcttacataataaaaacaaaaacaagtgtctgaattgtatagtgtctttacatgaaagaactttaaacagtggccttatggtagaaaattttataccagatttttctttttctgatgacattttggcttataactcgaagttttcttaagtttctgaagatcaaggcctatataattcatacatttcatattataagaaggcaagagacaaggtgcttcaaatattccatcaggtagttgtgagtgcactgaatttttagtaatatgttcattcagtttttttccacaactatttgctcttttccaatttcaaaatgctattgtggaaaatatgtaaagattttgtaatctatagtccatcttatttttccctcagggcaagcttgtgcatatcatatttttaaaggctttttaaaaatctgacaaacaaaatctcatatttgaaaattgtactttactactacagcattacacattttgcaagcacatcttatagagtgtttacttttagttcagttgatatgtattgcatacctactatgtgtaagagcaaatggatgggatttttaaatgaaatttttaggccccaataccttatttctttatgttttctgtgttctgcttaacagtacatatacattcccaattacatttttgtgaaatgtttatttgtaataaaataaaatgttgttgctctttctgcttaaataaaa

SEQ ID NO: 532584 - DNA, 266 bp, Homo sapiens
tttgtgtaaagtcaaacataaacctggcctacatgcacattgaggcccagcgcctttccttaaacttttttatgacacaaagacctttggttaggttttcctggtgaccctctcccccccattagcctgtagtcctgccccattcccccccctgatatggtaaaaaaagtgatcaataaatattgagggaactcaaagaccagtgccaatgcgggtcccccgtatgttgagcgccggtcctttgggcccagggttttttttcttta

SEQ ID NO: 532585 - DNA, 2594 bp, Homo sapiens
gtaagactagctgaggacctgaggatacagaagaaaaatactcccagtcaactagaagaggctctgaagactttgagtacaaggagctcatttcagaagaggtatcctgaggatcgtgattacagaaaatatggacacacatcacaaagacctaaagacgtggagaggtatgaaagcagagagcctgccaggaacccaaagtggaagcctgagcattccctcccaccttaccaagaggacacagaccagtggaaccttgggccccaaacttatcgacatgctgagagggaacacccagagaccagttcagcaaccaaagtatcctatgactatcgtcacaaacgtcctaagctcttggatggggaccaggacttttctgatgggagaactcagaagtactgtaaggaagaagatagaaaatatagttttcaaaaaggccctctaaatagagagttagattgttttaatactggaagagggagagagactcaagatggacaagtcaaagaaccttttaaaccgtctaagaaagacagcattgcctgtacttattcaaataaaaatgatgttgatttgcgatctagtaatgacaaatggaaggaaaaaataaagaaagaaggggattgtagaaaagagagcaattcttccagtaaccaacttgataaaagtcaaaaacttcctgatgtgaaaccctcgcctatcaatcttaggaagaaatcacttacagttaaagtagatgtgaagaaaacagtagatacattcagggttgcttctagctattccacagagagacagatgtcacatgatttggttgctgttggcaggaaaagtgagaactttcatccagtgtttgaacatcttgactcaactcagaatactgaaaacaaacctacaggagaatttgctcaggaaatcataacaataatccatcaagttaaagcaaattattttccatcacctggcattactttacatgagcgtttctcaacaatgcaagatatacacaaggcagatgtaaatgaaattccattgaattcagatccagaaatacacaggagaatagatatgtctttggccgagcttcagagtaaacaagctgtgatctatgaatcggaacagactctgatcaaaataatagatccaaatgacctacgacatgacattgaaagaaggcgaaaagaacggttacagaatgaagatgagcacatttttcacatagctagtgctgcagagagggatgatcagaattccagtttttcaaagaattatactacgcagagaaaagacataattactcacaaaccatttgaggttgagggaaaccaccgaaacacaagagtaagaccttttaagagcaactttagaggtggcagatgccagcccaattataaatcaggcctggtacagaagagcttgtacattcaggctaagtatcagcgtttacggttcactggcccaaggggatttatcactcataagttcagagaaagattaatgagaaaaaagaaggaatatacagatgttgccacaggaatctaatctgaaatcgtacaaatggaaatgacgctacaggaggatgtttgggagcatctctctctttttgtcaggagttagaagtgacactaaggcactaatactgtaacttcttgataaaataactttattttttagtagtggaatgctgcaacttttttacacctaacaattgcttttaaattacagtattcaatttaaaagttgtattaactacagtttcctttgcaaaaagtctcaaaagaatcacttgaagggcattatttgttgatgcatttttctctgagcatggtttcatagagagaacttcaccaagtaatattcagacgtttatatgttgaaagttttgcttacataataaaaacaaaaacaagtgtctgaattgtatagtgtctttacatgaaagaactttaaacagtggccttatggtagaaaattttataccagatttttctttttctgatgacattttggcttataactcgaagttttcttaagtttctgaagatcaaggcctatataattcatacatttcatattataagaaggcaagagacaaggtgcttcaaatattccatcaggtagttgtgagtgcactgaatttttagtaatatgttcattcagtttttttccacaactatttgctcttttccaatttcaaaatgctattgtggaaaatatgtaaagattttgtaatctatagtccatcttatttttccctcagggcaagcttgtgcatatcatatttttaaaggctttttaaaaatctgacaaacaaaatctcatatttgaaaattgtactttactactacagcattacacattttgcaagcacatcttatagagtgtttacttttagttcagttgatatgtattgcatacctactatgtgtaagagcaaatggatgggatttttaaatgaaatttttaggccccaataccttatttctttatgttttctgtgttctgcttaacagtacatatacattcccaattacatttttgtgaaatgtttatttgtaataaaataaaatgttgttgctctttctgcttaaataaaa

SEQ ID NO: 532586 - DNA, 2709 bp, Homo sapiens
gtaagactagctgaggacctgaggatacagaagaaaaatactcccagtcaactagaagaggctctgaagactttgagtacaaggagctcatttcagaagaggtatcctgaggatcgtgattacagaaaatatggacacacatcacaaagacctaaagacgtggagaggtatgaaagcagagagcctgccaggaacccaaagtggaagcctgagcattccctcccaccttaccaagaggacacagaccagtggaaccttgggccccaaacttatcgacatgctgagagggaacacccagagaccagttcagcaaccaaagtatcctatgactatcgtcacaaacgtcctaagctcttggatggggaccaggacttttctgatgggagaactcagaagtactgtaaggaagaagatagaaaatatagttttcaaaaaggccctctaaatagagagttagattgttttaatactggaagagggagagagactcaagatggacaagtcaaagaaccttttaaaccgtctaagaaagacagcattgcctgtacttattcaaataaaaatgatgttgatttgcgatctagtaatgacaaatggaaggaaaaaataaagaaagaaggggattgtagaaaagagagcaattcttccagtaaccaacttgataaaagtcaaaaacttcctgatgtgaaaccctcgcctatcaatcttaggaagaaatcacttacagttaaagtagatgtgaagaaaacagtagatacattcagggttgcttctagctattccacagagagacagatgtcacatgatttggttgctgttggcaggaaaagtgagaactttcatccagtgtttgaacatcttgactcaactcagaatactgaaaacaaacctacaggagaatttgctcaggaaatcataacaataatccatcaagttaaagcaaattattttccatcacctggcattactttacatgagcgtttctcaacaatgcaagatatacacaaggcagatgtaaatgaaattccattgaattcagatccagaaatacacaggagaatagatatgtctttggccgagcttcagagtaaacaagctgtgatctatgaatcggaacagactctgatcaaaataatagatccaaatgacctacgacatgacattgaaagaaggcgaaaagaacggttacagaatgaagatgagcacatttttcacatagctagtgctgcagagagggatgatcagaattccagtttttcaaaggtaaagaatgttcatactgatggattccaaaaacccacacattttataaaatcaaattttagaaaatgtattgaaaaaccttacatgaattatactacgcagagaaaagacataattactcacaaaccatttgaggttgagggaaaccaccgaaacacaagagtaagaccttttaagagcaactttagaggtggcagatgccagcccaattataaatcaggcctggtacagaagagcttgtacattcaggctaagtatcagcgtttacggttcactggcccaaggggatttatcactcataagttcagagaaagattaatgagaaaaaagaagttttaatagtgtaagatcctagtgaaaggaatatacagatgttgccacaggaatctaatctgaaatcgtacaaatggaaatgacgctacaggaggatgtttgggagcatctctctctttttgtcaggagttagaagtgacactaaggcactaatactgtaacttcttgataaaataactttattttttagtagtggaatgctgcaacttttttacacctaacaattgcttttaaattacagtattcaatttaaaagttgtattaactacagtttcctttgcaaaaagtctcaaaagaatcacttgaagggcattatttgttgatgcatttttctctgagcatggtttcatagagagaacttcaccaagtaatattcagacgtttatatgttgaaagttttgcttacataataaaaacaaaaacaagtgtctgaattgtatagtgtctttacatgaaagaactttaaacagtggccttatggtagaaaattttataccagatttttctttttctgatgacattttggcttataactcgaagttttcttaagtttctgaagatcaaggcctatataattcatacatttcatattataagaaggcaagagacaaggtgcttcaaatattccatcaggtagttgtgagtgcactgaatttttagtaatatgttcattcagtttttttccacaactatttgctcttttccaatttcaaaatgctattgtggaaaatatgtaaagattttgtaatctatagtccatcttatttttccctcagggcaagcttgtgcatatcatatttttaaaggctttttaaaaatctgacaaacaaaatctcatatttgaaaattgtactttactactacagcattacacattttgcaagcacatcttatagagtgtttacttttagttcagttgatatgtattgcatacctactatgtgtaagagcaaatggatgggatttttaaatgaaatttttaggccccaataccttatttctttatgttttctgtgttctgcttaacagtacatatacattcccaattacatttttgtgaaatgtttatttgtaataaaataaaatgttgttgctctttctgcttaaataaaa

SEQ ID NO: 532587 - DNA, 1101 bp, Homo sapiens
  misc_feature (32)..(32): n is a, c, g, or t
  misc_feature (35)..(35): n is a, c, g, or t
  misc_feature (38)..(38): n is a, c, g, or t
  misc_feature (40)..(40): n is a, c, g, or t
  misc_feature (43)..(44): n is a, c, g, or t
  misc_feature (146)..(146): n is a, c, g, or t
  misc_feature (162)..(163): n is a, c, g, or t
  misc_feature (201)..(201): n is a, c, g, or t
  misc_feature (243)..(243): n is a, c, g, or t
  misc_feature (247)..(247): n is a, c, g, or t
  misc_feature (261)..(261): n is a, c, g, or t
  misc_feature (269)..(269): n is a, c, g, or t
  misc_feature (282)..(282): n is a, c, g, or t
  misc_feature (289)..(290): n is a, c, g, or t
  misc_feature (304)..(305): n is a, c, g, or t
  misc_feature (312)..(312): n is a, c, g, or t
  misc_feature (328)..(328): n is a, c, g, or t
  misc_feature (338)..(338): n is a, c, g, or t
  misc_feature (360)..(360): n is a, c, g, or t
  misc_feature (363)..(364): n is a, c, g, or t
  misc_feature (369)..(369): n is a, c, g, or t
  misc_feature (372)..(372): n is a, c, g, or t
  misc_feature (376)..(376): n is a, c, g, or t
  misc_feature (391)..(391): n is a, c, g, or t
  misc_feature (401)..(401): n is a, c, g, or t
  misc_feature (433)..(433): n is a, c, g, or t
  misc_feature (436)..(436): n is a, c, g, or t
  misc_feature (450)..(450): n is a, c, g, or t
  misc_feature (456)..(456): n is a, c, g, or t
  misc_feature (466)..(466): n is a, c, g, or t
  misc_feature (468)..(468): n is a, c, g, or t
  misc_feature (480)..(480): n is a, c, g, or t
  misc_feature (504)..(504): n is a, c, g, or t
  misc_feature (508)..(508): n is a, c, g, or t
  misc_feature (518)..(518): n is a, c, g, or t
  misc_feature (547)..(547): n is a, c, g, or t
  misc_feature (558)..(558): n is a, c, g, or t
  misc_feature (561)..(561): n is a, c, g, or t
  misc_feature (574)..(574): n is a, c, g, or t
  misc_feature (595)..(595): n is a, c, g, or t
  misc_feature (625)..(625): n is a, c, g, or t
  misc_feature (655)..(655): n is a, c, g, or t
  misc_feature (663)..(663): n is a, c, g, or t
  misc_feature (687)..(687): n is a, c, g, or t
  misc_feature (701)..(701): n is a, c, g, or t
  misc_feature (711)..(711): n is a, c, g, or t
  misc_feature (737)..(737): n is a, c, g, or t
  misc_feature (745)..(745): n is a, c, g, or t
  misc_feature (747)..(747): n is a, c, g, or t
  misc_feature (767)..(767): n is a, c, g, or t
  misc_feature (777)..(777): n is a, c, g, or t
  misc_feature (804)..(804): n is a, c, g, or t
  misc_feature (851)..(851): n is a, c, g, or t
  misc_feature (860)..(860): n is a, c, g, or t
  misc_feature (867)..(867): n is a, c, g, or t
  misc_feature (869)..(869): n is a, c, g, or t
  misc_feature (880)..(880): n is a, c, g, or t
  misc_feature (895)..(895): n is a, c, g, or t
  misc_feature (898)..(898): n is a, c, g, or t
  misc_feature (907)..(907): n is a, c, g, or t
  misc_feature (934)..(934): n is a, c, g, or t
  misc_feature (937)..(937): n is a, c, g, or t
  misc_feature (947)..(947): n is a, c, g, or t
  misc_feature (971)..(971): n is a, c, g, or t
  misc_feature (1005)..(1005): n is a, c, g, or t
  misc_feature (1026)..(1027): n is a, c, g, or t
  misc_feature (1038)..(1038): n is a, c, g, or t
  misc_feature (1063)..(1063): n is a, c, g, or t
agcggagggcgaccgcacgatggcggcgcganagnggnantgnnggggtgctgcgcactggtcggggccggcggcggaggctgaccccctaggacgcttcacgtgtcccgtgtgcttagaggtgtacgagaagccggtacaggtgncctgcggacacgtctnntgctctgcatgcctgcaggaatgtctgaagccgaagangcctgtctgtggggtgtgtcgcagcgctctggcacctggcgntccnaggccgtggaagcncgagcggncaggatcgagagncacagannacttcttgccatgnnctgccgntaagaactttcttccntgatccaagnatccggttcccaccgttggccnacnntgttnccnaaanaccagaatttaacantcaatggaangggtgttgaacgggccacccacttatagggantgncactcctctctcangcacanagagaaatgntntccacaaaccgnttaacaacctgtatccctgtgttncctntaacgtggtnccctgaagaaagagaaccttgtgaatcangggaaagaganctntgttgtgaaacancttggcaaaaatataatatcncaataagacaacgggaataacccaaaaatnctcggtggggttttggtcccgaataattgntgtccctncgaattgccccctgggggtggagnaacccccaaaactnacccgccagncggcccaaaacttttcaggaggaagncaacaatncncaaggcggcgcggggcaacncgggtttttnttctttaattgaaacaactttttttgntgggaatttaatggaatggtttggaattgaaaagaagggaacaatgnaattgaaanttcacgngntggtttggcanggcgcctccccaatncanttccgaacncaaggttgaaggcaagaaggttcccgntgnctttggctanttcttggttcttcaatggtttaanaagagggctttccaatttaacaataatttaaaancggtgaaaaattctaatggannctccctggtanccctttaaccctgttttcaaacagnaaccctgaaaaaaatggaggccaatgggcaatttgggg

SEQ ID NO: 532588 - DNA, 1839 bp, Homo sapiens
gtaagactagctgaggacctgaggatacagaagaaaaatactcccagtcaactagaagaggctctgaagactttgagtacaaggagctcatttcagaagaggtatcctgaggatcgtgattacagaaaatatggacacacatcacaaagacctaaagacgtggagaggtatgaaagcagagagcctgccaggaacccaaagtggaagcctgagcattccctcccaccttaccaagaggacacagaccagtggaaccttgggccccaaacttatcgacatgctgagagggaacacccagagaccagttcagcaaccaaagtatcctatgactatcgtcacaaacgtcctaagctcttggatggggaccaggacttttctgatgggagaactcagaagtactgtaaggaagaagatagaaaatatagttttcaaaaaggccctctaaatagagagttagattgttttaatactggaagagggagagagactcaagatggacaagtcaaagaaccttttaaaccgtctaagaaagacagcattgcctgtacttattcaaataaaaatgatgttgatttgcgatctagtaatgacaaatggaaggaaaaaataaagaaagaaggggattgtagaaaagagagcaattcttccagtaaccaacttgataaaagtcaaaaacttcctgatgtgaaaccctcgcctatcaatcttaggaagaaatcacttacagttaaagtagatgtgaagaaaacagtagatacattcagggttgcttctagctattccacagagagacagatgtcacatgatttggttgctgttggcaggaaaagtgagaactttcatccagtgtttgaacatcttgactcaactcagaatactgaaaacaaacctacaggagaatttgctcaggaaatcataacaataatccatcaagttaaagcaaattattttccatcacctggcattactttacatgagcgtttctcaacaatgcaagatatacacaaggcagatgtaaatgaaattccattgaattcagatccagaaatacacaggagaatagatatgtctttggccgagcttcagagtaaacaagctgtgatctatgaatcggaacagactctgatcaaaataatagatccaaatgacctacgacatgacattgaaagaaggcgaaaagaacggttacagaatgaagatgagcacatttttcacatagctagtgctgcagagagggatgatcagaattccagtttttcaaagaattatactacgcagagaaaagacataattactcacaaaccatttgaggttgagggaaaccaccgaaacacaagagtaagaccttttaagagcaactttagaggtggcagatgccagcccaattataaatcaggcctggtacagaagagcttgtacattcaggctaagtatcagcgtttacggttcactggcccaaggggatttatcactcataagttcagagaaagattaatgagaaaaaagaaggttagttgaattaaaatgatctaaaaatgtttagtgacttttaaacttctagattatctatgttcattagataaattggtttctcatttaattttaagaaacaacctgggtttttaaatgttcttgttgcatgatagttgaataagatcttcagggagtaatggtaatacagttgtgaggctgtgtaaccttaaaatgcttttaggcattatgccttgaatactttgcatatgttagctgtttgaacttttgactttagaatttctgttgtatggttaatctttgaaatggatgtatacttaatcagcggaatgtattgtactcagtcac

SEQ ID NO: 532589 - DNA, 614 bp, Homo sapiens
  misc_feature (32)..(32): n is a, c, g, or t
  misc_feature (35)..(35): n is a, c, g, or t
  misc_feature (38)..(38): n is a, c, g, or t
  misc_feature (40)..(40): n is a, c, g, or t
  misc_feature (43)..(44): n is a, c, g, or t
  misc_feature (146)..(146): n is a, c, g, or t
  misc_feature (162)..(163): n is a, c, g, or t
  misc_feature (201)..(201): n is a, c, g, or t
  misc_feature (243)..(243): n is a, c, g, or t
  misc_feature (247)..(247): n is a, c, g, or t
  misc_feature (261)..(261): n is a, c, g, or t
  misc_feature (269)..(269): n is a, c, g, or t
  misc_feature (282)..(282): n is a, c, g, or t
  misc_feature (289)..(290): n is a, c, g, or t
  misc_feature (304)..(305): n is a, c, g, or t
  misc_feature (312)..(312): n is a, c, g, or t
  misc_feature (328)..(328): n is a, c, g, or t
  misc_feature (338)..(338): n is a, c, g, or t
  misc_feature (360)..(360): n is a, c, g, or t
  misc_feature (363)..(364): n is a, c, g, or t
  misc_feature (369)..(369): n is a, c, g, or t
  misc_feature (372)..(372): n is a, c, g, or t
  misc_feature (376)..(376): n is a, c, g, or t
agcggagggcgaccgcacgatggcggcgcganagnggnantgnnggggtgctgcgcactggtcggggccggcggcggaggctgaccccctaggacgcttcacgtgtcccgtgtgcttagaggtgtacgagaagccggtacaggtgncctgcggacacgtctnntgctctgcatgcctgcaggaatgtctgaagccgaagangcctgtctgtggggtgtgtcgcagcgctctggcacctggcgntccnaggccgtggaagcncgagcggncaggatcgagagncacagannacttcttgccatgnnctgccgntaagaactttcttccntgatccaagnatccggttcccaccgttggccnacnntgttnccnaaanaccagaattactatcatgcgaatggggtgacaggccagcattgagggatggcggttctcgtgtcgagccagaggaaagtggtgaccggaccggtgtacacctttgccttggtccttactgtcctgagaagaagctgtggatcaggaaggagctgctggaaccactgcaacattgattccatagtcacggcataccaaattctgggggtttggtccgaatatgatgcctcgaatgccct

SEQ ID NO: 532590 - DNA, 347 bp, Homo sapiens
tgcagtaatcgatggcaccggggatggcagacagtgccagcccggagttgaggcacaccatgtggccattcttcagctccagcataccccgcaggaaggccttggtggtccaaaactggcccaacgtggtgatgtgttgggacttactgaaggcattattatcactggccattaagctcttcccatggaccacggcggcattgttcaccacgatggtgatgttacccaccttcttccggacggccttgtccgtctggtacacctcctcccggttgcccacatcacaaatgaagaaatggcgctcattgcccatctgccggatctcctcccatcctaagaagttgccg

SEQ ID NO: 532591 - DNA, 774 bp, Homo sapiens
  misc_feature (761)..(761): n is a, c, g, or t
gtaagactagctgaggacctgaggatacagaagaaaaatactcccagtcaactagaagaggctctgaagactttgagtacaaggagctcatttcagaagaggtatcctgaggatcgtgattacagaaaatatggacacacatcacaaagacctaaagacgtggagaggtatgaaagcagagagcctgccaggaacccaaagtggaagcctgagcattccctcccaccttaccaagaggacacagaccagtggaaccttgggccccaaacttatcgacatgctgagagggaacacccagagaccagttcagcaaccaaagtatcctatgactatcgtcacaaacgtcctaagctcttggatggggaccaggacttttctgatgggagaactcagaagtactgtaaggaagaagatagaaaatatagttttcaaaaaggccctctaaatagagagttagattgttttaatactggaagagggagagagactcaagatggacaagtcaaagaaccttttaaaccgtctaagaaagacagcattgcctgtacttattcaaataaaaatgatgttgatttgcgatctagtaatgacaaatggaaggaaaaaataaagaaagaaggggattgtagaaaagagagcaattcttccagtaaccaacttgataaaagtcaaaaacttcctgatgtgaaaccctcgcctatcaatcttaggaagaaatcacttacagttaaagtagatatagaagagtgcacttttagggntcctctaggtcag

SEQ ID NO: 532592 - DNA, 346 bp, Homo sapiens
atgtgatccggctgcagatcgccgagaccttgtcctctgtctcatgatgtcatgattgttaagatgataaggccagcatggtgctcatcctgtaatcccagcacttggaggtccgaggcaggtggatcactgagccagagttgaaaccagcctggccaacatggtgaaaacctgtctctactaaaaatacaaaaattagccgagcgtggtggtgcgtgcctgtagtcccagctacttaggaggctgaggcatgagaatcacttaaacctgagaggtggaggttgcagttgagccaagatcacgacactgcactccagcctgggcaacggagactctgtctcaaaaa

SEQ ID NO: 532593 - DNA, 471 bp, Homo sapiens
gtatggcggctcaaactatactggattagtgtctactaataaattgattgaaggtgaagatcatttacttcctagacgcaggcattttatttgcagatgtgtaaagccgtcgacaactataaacatgctgaaacatgatacaacagtccttcaactgtatccattgcttaaaactcccagagttcaggaaaacaataaatcacaggtggaccagattcaatatgagaaaatgtctgtggagttggagaatacagtctttcgggggcagagggggctggcttgccctttttactattatgtacactactactacgttaagataacaagccttgggttttatgtttcttaaaactatcttctaaaatataaccgtaaaacagagttaaaaagataccttaagagaagcataagaaattcgccatttggggaggccagtctcgtggggcccgactccgccaggggatcctctaa

SEQ ID NO: 532594 - DNA, 194 bp, Homo sapiens
aggtgactctcaggttagctctcacacaccccgctctgtagtaccgcgctctccaaccaccccggcgatctccacccaccccggcctcctgagtagttaggactacaggtgcatatcacaaagcctggctatgatttttaaattttttatggagatggggtctctctgtgtcgcccaggttggtctggaactcc

SEQ ID NO: 532595 - DNA, 686 bp, Homo sapiens
ggacaaaactagtctcgcagttatgatccggcgccacaagacatcatcttcacggcacgccaatgagtccacacacggtgtcgaactgccagcgcctcgtcgagggcatcctcacagcggcctcctgagggaggcagcggctgtacaatggatgaccaactcttggatagataggtgctcaagacactgggccgatgtgtggcttcaccagtcaaacaggacggccacaggccccagcacagtgggggctggcttccgggcatgatgatcagcttttgaggccctgtgcatcgagccggtttccagcctctggcagagctgccgatgtgatgatatgcgccccatggacgtccgggaagcacgtgtccaactgaacaaggcgtggcgagttgagatccccaagaaggccccattttgccgcaagtaaaccgagattggggagtcgtgaataaaaaccctccatgggggatataacaaagggccctttttataacgcctcctgcgaacacgttggcgctatcagtagcccatgcggacttatgaagacgcggacgcaatctttcattaaggcccctttaggagcggagcttctttggtgcaaaagcgagtgatgtccttcagaaaattgtgggatcacacccccttataaaaattcgaaatattgggaaacgcgcgtttttagaaac

SEQ ID NO: 532596 - DNA, 441 bp, Homo sapiens
tgatttagaggatcctgaagtggcggttggtgtgactatgcgatcggaatgccgttgtgtgtagcgtatgatgtggtgggacatatggggagggaactggaatggaagcattgagggtcagagctgtggggtaggggtgtctgaatcctcctgttgtgattgggtacactggttgagcttgcttgtggtactaatcatcctagcggactgggggactttgtcctccggtgccacggcgctacgtgggtacatccggggactactactctggacggtgtgcggacggcccgtgggattcctgttttggggtctccgtcgccggcctcctgtttctgtttcatgacgctcaaaaccgtcaaccacatgtacgggtcagcttcgcgcctcacggtacgccctagtggcccaagggggccatcttcgagggtaccggggctcgac

SEQ ID NO: 532597 - DNA, 403 bp, Homo sapiens
cgccgggggaatgacagcgagaacggacaactcgtcggcgggaggaaggttccacgcataaaacaaacaaaaaaacaataggggggctatcagaagaaaaagcgggggacgagaggacaaaaccatggcatcaagaaccctcaggctattataactctttactcgtgtgaccccgcgtcttcagtcccgtactcgtccgtgtgtttctttactttttaatcccaaaaatccttctaattgctaatgtgccaacagaggaaccacattgttttatagctgataagaacccgtctgttttcgaaaacatctgtctgcaacgtattactcatgtattctcaaagtcatatttatcacactagtcttctttgactgtattcaacaaaaggcagtttcatcgccttac

SEQ ID NO: 532598 - DNA, 784 bp, Homo sapiens
tatttcattctgggacggggcttagattgataagattacatggaccgtggctgacaattaacacagcgctatgccgggacagccccagcagagcagcagtggtggcccgcgacgcagacagtgcggggcaccctgagtcctacctgcccgaggagtacatcaagacgggaaggctggctgtaggacacggacaccttcagactataaggggtaggtagtagctaagagacctatggctaggtacagaagggctagtagaagatcgcacggtagccaggaaccaagtatactagaacagacctaggtaggcaagaggaggctgaagagaggctaggaagtaggcttatagagaagcacccagagacacactagcaagcaggtactagagctagcagatagcctagggctagctacccatacgccatagcagatctacagagaagcacctaggaccccaggcccgggccctgaaccacctagaagctgggcctagggcctagggccacgctaggcctgcatagctgcctgcaccgccgggccaaaaggaggcctcctatgacccaggtagtacgacgaggctagagcaagctagcaggcagtggtaggcgggggtgcccgggcattcggaggccgccagctagcatcccccttaccccgcaggagaactcctacgtagtccagcactaggcagagcccacagtggggctgctccatggcagcccctaggagcgcatcaggagccagtgccaggcagaaagcgttggagaaggcccaccagccgtga

SEQ ID NO: 532599 - DNA, 196 bp, Homo sapiens
ctcccggactaagcccttcacctccgcaacaataagtgtaacacagtacaccgtggacaggatcaccgacagctgcaagggtcagcactaggaacaccttgcggatgaaggcctgtcggtatgctctatgtcatccctagttgggtggcagggcaagtcctgtgttgtcatacgtaggatagggggacccatcctc

SEQ ID NO: 532600 - DNA, 202 bp, Homo sapiens
tgtagtccggtctcgttttgaacttagggattcaagcaatccgccagcctcagcgtcccaaagtgctggaatacaagtgtgagctaccaccactggcagttaagaattttaacaatttgtcaatgaaacaagaatctcaattagagtctttatatacaatctgtactgttggaattttcaaataaatattgtaaagaaaatt

SEQ ID NO: 532601 - DNA, 159 bp, Homo sapiens
aaaaaaaaaaaaacccggtcgggttaaacgggggatccagtccccccggcgctttgttaacgttgggcccccctttggcaaaaaaaagggcccccatccccccttttaagttttttgtaattttggctttttttaataaaaaaccccctttgttccgta

SEQ ID NO: 532602 - DNA, 221 bp, Homo sapiens
aagccatgacctgtgctcacacaatggccccatgcgaggcccctacacatggactgcctggagagacacgaacatatgacaggaacacactggacatgatacagaatgaggccagacacacccatgcctgatgacctcccaagcagcgaccccatggacagatggggcagaacagaaggtgtatacacttgtgcagacaacacagggctggacgcccacac

SEQ ID NO: 532603 - DNA, 245 bp, Homo sapiens
tcgggcgtgcacttacacatgctctgaatgtgttcctaggagtctacccaccaataaattctgaactcctcctatgggagggattagtaaggagagaggcgacatgtttcacacaggtacagacattaatatgaccataaggaaatattatgaatagctttatgcccacaaattcaaaaacatggatgaaatgggcaaattccttaaaagatgcaaactttcagaaacggaaaagagtaaacaaa

SEQ ID NO: 532604 - DNA, 629 bp, Homo sapiens
  misc_feature (219)..(219): n is a, c, g, or t
  misc_feature (386)..(386): n is a, c, g, or t
  misc_feature (463)..(464): n is a, c, g, or t
  misc_feature (487)..(487): n is a, c, g, or t
cgcgggacgcagatggtccgagtcacaagtaaagaatgtctggtggtcttggcatgagagattcatgtcataaggaatcactaacaccttgactccagatcatggcttgaaacacactggaatgggattttgcataaaagaagaaagctcaggaatgataaatttacacaccatggatctagaagggagtctataaccccagaatcaccattattttgntgatccatatggctatcaattaaagtgctacctgagtgctgttcaacttcttgagatggtgaaaaaggatgaaaggagacatagcaatcttcaactccctcctttacttttgaataagaggtgatgaaggcaggtcagagagatctgggtcaaatctcatgatttantgctattaacctggccaaatatttaaaaaaaaaaaaaaaaaaccccccctttttttttttttttgggggttgtgggnnttccccttgggggtttttttttntacttagcaatataaagacactggtcatacccaccactcagaatttcaatcagaactaaatgaaataatatatgcaaagtgcttaatatagtacacctggcatggagtggtaactcaataaatagatcttttgttataaaaa

SEQ ID NO: 532605 - DNA, 930 bp, Homo sapiens
agcgtgctctgtcctacttctgacttgacttgtggtgtgaccatgttcattataatctcaaaggagaaaaacaaccttgtaaaagcaagcaaaaatgaccaacagcaaaaacaaggtcttattccgagcattccagtaactttatggtgtatgtacttagctgtactataagtagttggttggtatgagatggtgtaaaaagggccaaagataaaaggttatcatttgtagtgactcctgtttgtgtctagtgaaagtagtgtgtttatttcttttctggactgtgttgatgtatgtggtgaaataatgtaagtccaataatagaacaggaatttctatttggactgaggtggttctaacgaaattagagaaaaatgagagatgagattaagaaggcattcttagaagcagtagttcagagccactggatggaatctgtaatccaggtgccctacaaaggctagaacactacaggggatgaattcttcaaataggagaccgatggatctgtggtcctttgggactcatcaaagccttggtttagcatttgtcagttttatcttcagaaattctctgcgattaagaagatatttattaaaggtggtccttcctacctctgtgatgtgtgtcgctgcacacagcttagaagctgctataaaaaagggagagagctcccaaattgaaatcagcgtgtaataatttaacccatttgctattacaagcaagggcaggggcagcaggttgcagagaactattggcatggcttatggtgatcagcaccaacgaaggttcggtaaacctaagtgccggttttacaccaaaaaaaaaaagggcggggagaaaaaaaaaccaggggcccaaacgcacacgggtctttaaaggggccccagggcgataacagcgggcgatacacggggggaagacgggttg

SEQ ID NO: 532606 - DNA, 496 bp, Homo sapiens
acagcagaagagcagctgcaaaggagctagtctgggccccaggagtagagacagaaagaagtgcacgtctgctcctctctctacaaggccagcaccaagccctgacccatggcatgctgatgccacgtatgacaccctcatccatggacaagcccagagctccaaaagaaagtccaagggactgatgccctccaccctgagatttcatctttccaatcttttcttatcagatacgtgatttctccactcttgtagaaaagacagggacaaggtgaagggaaggatagaagcttccttttgaataattccaggaggtagagggtgtggtgatgaaaaatttatattctttggactaataaaaatattagattagaaaacaagggccaggagtagtggctcatgactgtaatcccagcactttgggaggcagaggcgggtagatcccttgagcccaggagtccaagaccagcctgggcaatatggcgtgacccccatc

SEQ ID NO: 532607 - DNA, 798 bp, Homo sapiens
  misc_feature (504)..(504): n is a, c, g, or t
tgcccaaatattaatgtatttagcactgataaaaccaaatggcttatttctctccagattggcccttattctcctactggaattctggattatccaagttagaattctcatcttttcccttgtatttgaaggtggaaaacctgagctggtaaggcccattcccaatctagcagtcccaatctaggagttaggcatgcacttgataacacttcttggtccatcttcccaagaaagagcaatagaaggattgaaattagcagcccacaaggcttggccctcttcttgggtgccggttccttctcatgcttcatcagttcatcgcactgtccaaacaatagtactggctttatagcatcctggaaaatcacaaaggtaacccagacccttaaaccttgagtacttaacatttccatctccgcgtatcacaggaacataaatgtgatcatgtccaagtcaaacttgctcttctttctgtgctgtctgtttcaataaataggtatacanacacccaattactccagagtagcatctttgaatgattccttttcgcttaacccctgctatatccaagctgtctccaaatacattgagttccttctcccaagtattacatgaacacctttcctctatctttgccatcaccttagtcaaatccactgtaaactttcactggaaagctacagtactttctactttatctctttgcattaaatctcatcctcctctcatcattctgtagctaatggggccctgttaaaaagtaaagtctgagcattctccttaatgtcttaaattcca

SEQ ID NO: 532608 - DNA, 122 bp, Homo sapiens
gtgcaggcacaccggtcttccagctggctatcgctgtgtgccagtggtgtcggcattggcttaggcctgggtggaggaagcagctactcctatggcagtggtcttgtgtgttgcagtgtgtt

SEQ ID NO: 532609 - DNA, 205 bp, Homo sapiens
  misc_feature (22)..(22): n is a, c, g, or t
ggggggggggggttttaaaccncccccccccaaggggggggcccggaaaaagggccccctttccccctaaaccccccgttggtttaacccccaagggtttattggggcagggggggtttccttttaaatgggaaccccccccccttttggttccccccccccgacgggtttttaaaaaaacccaaaaaggggggtttcctcccca

SEQ ID NO: 532610 - DNA, 285 bp, Homo sapiens
ttaaagccccccccttttttaaaaatgggggcccgggattccccctaggggggggattaaaagggccgaaacccgccttttcccaaaaaagggtttttctgttaaaggtttaaaaatttttcccctaattttggggagaaaaaggggttcggaaaaattattttgggccccctttgggcccccccctgaaaaaaccgggataaagggtttttgggcccgggtctcccctgttaaggggggccgaaaaggttttttttagggtgggtttaaatttcttttaaatta

SEQ ID NO: 532611 - DNA, 110 bp, Homo sapiens
gtgatcacacgctaacgtctgccctgttctgtatggtgagccgcacacaagccaccaccgcctgccgccttctgcgcaatgcaaccgcctgcaaaaaaagggcgtgcgct

SEQ ID NO: 532612 - DNA, 937 bp, Homo sapiens
gggagctcgctgccgaggggacgctgggctgagtcgtgccggcggcgcggagcccggcggcgagcggcagcggggtccgggtccggagacgccacatgagacggtttaagcggaagcatcattactgccattgactgccagacatttggctcggagtcacttggctgtgacccagcccattcggtcaaagatggacaaacagagatccgaaccatggtcatctatcctcaaaccgagcaacaacaacagcaggcgagtaggggtccagggcaagtccaaagcatgcaatcctctgcagttcattcctcagcaggcaagcagccggtgcacccaatgaccatggccaaacagcaattctgtatggccagagacagactgtacaggactcatgagggtgaccatgatcttatcctgcagagagcagctgatgcactgcctcagagaaggcagtgccagcggccgaggcatcaccacgaggtctgcacaccgaacacatccaggaacgcgagtctactggatcactctgacggacagagacataaccaaggcataccgggaccagaccaggtggagactggagtatacactaagaaaagcatcccaacggcaacccaactaagaaactaggtggcccaatgcaaacaagggaccaagcgagacaggccaacgccaagaaaggcagcaggacaaacacgatactagagaaacatcaagcgaagtacagggatgacacagcgacccaagaccgcatagagagaacggtggaaaccctggatccacagttccttgactaccctactattgagggcgatacttgggaaacgttgaccctgcccaaggcaggcaatgagcgcacctttgaaagcctgacataaagatgtcctgaaggtcagtggattgcattccatccggaggcagacctttacagagaactgac

SEQ ID NO: 532613 - DNA, 942 bp, Homo sapiens
tattagtgactcacccctcccctgcagggtgttgcctcctcatgtgtccctctttatctccccttgtacacaaccccttgtggcccatatttttttaaaagctcctcatcaacccgtaaaattttcgcactcgctttcatataataaatttccggcttcatcatcccttaatccctccataagctcttattaacccgaattctctgcaaccaatagaagcccattgtcaacctaaaatgtctgcctattttggtgaaacccccactgccaacgttcgtcatgcatcgtccaccccacaatatctggcgcctcgtgaaagtatatctctcccaactgttgcccccgcaagcttccccctccttcgaatataaataaaagggggagaacccaaaacaggagactaatccactttcttttccccccctccaaaaaattttcatatctatctagttcccccatttaagtgtaacaatttgccccttcatagaacagaccctacattcaacctctctttcagtcgcactccaatatatattttatgcacatatcttcatccctggtaaaccccttgtgtatacaagtagatacgttgaatcccagtgtcaataatgaaactatgatcaatgttgctccgggatggcaccccgaccacctctcgggataggcttcccgcttctcggggaataaatcacgatgcccaaagcggcttgattccctcgagaggggacgcatggatcaatactcatgtttgatagccccatcctcgtatcttcttaacaactgacgtgagtctgcccgcccctcctttaaaagtggctataataggattgttgtctttcgaaacaggtgctcaccttcttttggagatgatcgcattgtttgtagggcgcaagtaactttccccattcgacaaacaaaataacccctccaacaaacataaca

SEQ ID NO: 532614 - DNA, 1059 bp, Homo sapiens
  misc_feature (733)..(733): n is a, c, g, or t
gaggcattgaggcagccagcgcaggggcttctgctgatgggcgcaggcggatcttgaggaaaccgacagaataagttgtttctctctttgatcagataagacgattaggtacaagctacttataacaagagtatagtcaagtaggttacctagagaatatgggcttatgcgttaagttgttaaacgtacatttgtagagtagcttaatgaattgttaacgatgagaattatgcaacgcaccttagacagcagctgaggcactgacgcgcaacggaccccagcactagcccgaggttctcctaggaaaccactgcaacggcagggttgcagcatgcaagcctttccttcattgcgcacgataacacatacattcgctactttttaagcacccgaacatacttgcacgacgcacatacgggaacttaacaggaagggcctccggaaaagttcaaatgaactctaaattagacagagggtgtggcccagatgtgagctttctttaaagggattctgacagagacttcgccacaggcgttggagaagctttgaaaagaatcgaggtcttttcaaacaggtgtttaaggtctttgaaacgagaggttatggttaaggagctggattgtcaacaaaattccaagttttgggaccatgggctgcaactgccttttgttttaacagtagcacatggcaaggcactttttcaaaactccgcggaaagagcggctcgcactcntaatcgaacacagggaacaccctttttggcgacaataggttctcccatttggcacgtggccaatgggggtaaggaaatacttgtggtctgggttccaactcttttaagaagaaggtcgcattaaaagggttgaacaacggggacgaactttttaagcgtgtaacagaagcgggccaaggaacgcgggacaaacacacgtgtggggcaatagcgggacatgttctaacattttagggggcgaagggatgtgggattgacacagcggaactttggacatataggacacaaatttttccgggggaaaggaaaacagcgacatacacaga

SEQ ID NO: 532615 - DNA, 700 bp, Homo sapiens
ggtatatacctaggagtgggatttctggatcacatggtagctcaatttttagtttcttgaggaacctccaaactgttctccctagtagttgtactaatttacattcccaccaacagtatacaagggttctcctttctccccatcctcaccagcacctatctaacttttggataaaagccattttaactagggtgagataatatctcattgtagttctgattggcatttctctgatgatcagtgatgatgagcaccttttcatacgcctgtctgccatgtgtatgttttcctttgagaaaggtctgtttagaacttttgcccatcttttgatcagattattagatttttttttcaacagagttgtttgagctacttatatattctggttattaatctcttatcagataggaggtttgcaaatattttctcccattctgtgggttgtctcctcacattgttgtttggttcctttgctgtacagaagttttttaacttgatgtgatcccatttgtccatttttgctttggtttcctgtgctcaaaaaatattttcccaaactaatgtccttgggagttttaccattgctttcttttagtggtttcacaggttgagggccttgattaagtctttaatccattttgaattgatttctgcctatggcaaagatagaatgccacctataggctagtttcattctttt

SEQ ID NO: 532616 - DNA, 402 bp, Homo sapiens
  misc_feature (41)..(41): n is a, c, g, or t
  misc_feature (69)..(69): n is a, c, g, or t
  misc_feature (76)..(76): n is a, c, g, or t
  misc_feature (91)..(91): n is a, c, g, or t
  misc_feature (154)..(154): n is a, c, g, or t
  misc_feature (157)..(157): n is a, c, g, or t
  misc_feature (166)..(166): n is a, c, g, or t
  misc_feature (168)..(168): n is a, c, g, or t
  misc_feature (172)..(172): n is a, c, g, or t
  misc_feature (179)..(179): n is a, c, g, or t
  misc_feature (183)..(183): n is a, c, g, or t
  misc_feature (226)..(226): n is a, c, g, or t
  misc_feature (244)..(244): n is a, c, g, or t
  misc_feature (255)..(255): n is a, c, g, or t
  misc_feature (276)..(276): n is a, c, g, or t
  misc_feature (294)..(294): n is a, c, g, or t
  misc_feature (300)..(300): n is a, c, g, or t
  misc_feature (304)..(304): n is a, c, g, or t
  misc_feature (316)..(316): n is a, c, g, or t
  misc_feature (318)..(318): n is a, c, g, or t
  misc_feature (322)..(322): n is a, c, g, or t
  misc_feature (334)..(334): n is a, c, g, or t
  misc_feature (366)..(366): n is a, c, g, or t
aagaccccatacggccacaatccagggagcagcacaatgcnagaactgaagacctcctacgagtggtantggggcnttcccacgaagaggnctggggaggatctcgggcctccgtctgccctccctcctcgatggggggcctgctcccgctctnacngggagcgcnantgcnctatggntctntccacggggaactcccaaagacaggacactatgcaggatatgnacaaaatgaatacccccnctctcctcccncccgggctgcgcccccccgcntctccccctcctccgacnccctcncctncccctgccccgncncccnccggcctcctcnagcccccccctcccctcgcccctggccacccncgcgctctcccccccccctccctcctcccaaccacg

SEQ ID NO: 532617 - DNA, 823 bp, Homo sapiens
gagacataatttagtctattgcacttgccaagttgcctcttatgctactgtgtgaatagaaagtaagataatatgtttgaaggtgtttccaaaactgggaagtgatatacaaatgtgaaggggtcatttttatttattcaggtctttttagttgatgtcatctagtagtgttaaaagagagctttcctatttcttaaacaatttgtattgagtgtaataagaacttggaagagaaagaggttttatttctagtctaacacattatatctatatataaataaagtatatatgagaagaaaacaattgtctcttttaagataatattattgttattgtactgtcttaagttacctctgggaaaagaacaatatatccaaataaaagacctagaaggagacagtaatcttccctaggtttgcatttgtttactctatttttccccaggactgtcttctatagaatttaccaagaattctctgttaggcaacatcatgccatttggagctattacagtctctgactgctacctttgtcttgcagggtgaaagttaagagcatttctaagtctgatttactgcattctgtgtaatcttatggcgatgcatcgtgttccggtcactggcgcaccactgtcaacacgtcgataacaattatcatgcacagccactgcatctagacaaatagcatgcagctctgtaattcactgtgactttctgactcctgcttgctacctggtatctggccattctcctgagcttcaattaaggaactgctgccaacccattaggaaccatgcaacaccggacaaatgcatgcgactatg

SEQ ID NO: 532618 - DNA, 190 bp, Homo sapiens
ctgcagagattcttctgcggtgccagcccgatataaaccctcacagctaccggaggaaggagggaggatgcgctgtggggttgtttttgccataagcgaactttgtgcctgtcctagaagtgaaggattgttcagtccaagaaactgacgttatttgatttatttaaatggctaagttttcttttttccc

SEQ ID NO: 532619 - DNA, 256 bp, Homo sapiens
gttgtccgcatcaccctctgtaacaccatacgatcgagaacggtaccattaccataccaagcagtaatgcagccagtcaagatgctctcgatggaacagctgtagaactttttgagagtttgagggcccatgccaaaccttctcaacctcctgagagagaaaaggggcggtcgcgacttcttcacaactgtgtgcgtgtgtaccattttaagtcctttgtgatttggacaccgaggtcgacgcggccgcgaattta

SEQ ID NO: 532620 - DNA, 322 bp, Homo sapiens
cacaatctctgatcactcgcagacctctgcgttcccgggttcaagtgattctcctgcctcgccctcccaagtagctgggatatgcaggtgcccaccatcatgcccagctaattttttgtgcttttagtggaaatggggttttaccatgttggccaggctggtcacaaactcctgacctcaggtgatccacccacctcaaccttccaaagtgctgggatcacaggtgggagccactgtgcctggccagttatttccctttagagcacaatggatctcgagcaaggagaggacagcgattctcgtacgaacggttacgattctg

SEQ ID NO: 532621 - DNA, 451 bp, Homo sapiens
agcggagaccgagtactgaccccagtgtctttccacctcctcctgcagcagtggctgctggagcagcaaattagcagctggcaacttgcaggctgcaccccgggacaagtccccagggatggtgctacagccgaagaggggtggctatgagagccaccggaagcgggtgtagtgtatgggaaggcgggcagacgcagcttggagaccatgctggatggacccgtgagacaaaacactatcgcagagcagagcattacgaagaaaaaacacacaaaagatagaaagatgagaagacaacatcagaaggacaggaagagaacaccaagagaagagaaaacaagaaccagagaagcaagaagaaaacgaaaaggaggcaggacagaaagacaaaagaagaaaaatgaaaaacaaagcagccaaagaaacgataacacgaaagaagacaaagaag

SEQ ID NO: 532622 - DNA, 663 bp, Homo sapiens
cacgcagccgcaggccgggaccttgggacgcagctggggagtcaggaaacgcgcgcagccagcccttcccgcctctcggactctccggaccgtctggcccgtcctccccatcgccctcctactctcccctccctgactccttcgctttttcccgttcctcctcctctcccggaccccgggtgccataaccatgtccgcgggggagattcgcgggaatcccgactgagaataacttcaacgttcggctgtacgacgcggaggagcagagccgtcatggaagcacggtcttctcgatttacgacgggttccacgtggtacagactcatgcgttcggaacatagctacaatacctaaagcaactccatttgcggacttgactttccttagtcaagacaaaccagtgttagctatggcattggacctctgcagcagggtcgcgacctttgacgacggccttcttgggagaacaagcaagcatgaggtacaccgcgacggagggagtctccctggcaaaagacaccctagaaatacgctcgcaaaggctaagccaagttcatggggggaccttcccagcagcgcttcggacgtagctagggatggcgttaggttacaggacgattcgaccaaaaatcgatcaaacatccccgttacccaaacaggaac

SEQ ID NO: 532623 - DNA, 331 bp, Homo sapiens
gcctgtttgggactttgaaaaaatctgattttattttctcaatcaaaatgaagctcttcatgttaatttagactgtttagctttccactgatttctcaagatactttccagatattaacagtcctcagaactgtgtaaaagttaacccccaaaaccatgttttaatgaaaaagtttaaatgtaagactaatgtcttggggactttactaaatgtttttctaaaaaaaacccttttcaaatgttaaagtttttggggaatttttatttttaaaaattttttaaatttttttaaattttttttggaaaaatttttaaacttggcccaattttg

SEQ ID NO: 532624 - DNA, 761 bp, Homo sapiens
agcgttgagtattgaacaccacatccaaggtgcagatctctgaataatatctgatcataatgtgggcaagttagaaattaatgacaagaaaaggcagaaacatgggagacaggtgaagatttcttaaacagaatataaaaagcactagatacaaaggaagagacaagtgattaatcggattttcatcaaaagacactgacttagtactgcttaggctgccataagcacaatactatagactctggtggcttaaacaaaagaaatgtattttctcacggttctggaagctgggattacaggcatgagcccgcgcacctggccctgtcactgaccattctacagctggtgatcgaggatgtgcacgcaagcctgggaactgatgacaaatgcatgagcacaaacctctctcgcgaacaactagccggcaaattcccttaaaactgaactgtaggcactgactgcccatgacccagcaccttataggtccctggaggcgatagcggacggcagtcgaaataataatcaacgaatcacacgtgaactaccccagtcatcatgaaacgacacggaaaacgacacggcaaccgcggagaatccaacgcgatcggaacccaccacaaccggacacgagaagcaactaaagcacacaacgcagaccacacacaaggaacaatggcaacccaccaatggacccagaccaaaccccccgcaaccacacagcaacaaacccgcaagccgaagcaccaccaaagaacaaccac

SEQ ID NO: 532625 - DNA, 1101 bp, Homo sapiens
tctggggggaaaaaaaaaaaagacgccccccacaaaacacgaggcgcgcgggcggggagcaaaaaaaaaagaggggggccgcaccaccaaacaaaaaaaaaacgagggggggcggcgccataataaaaactctcccgggggggggcccacacatcggcactgacacccaccgattatgtagaaaaagagagcgcgcgccaaaaagagaggaggaagggatataaataaacacacacagagggcggagcggcagagagtgaaaacaacacaacgagggcgacggggaggagaaaaaaaataacaaggaggggagagcaactgtgtggaggaagaagagaacacacaacactgggaggaggaggagagagaaaaatcgaggagagaagaaacaccaaaccaagaaaaaatacaacaaactcacgaaagaatagaactctcttcgcttctcccgacgggggcgacgagaggcggagcacacaaaacaagcgaagcaaatagtggagagcgagaagagaagagagacagcggaggagcacgagaaaaagaagaaaaaaaaaaaaacaatcacgcagggcgccccccaccatccagacacacaacaggcacaaaacaaaaaaaaaaaaagaaaaaaagaaagaaagtgaaagagaaaaggtaagaaaaagaatgaaaagaaaaaagaaaaaggaagtagagaaaagaaggagaaagggagaaatagaaggaagcgaaaataaaggagaagaggaagagaaaaacatagaaagaatagaaaaaaacagaaggggaaaaaacgaagaagaaaagcaagaaagaaaaaagaacacaagaagaaagaagcagaaaaggaagatagacgagaagaaaacgagaaagggagaggagaacagacacggcaaaagaaaagagaagggagcgaaaaggacagaagagaaaatacaaaggagaagcaagagagagaaaaagagaaagaggaggcaggaacaaaggagggagcaagggaaaaagagaagaaaaaaacaaaagcgagagaaagacaaaagaacaagtaaaaaggaaacagcaaggaaaggaagaggagagaagaaggagaggaagaaa

SEQ ID NO: 532626 - DNA, 390 bp, Homo sapiens
  misc_feature (319)..(319): n is a, c, g, or t
  misc_feature (327)..(327): n is a, c, g, or t
  misc_feature (383)..(383): n is a, c, g, or t
tttaaatgggacaagaattgctcactcggggagctcggtttttggagacgtgagctggccgatgctcccaggtgaataaagccctttccttctacaaattgttgtctgaggggttctagtctgtggctcatcctgctgcaacttcatccatcaagttaagaacagaatgtctgtcacaggccatgcatcctgactctcagtgttccttacccaaccataagttttctcaggtactttctccagcagttaatgctgttacttgagctgaaagaataaatgcctgatgtactgtaggaatttaatccagcacagggttttngatgattncccttaaagccgacccaaataggctcatgatggcaagggttgcttaaggcactgcntttaacc

SEQ ID NO: 532627 - DNA, 412 bp, Homo sapiens
  misc_feature (279)..(279): n is a, c, g, or t
  misc_feature (318)..(318): n is a, c, g, or t
  misc_feature (321)..(321): n is a, c, g, or t
  misc_feature (328)..(328): n is a, c, g, or t
  misc_feature (333)..(333): n is a, c, g, or t
  misc_feature (335)..(335): n is a, c, g, or t
  misc_feature (339)..(339): n is a, c, g, or t
  misc_feature (342)..(342): n is a, c, g, or t
  misc_feature (345)..(345): n is a, c, g, or t
  misc_feature (350)..(350): n is a, c, g, or t
cacagagtcgagtagcgtcaggcgaacacaagcaaacgtctcaggagggtctcctaccctcgtatgtaccgcggacgctgcgctcaaggaaaccttccgctagagggtcatccacctttctgtataaattataccagcgtcaagtgacatagataagaacttggcacacttcaaatcagagcagtgattctctcttctctccccttttccttcagagtgaatcatccagactcctcatggataggtcgggtgttaaagttgttttgattatgtaccttntgatagatccacataaaaagaaatgtgaagttttctttnacnatctttncattnancaancanagnccttngttggaagccggtttgggagaacccatttctaatttgaatgaaatgaaatctattttcagtg

SEQ ID NO: 532628 - DNA, 850 bp, Homo sapiens
acactcccttataagcaatctatagtgcctgatgatctgaggtgagacgaagtaccatgccaaagacacagtcgtacactgtgcccgctgcgttctgtggaataatcgtctaccacaagaagcagtcgctggtgccataccaggttgccgactgctgctcaataagataatcagcagattgctcatcagaaagactagaggtccatgaaggtcagtgggccaatatagttgaaagtagtaaattattaggtatattatctacattctgttgcaagtaacgtcaatggtaacatgaaggggagtagcatggaattaatcaattattttgggcaggtatggccatttttgcacggaatatcggttcttccttatccatgaacatgggatgtggtaccactttgtttgtatcctctcctattcccgttggtgcagtggttcagtacgtttctcccttgaagaggtccttcacatcccttgtaatttggtattcctagggtactttcattatcttagatagcaatttgtgaaatgggagtgcaactcatcatttggctctctgaagtctgaaattggtgtataccgaactgcttggtgatttctttggtaccatagattttgtgattcctcgaaaacttgtgccgaactttgctgtactcatgacgtaaaggagtatattgggggctcgaggaatgatggcgggaaggctgaaatataccattcatagttaatcctgcaacccatgaaaaccaattatgacttccctcttagtcctatttgaatatgccttctttctttcctgctggcctggtggccccggaccgggaatttccatacttttttgagagaacga

SEQ ID NO: 532629 - DNA, 414 bp, Homo sapiens
gcacggaacagggctgatgacagcaccgaggtagagagggaactagcttgcatccttcatgtcagccgaggtgtagatgatagatcacagtgttgggtgataagcaggaggtaaatgagtatagtatgttgtctgcacaggagggctatatgttctgggccataaagaaaggcagaactatagcttatctgcttcttcttttagtatatatgttctggaccatgaagaaaggcagacctgtagcttacttgctttccccttgtcctgccagcctgactccttttccctaattaggactccacaatagctctgacttcacttcaccttctacctaaagcctgtaatcaaaaggaagcaaggtctgatgatagcactccagcatatgtttttctgtggttattgcttgttccgctg

SEQ ID NO: 532630 - DNA, 838 bp, Homo sapiens
aactaagttatactttaagatgtctttaaacagccattgcagatacataaaactgtggaactgctcgtgtattcgtgatagtggatagtgcttgtggccaacttaaccagaattaacagtagaggcagcatcatacataaatctctaaagattatgtgtgatcgattaagacttaagataagttacaagaagaaattcacagatcatatgacaaaagacatgttcatggcaagagacaaagacatattctaagtagattaagtaattacagatgtgtcaagactatacagttctaggatttatgatgtagtcattaagttcatcaaatactataatgaaatatgtaatttaacttcaacataatatttagaaattatatccatatattcaacaagtaattattaagtgtatttatgtgccagataccattctaggtgcctgggatgcatcagtgaacagaatacatctagtgctgcatgagggagcttcttattagtgaaggcggacattagacacagatgtatacaatgagtcattgaacaagataatgcaggcagagatggcttctagtgaaagacctaaactcagggtgatgagagggaacagtgaccgagagacagctttaggtggatggctaaagtgaggcttggacgaacatgataattcatgtgtgacctgattgactgaggataaatgtagaagagtcagaggctgaggattacaggccaggaatagcctgtgtgctatgtttgtgggacattagccagaatatgaaagcgtgttaacacaattggatcttcagaaatggatgaaggcatagcctgaggaaaagaagaaa

SEQ ID NO: 532631 - DNA, 1207 bp, Homo sapiens
aggtgccgacgaagtctcacaacataatccccctggaagcgtgaccatgtacaatggatgacacgtagctgtcagttgaagattgattacacttgctggcgttactaagtgggtgacatatgtgagagagcgaagaatgaattaacgaagattttcgacgacaagtaaaaggaattccgccttcagcttgcgatttcgtaaatttgaggctaagtctcaaagaacgatcatattgtatggaataatagtgtggatctggagaggacctggtcgcacttcctattgacaggcgttcttggagggaaccaattacagttgcaggtccgaccgggcggcggcccaaagttaggcgcaaaggttgcaagcagtagcgtgcgcttagaccttgttgtcctgtaagagaggagtccctggggttcaatggacttcagggtggctaagcgacatttccttctgcacaaattaatcaaaaaagcggcctgcggacgcgaataacacggtggaggacggatttcttcgagagaataacatacggatgagttgggaaggtaaacttgtatgattaccatttgagctagggtagtccttacttcggaggcaacggaagtttgccaaaaagcaaaagggatgcagtagggctcttacgattggatataccaccgcgttggtgtgggaaatttgggtaagcatttaacagggaagcttgttgcatccagaaacgctggcattctaatcgaactggaccagggatggggacagaaccaacaaatttgcatatgtacaacaattccaaataatcccgccgttcctttccaccaattggggcaagacgggaaccgaaggctggaaaggacacaactcctaggttacttgtaccagggaacctttcgatcagataacttgtggaggggaagcgtcctggggacgctggtgacgcatctcccattgtaccaggtgtttaaccaatgccgcggaccaatctgacttaaaaatggcttccaccgccagcaagaagaaacaaacataaaacgagacaagacaaagacacattgctgaggacccacgggcgccacgagagaaaggataaaaaacgcacaccaagtgaagagggcagggggaacacatggagggaacggagaagcggggacaagaggggaaccaaagaacacaggggacaagagcaacggggtgggaacaacgcaaaaaa

SEQ ID NO: 532632 - DNA, 379 bp, Homo sapiens
cattggactgtaaatctaaagacaggggttaggcctctttttaccaccaaaaaaaaaaaaaaaaaaaaaaaaaaaaaaaaattttggggcccccgggcacccgcgaaaagactgtctaaaaacattctgggtggggcggcgcggcgggcccacgaaaggtgattaggtggaacaggggcccctaggcggcgtcccccgaagggaaaaccggggccacagagacaacaggtggcggggttttccaccccaaaataaaaaaagcgccgcgggggaaaagcaggagcggtctctggcaaacaaatccaaaaggggaacgttccggaaggaacaaacgggggctctcaaacacaagagaggtccaagggagacaccggaaata

SEQ ID NO: 532633 - DNA, 235 bp, Homo sapiens
  misc_feature (45)..(45): n is a, c, g, or t
  misc_feature (112)..(112): n is a, c, g, or t
  misc_feature (174)..(174): n is a, c, g, or t
cggcgggaaatcggctgtgggagagaggctaggctctgaaggagngaatccggcgggtatcagagccatcagaaccgccaccatgacggtgggcaagagcagcaagatgctnagcatattgattacaggatgaggtgcatcctgcaggacgggccggatcttcattggcacctncaagctttttgacaagcacatgaattttgatcctctgtgactgtgaatgaattcagaaaga

SEQ ID NO: 532634 - DNA, 722 bp, Homo sapiens
  misc_feature (36)..(36): n is a, c, g, or t
  misc_feature (71)..(71): n is a, c, g, or t
  misc_feature (115)..(115): n is a, c, g, or t
  misc_feature (139)..(139): n is a, c, g, or t
  misc_feature (144)..(144): n is a, c, g, or t
  misc_feature (154)..(154): n is a, c, g, or t
  misc_feature (165)..(165): n is a, c, g, or t
  misc_feature (167)..(167): n is a, c, g, or t
  misc_feature (170)..(170): n is a, c, g, or t
  misc_feature (185)..(185): n is a, c, g, or t
  misc_feature (192)..(192): n is a, c, g, or t
  misc_feature (194)..(194): n is a, c, g, or t
  misc_feature (200)..(200): n is a, c, g, or t
  misc_feature (214)..(214): n is a, c, g, or t
  misc_feature (226)..(226): n is a, c, g, or t
  misc_feature (239)..(239): n is a, c, g, or t
  misc_feature (241)..(241): n is a, c, g, or t
  misc_feature (246)..(246): n is a, c, g, or t
  misc_feature (481)..(481): n is a, c, g, or t
  misc_feature (517)..(517): n is a, c, g, or t
  misc_feature (533)..(533): n is a, c, g, or t
  misc_feature (567)..(567): n is a, c, g, or t
  misc_feature (693)..(693): n is a, c, g, or t
cggtgggtgggaggggggttccacgtggagcgcggngtgctatagagagccggccgttctccaggggtganctggggaggcttctgcggttcttgtgagttccggcgatggcgcnagttccccagctaaccccctccanagctncccccggatnctcagacaagnanggngcttgggagttactngaggctntnacgggntcgccctcggtgtnggcaagtgagtnctctgtggccaanangtcanagtcgtccctgaggctgagtcgaacacagacccgtggccctcataaaattaaacataaaagcacaaaaatggcgcaaccagacagcattggcttcagacaggcaggacacggggcccctcgtgtgacctgttactttccacaaagtggcaaggtcctggcactgacttccggccagttgagaaggctgttccgcccacccggccatgactcagacccagaggctgatagcacatnacggggccgcaggcagcatgcccccgggctctcgtnaaacacttcatatggnaaaaatcctaaggaacagaatcctgaatggaganaacctcatacttttttaaaaaagaaggaagtgtatgaggggaatctacggggtgggttttctttaagaggtgagatcttggaatcttgcaagcactgggagtggactccggcggcggcgcagacgngagcagtggagcgtcctcgggccacctgc

SEQ ID NO: 532635 - DNA, 353 bp, Homo sapiens
gtagcctgaagcctgacgtgtactcctacgctccattacgatgctggacttccagaaccatggtagccttcagtgagatttccatcttggctggtcactccctgactgaagctgtaggtgaatgtgttgttatgtgtgtgtgtctggctttagcgtcacatgggaaataacagtgtaaggaggacactttaaaccctttgggtggagtctcgtaattctgcagactattttcaagcgacctggtccacccaggattagtgaccaggatttcaggaaaggattagcttctgtctagagaatgtctgaacggattgtaccttctgatgaggctgcatgtatactattttgtcttt

SEQ ID NO: 532636 - DNA, 523 bp, Homo sapiens
acggtccaccgacggggtgggaagggtgttaaaaagaacaaacaggccaggcgcagtggctcacacctgtaatcccgagcactttgggaggccgaggcgggtggatcacgaggtcaggagttcaagaccagcctggttaacatggtgaaaccccatctctactaaaaatacaaaaattagccgggcttggtggtggtcgtctctaatcccgctcctcggaaggctgaggcagataattgctcgaacctgggaggcggaggttgcagtgagccactgcactccagcctgggcaacagagcgagactccgtcttaaaaaaaaaaaaaagacaaacaaaccaagtagggggatatcattaaccaatggaggacgggctccctgggtccccggccagggcctgcagggaaacgtaagggccaggtaccttttaaacaaagccaagtcatcagggccctcccggtgtcagagacgctagagttcgtcaaggaagccgggttacctatgggcaccgcctagggaagtga

SEQ ID NO: 532637 - DNA, 243 bp, Homo sapiens
  misc_feature (34)..(34): n is a, c, g, or t
  misc_feature (65)..(65): n is a, c, g, or t
aggtgcagattcatgaacagcagctggatctgangcatcagtctgcatcttagggatcgctcttnctcacacacgaatctgacattgctctcttcttgcttacaatgcctaggtcgccactgcctgctgcagagaaaacacactcctttgcttagcccacaatatctatttcacttgacccctggccacctctccaaactaactggcttacttcctagtcctacttgtggctgcaatcacact

SEQ ID NO: 532638 - DNA, 564 bp, Homo sapiens
ttctcatggacagtgacacattctgtctagcttgagagactaagctctgattattattttgttttatcttgcccaaattcctttctaaggggtctggggagtcatgccctacaaaccataaattctcatcagatgagttttatttaaccctgtataacgtgacttactttccagtctgactcaggcataacaaggaagaaaatcaaaatgttttaccctaaaatatatttctttgccataccttggaactgtcctgcaaagtctcttgtgggaaaaacccacattctatagagaattccctttcccctttgttttccttccttcctttccagatccaggagataatcaattaagagccaggcactctttcaggtctcataagaaacattttacaacctgctatctctgaagtccgctatctgagagctctgcaaaataaaacttcgtctccacaatcctttatcttaacctgaacatttcctttgatcttaggtcttgagataaactcaactaattgtcaaccagaaaatgtttaaatttacctatagcctggaaacccctgct

SEQ ID NO: 532639 - DNA, 285 bp, Homo sapiens
tgcgagagtgttctacaggatctcctcactcactcattccttcactcatccagccacctaaaaacatttactgaccatgtactacgtgccagctcgtagtttacagccttgcggaggttttattcgtgacttcctctagattttaggcatgtgtgagacactcctaataagagagagttcaacgcctgtggcgagtagacaaaatctcacttcccagacgtcagaggagacagagacctgtacccttgaccactcgtccgagtcgtaccgtggtaccgagtctcg

SEQ ID NO: 532640 - DNA, 511 bp, Homo sapiens
ccccccatcggcaggtgtactcaggtgctgcattccttcacagctgtctgccaggatgatggcacgtggcatcgtgccatgcccagatgcaagatcaaggactgtgggcagccccgaaacctgcctaatggtgacttccgttacaccaccacaatgggagtgaacacctacaaggcccatgattgtcagattcaccaaagttgaaatgaaggaaaaaatgttaagggcagccagagagaaaagtcaggttaccctcaaagggaagcccatcagactaacagcggatctctcagcagaaaccctacaagccagaagagagtgggggcccatattcaacattcttaaagaaaagaattttcaacccagaatttcatatccagccaaactaagcttcataagtgaaggagaaataaaatactttacagacaagcaaatgctgagagattttgtcaccaccaggcctgccttaaaagagctcctgaaggaagcactaaacatggaaaggaacaac

SEQ ID NO: 532641 - DNA, 208 bp, Homo sapiens
cgcgctcggtaccccacttatgcgtgtgccacctccagcctgggttacagagcgaatccgtctcaaaaaaaaaaaaaaaaaaaaaaaaaaaaagggttggtggaatccgggggggggagcctatgggtgggtgggttgggtggggtggggaaatgggtccccctggtattgggaaaatctggggtgggtacccttgtggaaccctttt

SEQ ID NO: 532642 - DNA, 119 bp, Homo sapiens
tgtgtagtgtctagaggatccagagaaattttctgaagaggtgaattaaactgatattcaatgacaagaatgatgtggaaaatccggggaaataacattctaggcagaggtgatcttct

SEQ ID NO: 532643 - DNA, 213 bp, Homo sapiens
tacgaggcctcgtgccggcggctgcggcggcaggaaatcggggctcggtcccgccggcgcgcgaccccatccccatcccggtccctgcatagcgatccccgggcccatatatggacgcagcagagccgggactccccccatgtcctgatggcaggaataggtacattgacatctttccggagcctggacaacctcgaaatctcactggggaac

SEQ ID NO: 532644 - DNA, 472 bp, Homo sapiens
aataacaggtactagcacagcaggccagattgggagttggggacacatgacccttgtctcaggctttgggagctcttggggtatgggtagggggtcagggggacagacgttagccaagaccgaggaagcagcagcaggtacgggattccccctttccccggtgctcagtctttgcccaagccaaggccccacaggcccaggaagggggacgggtggcacgtagcttctccggggccagggcaggttaggacacgggctctcagagcctgggtctgggcccagcagggctgttcctggagaaacaggtgagctggttccacagagctcagcagccacacggctaaggggccacgggctgggcactccgaaggtgccgaagctggcgaggggaggcatcccgtactgaatgccagagcccatcctctccgggtctagctcgcctgagtcaatcttgttgaggattggcgcagag

SEQ ID NO: 532645 - DNA, 670 bp, Homo sapiens
gacacgtccatgatgattttgggacagcgatcaatgtggcttgtggatggtgtgaatttgcaggggttctctccacggaattggaccaggaaatggggactgaccatggatagtgaaaattggaaggaatgcataagatggtggttgaaagtggcctatgagagtctatccagcttaaaggatatacccactgggctattggattaagtgtggctgatcttattgagaacccatggtgaaaaatctatcccggattcatccccgggtccaccatggtaaaggggatgtatggccttgagaatgaagtcttcctgagcccttcccaagtgatcctccatgcccgggggttaacccagcggtatccgacccagagagcttaaggatgatgaggttgctcagctccagaaaagtgccagataccctgtgggacatcccagaaggaccttaaagaccctgtgactagtgagctttaggctgtaggaattttaaaactaccaatgtgattaactcgagccctttagattttcatccaaggacctggatcaccgatttgctttgatctttttccatatgtgaatttgggctcaccagaatccaagcctatgcttggtttaatgccttgccatctgagctccttggaccaatataaattaactattgttagtgtgga

SEQ ID NO: 532646 - DNA, 101 bp, Homo sapiens
cccccggggggtgattttttcaaataggggccgagggattgggggcccttggggactcaacaaaccctgggtttagcattttgccggttttattttcaaaa

SEQ ID NO: 532647 - DNA, 189 bp, Homo sapiens
tcctacgagcgcaccatgaattatatatttatcatccttattttaatagtggtatccttcccaatgttaaagaaacagatttacttattattttaggaggacccatgagtcctaataatgaggataaatggatttttgaagaacgagaattaattcgcaatttaatacagcaaaataagccaatatttg

SEQ ID NO: 532648 - DNA, 332 bp, Homo sapiens
tttttgagtctcactctgtggcccaagctgaagtgcagtggccaatctgagctcactgcaatctccacctcctgggctcaggcgatcctcctacctcagcctcccgagtacctgggactacgagcgtgtgccaccatgcccagctaatttttgtatttttagtagagatggggtttcactatgttggccaggctggtctcaaactcctggcctcaagtaatccacccgcctcggcctcccaagtgctgggattacaggcatgaccactgtgcctggccagactgaatgatttttaaaacacgaataataacttgcaaaaagggggtggtgtg

SEQ ID NO: 532649 - DNA, 306 bp, Homo sapiens
cacactcgcggcagtgtcctacatgctagctggacattggggatctgtagtttccccggtagtccccttcagtgactggtacatgatcactgagatctgcactaggaacctgtgtgaccctcaccgctacaacatcctggaggatgtggatagtctgcatggacctgtatacccggaccacctcgtccctgtggaaagacaaggcagcagatgtaaatcaacgatgagacgtgctgcacagttaccagctagtccctatgtcaccatcgtggaccacctagcgaccgccagcggactctttcatga

SEQ ID NO: 532650 - DNA, 104 bp, Homo sapiens
agatactcggacggactgacggactgacggactgacacgactgacacgactgacacgccggatccgacgcttgggacgacgggacgacacgacgcgaacgatgg

SEQ ID NO: 532651 - DNA, 112 bp, Homo sapiens
aactatcttacattctagggataaatcccacttgatcatggtgtacagttgttttaatgtgctgttgaattaattttgccttgttgccttatcttcttccaaatgtactgtt

SEQ ID NO: 532652 - DNA, 549 bp, Homo sapiens
atacgctctagacggggttcagcgtgtagccaggatggtctccatctctgattcgtgatccgccggctcggcctcccaaagtctgggattacaggcgtgagccactgcacctggctagactttaaaaaaaaaaaaaaatacggggggaaaagggatattatgtatagaaaagtctacacttctggatacaactaactaaaaaaagccggatacactaaacaaaacccaaataatgtctcccctcaaaagggggtaactggaaaagcaattcgagcaaaaatcagggagtccaattataaataagtatatcaccaaggtgaaagaggggtttaatttttcccacaaaaggttaaaagaaatacacagcagttttagaggaagaggcaaaaaataataagaaaattatatgcgagtggcaaaaggtgtgactatttcacaaactctaacatatacactacaaaagggaccagaagaatcattatcataggaagcaaggggtcatttcaaaaatcagaggagggatgatccatatttaatttaattcggtgg

SEQ ID NO: 532653 - DNA, 314 bp, Homo sapiens
ggaaaatatggtggtcgcagatgtgtataatcaccgattgccacaaaaatttttccaaattggatggagggtttaaaccacatcatgcctcgggatgacatttttcgtgtacgaggtctgcagcacttccgtggatggctcggatgtgttcacggttcccgtctacttcagggggagggaggccccggccctcaaggacttttccccccttcaacgcttttttgggagacacctagcctttttttcccccagccacaattaaccctgtggattcttttcccgggttttttgttatctttaacgccgtaatttaa

SEQ ID NO: 532654 - DNA, 1120 bp, Homo sapiens
caccttcccacgcctggctggagagtgcggcggaaagaacttccacttcgtgcaccgctcggccgacgtggagagcgtggtgagcgggaccctccgctcagccttcgagtacggtggccagaagtgttccgcctgctcgcgtctctacgtgccgcactcgctgtggccgcagatcaaagggcggctgctggaggagcacagtcggatcaaagtgggcgaccctgcagaggattttgggaccttcttctctgcagtgattgatgccaagtcctttgcccgtatcaagaagtggctggagcacgcgcgctcctcgcccagcctcaccatcctggccgggggcaagtgtgatgactccgtgggctactttgtggagccctgcatcgtggagagcaaggaccctcaggagcccatcatgaaggaggagatcttcgggcctgtactgtctgtgtacgtctacccggacgacaagtacaaggagacgctgcagctggttgacagcaccaccagctatggcctcacgggggcagtgttctcccaggataaggacgtcgtgcaggaggccacaaaggtgctgaggaatgctgccggcaacttctacatcaacgacaagtccactggctcgatagtgggccagcagccctttgggggggcccgagcctctggaaccaatgacaagccagggggcggctctgtgtggaccagtccctcactggcccattctttttttgacgcagccaatctgtgaccacgattcctcccacagatgcctcctgcttggattctgagtggtcagagatctgtaaagcatgactttcaaggatggttcttaggggactgtgaaagtgttgggtcttcctccaggatgcctgcatgggaccccacccggagctggtgtggccattccccaagtgccaatagcccatgcttccgtgggggtgctggtgccagctgggctgggtgtgggttctgtgtccttccaggatatgtgtcatttcccatgaggggccggggcaggtgttctgggtgggggctcaggtggcagtatttttacgttattttggttagcctgtgtgaggtggcaattgtatttgcttaaaatccaccctattttatccttgtt

SEQ ID NO: 532655 - DNA, 108 bp, Homo sapiens
gaggcgcgacggagagagcaacgacccccacgagaagacgaaggggaagacgcgcgagggagccgaggacaagatgaccagcggcgacagggcagtccaaccgcaaga

SEQ ID NO: 532656 - DNA, 359 bp, Homo sapiens
ggggtccagggtaaacccccccatgtttgggctcccccggggcattttttggggaggaccacccgtcaaaaagcgtttaggatccggaacccttctgtttggagggggcggcccggcaggagcgcgtttagggactaaggaaggcttggagaagcaatttgaccaagatcccatccctttttttttttttcggaaatggagggggagtctccctgtgttaccccagctagttttgaactcctggcctcaggtggctgggtgggggcacaggctggagtattcttagttctactggttctacactgtgaggtggcaatgggatttgctcagatgccacccaataaaatgcctgttactta

SEQ ID NO: 532657 - DNA, 870 bp, Homo sapiens
  misc_feature (55)..(55): n is a, c, g, or t
aaaaagttgcgcccaagtgggtgtaaaggaataatttgtctaatcctccttttgnaccctagtggtttatttcgccgcgacacttttattgcgccgcccctcatctggggggccggcaatttttctgggaccaaaaaagacaacaaccaccaccgtcgctgtgttgagaagcactgagttggccggctgttcccccctctcttatgggaagtgtctctccttgatggagacgacctcctgctgatatgcgcttcttacagaagggagttgtctcgatcacatacaatctctctctcggggggggaccgccaccagttaatgtctttatgcggaggtattctttccctcttcatggctgccacaccccccgcgcccccccttatttttggagaagcaaaattttaaaatggagtgaattttactccacgagaataatcccccttccacattcgcggtgacacaaattggtgatagtaataaatattgcgggttcatactcattaaaacaaccgtcgccacgacctcaaaatttgtgttgaaaaaataacacgtaaattcacaaaaatgatatttttatctcgcacgccacttattgagaattacaaccacactggcccacatgaatttgggagattttaaataatctgccacaaagttgcagatttatattcaaacatccacttggaataacacccttgagcaccacatcccacccctgtaatatgagaatttgtaaattaacctgtcaccacgcggtaattgaattctgcctctattgttagttttctccctccttaatttgagaaaaaggccccacacttttaaatatttttttccccaaaaaaaacaaacaattgggtaaaaaaaaaa

SEQ ID NO: 532658 - DNA, 115 bp, Homo sapiens
tccaactgcaccacgaaaaaatctccctccctattccctccttccctagccaggagacaccacacacctgagcacactacactacccacccgtacactccacagctacggagagg

SEQ ID NO: 532659 - DNA, 1243 bp, Homo sapiens
  misc_feature (36)..(36): n is a, c, g, or t
  misc_feature (75)..(75): n is a, c, g, or t
  misc_feature (78)..(78): n is a, c, g, or t
  misc_feature (281)..(281): n is a, c, g, or t
  misc_feature (986)..(986): n is a, c, g, or t
  misc_feature (1098)..(1098): n is a, c, g, or t
gacagaataaaacacacaacaaaaaataaaaaacgnttaagaaagaagaaaaaaccagaaaagttttaaaggaancantggacagcacgggagcaaaagaagaggtaaggagagggggggtttgtgtaattccgttatttctatatctatccaggagtgttgtcgcagagcagccaccgacgatttcagggacgcgagggtcgtgcgttctacgaatcatccgaattaacaaccatacgatgacgcagtgtctggcgaacccccgatacgagagcggcganccgagcacaaaaaagcaaaccgaagaaataagaagatcatattagcttcgttagcagaagcgcgacggaagcgagtgcagcccccggagatgatcatgatggtaagtataataaaatgagtataatggagcgcgggtctgtcgtatttacttgggcaggcgggccggatatcgtagccacgacacatagatcatccacccaaccgcgcccgcgcgtttatatcataggtgtgtatcgattcaaaaaaaagaaaagttagagtatacagtacaccgtctttgcgcgtcacacgcacaaaacgaccggacgtaattacaagaagttgaaaccaacacagaaatcataaacagcccaagtattatatagggaaacgcgctgcagttgttagcgatgccgcgcgcgtgcaataccgcgccgaagtacccggcgcccgctcgtgctaccacatgcccaaggttcgaatcgcgcaatttgacgcggatgtgccggcggtagttccttctgcggacgggagtaggtgaccagcggcggggtgcgacaataggagcgagagattacttataaaccgagcaatgcgcatgcgcgtctaatttatataatgcaatgataaatagacaaaactgtgattactagagtatagaagagttatatattcgagaagacggatatagcatgtcgaggcagtcggtgcgtgcaggagtatantcgcgggaacagccgcggcgtgcatacaaccggtgtaatggtgtacatcacactcgcagcaccgcccgcggttaatattaattaatccataaccgtaactcaccacagtgantacgcgtggtgccacgatagattccgacgttcctcgtagagagctgcgattctcgtatctgatcaattccgggacgtatagcgtctatgtataagatagagacgcttgctgtattaggttaggactagagaaacacataaaattg

SEQ ID NO: 532660 - DNA, 856 bp, Homo sapiens
  misc_feature (625)..(625): n is a, c, g, or t
gttgagcagaggagtgatgtaatctgacttaaccttttagaagaatcactggctcctgggaagaaaatagactgggtatgtgttatacagcaagaatagaagcaggagacttctgcaattccttttcctaattattcagctcatagaagagccattatatttttatttcagagaaacaagggagaagttgcatttcacttaactaggatattactgggccttttaaaacaccctaactgctgtttagcaaattttataagcatgattaatatgcttgtgactctagggttgtgctgttcaatacggtagccacttgcctcatatgccttttaaatgtaaaattagatgaaattaaaaatcatttccttagtcacactagccacatttcaagtgctcagtagccactggtggctagtgactggcatattgaacagcacagatatagaatatttccctgtagctagttactggacacctctgctgaagggcttgggtagggcagctcacgcatgtgaatattaatatagtataggtgatggtgcaattcttgaactgtgttttaattagtccaatctaggagaatagttttttaatggggtagggtaatctcttgactttgggcaantggggcgtgggccaattcaggtgggtacttgagaaggaaattttggccgaagatgatcaggtgttcttatgaagctacggtatgaacttcatcgaagcggactagaatggtacgggaaacggccgggggataccttaaataccgcattgctgaggtctcaggagacttatatataagccccttttaggcccccacttgcagagggaggtcaccaggtgccccaccgtccct

SEQ ID NO: 532661 - DNA, 2189 bp, Homo sapiens
caccttcccacgcctggctggagagtgcggcggaaagaacttccacttcgtgcaccgctcggccgacgtggagagcgtggtgagcgggaccctccgctcagccttcgagtacggtggccagaagtgttccgcctgctcgcgtctctacgtgccgcactcgctgtggccgcagatcaaagggcggctgctggaggagcacagtcggatcaaagtgggcgaccctgcagaggattttgggaccttcttctctgcagtgattgatgccaagtcctttgcccgtatcaagaagtggctggagcacgcgcgctcctcgcccagcctcaccatcctggccgggggcaagtgtgatgactccgtgggctactttgtggagccctgcatcgtggagagcaaggaccctcaggagcccatcatgaaggaggagatcttcgggcctgtactgtctgtgtacgtctacccggacgacaagtacaaggagacgctgcagctggttgacagcaccaccagctatggcctcacgggggcagtgttctcccaggataaggacgtcgtgcaggaggccacaaaggtgctgaggaatgctgccggcaacttctacatcaacgacaagtccactggctcgatagtgggccagcagccctttgggggggcccgagcctctggaaccaatgacaagccagggggcccacactacatcctgcgctggacgtcgccgcaggtcatcaaggagacacataagcccctgggggactggagctacgcgtacatgcagtgagcccctctcgggctccaccgtccagctgtctgtccgtccaggtggccgacctcactgcacagaccccactccagcccctccaccccttcttcatgcacagctgcctttctataatccgggcttgactcccttcttaccactgtattctggcctctcccatgcctcaggctctggtttgagatcgtgctggggaggaacatggccactaccccttatcccatcggccatgtgggaggtatgaccctggtgcctggcaggttctccctctgccctccactgggcccagtggctcagggacctggggaaaggagatggagcagctcttgggatcctttggggaaaaggaggccattctgggccccttggcaaacctcaccactcacagaggctcctggccttgatccctgcccctccaggtgtccagggtaaagtgtaactcagactgacctgtggggcacagggggcaccagctggccttgccctctctggtctgggctgtctaccttcctcactgtatctttgcccagacccacctgggccagtaggcccctgtccccagccacacaccttagatgctggcatgccttactccaggtgcctgtgtttggccgaggcctgtgtgattcccggtctgcaccacatggcggggttggggggccgctggaggccacctgccaaggcgtgggatgggatggtcctgctggtttaggccgtgattctggaaaaccttggatgggccttcgtcctatgtcagccttccctctgatcctcaggccctacctgtagagacctccactcctagagccagtctcagggtctgggatttccctgcaggagctcagccaccactgtgccatggtgacacaggccaaggcagacattggccctcccttctcccagcccccagaggcctggccttgggttcgtcagcatgggccgaggacgttgcctgtagaatcctcctctgcctgggagtggctctgtgtggaccagtccctcactggcccattctttttttgacgcagccaatctgtgaccacgattcctcccacagatgcctcctgcttggattctgagtggtcagagatctgtaaagcatgactttcaaggatggttcttaggggactgtgaaagtgttgggtcttcctccaggatgcctgcatgggaccccacccggagctggtgtggccattccccaagtgccactggcccatggatgggggtgggtgctggtgccagctgggctgggtgtgggttctgtgtccttccaggatatgtgtcatttcccatgaggggccggggcaggtggctgggtgggggcacaggctggagtattcttagttctactggttctacactgtgaggtggcaatgggatttgctcagatgccacccaataaaatgcctgttactta

SEQ ID NO: 532662 - DNA, 759 bp, Homo sapiens
gtacccacaggaggtggttagtcttccgttgccccgatgagcttcatgctcatctttggcatggaaggcgagtgccttccgcgcggcacaggggatgtccagcatcgccgatgtccaagaaacgtcgtgtgtctgggcctgatcacaaagccgggttctaactgctcccctgcaccagtccgtgtattgtaccgaattgccctcgtgtgccaagccaacggcatggaacaagaacggcagtagaagcagacatagacgatgggcctttactcccggcagctgtatgtgttggtgccatgagtgcaatgaagcggctccagaccatccagtgtcctgtttatcaggcctgcggggcctgtgtcgtggagatcgctaagaacatcatccttgagaggttgtcaaggactgttaccactacatgaccaagggcatgcacaagatggggctgaatacatatcctcccaagttactagctgcatataatgacagaatacagaaaacacacgaagacaaaagacatcacatacacagcatatgaataaaactcaaagaaagataatactaccatgtacaaaatgctaaacagcttggagacaccttctaatgaatggacaatacatatatattgaattaccaagagtgcatgattgatcaccaacaaccacccagtgaatgacataatgcataattgcgtgagaaaaggcacagaacagacaaatccagaatgaatacatgaagaacttacgagactgtatagtt

SEQ ID NO: 532663 - DNA, 796 bp, Homo sapiens
  misc_feature (41)..(41): n is a, c, g, or t
  misc_feature (87)..(87): n is a, c, g, or t
  misc_feature (98)..(98): n is a, c, g, or t
  misc_feature (113)..(113): n is a, c, g, or t
  misc_feature (115)..(115): n is a, c, g, or t
  misc_feature (118)..(118): n is a, c, g, or t
  misc_feature (130)..(130): n is a, c, g, or t
  misc_feature (162)..(162): n is a, c, g, or t
  misc_feature (179)..(179): n is a, c, g, or t
  misc_feature (189)..(189): n is a, c, g, or t
  misc_feature (195)..(195): n is a, c, g, or t
  misc_feature (210)..(210): n is a, c, g, or t
  misc_feature (227)..(227): n is a, c, g, or t
  misc_feature (234)..(234): n is a, c, g, or t
  misc_feature (248)..(248): n is a, c, g, or t
  misc_feature (251)..(251): n is a, c, g, or t
  misc_feature (258)..(258): n is a, c, g, or t
  misc_feature (264)..(264): n is a, c, g, or t
  misc_feature (325)..(326): n is a, c, g, or t
  misc_feature (345)..(345): n is a, c, g, or t
  misc_feature (353)..(353): n is a, c, g, or t
  misc_feature (364)..(364): n is a, c, g, or t
  misc_feature (370)..(370): n is a, c, g, or t
  misc_feature (401)..(401): n is a, c, g, or t
  misc_feature (431)..(431): n is a, c, g, or t
  misc_feature (446)..(446): n is a, c, g, or t
  misc_feature (469)..(469): n is a, c, g, or t
  misc_feature (489)..(489): n is a, c, g, or t
  misc_feature (517)..(517): n is a, c, g, or t
  misc_feature (524)..(524): n is a, c, g, or t
  misc_feature (544)..(544): n is a, c, g, or t
  misc_feature (556)..(556): n is a, c, g, or t
  misc_feature (561)..(561): n is a, c, g, or t
  misc_feature (567)..(567): n is a, c, g, or t
  misc_feature (575)..(575): n is a, c, g, or t
  misc_feature (586)..(586): n is a, c, g, or t
  misc_feature (598)..(598): n is a, c, g, or t
  misc_feature (604)..(604): n is a, c, g, or t
  misc_feature (631)..(632): n is a, c, g, or t
  misc_feature (651)..(651): n is a, c, g, or t
  misc_feature (731)..(731): n is a, c, g, or t
  misc_feature (736)..(736): n is a, c, g, or t
  misc_feature (742)..(742): n is a, c, g, or t
aatatagttcatattattgtttttaaaaaattttatttttntataaaaaaatataatatttaaaaataaaaaaaaaagaatccaacntgtgcataacntttggtcaatatgtncnatntataatatatanaaaaaaatacttgaaataaagtgaagttattnatgaaaaattagccatnagttttcttnttttanataggtatctaaagnctatatggacttatttntctgatntatttttggtgatnttnaagatgnttcttntgtggcagctttagctgatttttgtatttggctttgctaaagatattattagagttaaaanntatgcttctttgctgggtnggtttttnattgggatttngagttncatattttgttacctttttcgatagctaganaggttaagaaaaagtgtttttttaaaatanataccctgtggtttntaaatgctatatgaaaaaatagnctaattgtaaacaaaatttngctgttgaaaaaaaaatcaatttggatntaacagnctaagtaacagaactattgngtgttccccttnacaanactganttaatatnaggcttaaganactcttcccatnattatnttacttccctgctggcaaatttaaacnnatttatttaatcagtgttntcaggttgaatcaagtacacttttgaaatgtaaagccacaacagaaaaatacgttttaagaaaataaggcattggccagngaggnacctcntcgtctgaacaaagaccttgtctactaatactgagcaaacccacatctgggccc

SEQ ID NO: 532664 - DNA, 2503 bp, Homo sapiens
caccttcccacgcctggctggagagtgcggcggaaagaacttccacttcgtgcaccgctcggccgacgtggagagcgtggtgagcgggaccctccgctcagccttcgagtacggtggccagaagtgttccgcctgctcgcgtctctacgtgccgcactcgctgtggccgcagatcaaagggcggctgctggaggagcacagtcggatcaaagtgggcgaccctgcagaggattttgggaccttcttctctgcagtgattgatgccaagtcctttgcccgtatcaagaagtggctggagcacgcgcgctcctcgcccagcctcaccatcctggccgggggcaagtgtgatgactccgtgggctactttgtggagccctgcatcgtggagagcaaggaccctcaggagcccatcatgaaggaggagatcttcgggcctgtactgtctgtgtacgtctacccggacgacaagtacaaggagacgctgcagctggttgacagcaccaccagctatggcctcacgggggcagtgttctcccaggataaggacgtcgtgcaggaggccacaaaggtgctgaggaatgctgccggcaacttctacatcaacgacaagtccactggctcgatagtgggccagcagccctttgggggggcccgagcctctggaaccaatgacaagccagggggcccacactacatcctgcgctggacgtcgccgcaggtcatcaaggagacacataagcccctgggggactggagctacgcgtacatgcagtgagcccctctcgggctccaccgtccagctgtctgtccgtccaggtggccgacctcactgcacagaccccactccagcccctccaccccttcttcatgcacagctgcctttctataatccgggcttgactcccttcttaccactgtattctggcctctcccatgcctcaggctctggtttgagatcgtgctggggaggaacatggccactaccccttatcccatcggccatgtgggaggtatgaccctggtgcctggcaggttctccctctgccctccactgggcccagtggctcagggacctggggaaaggagatggagcagctcttgggatcctttggggaaaaggaggccattctgggccccttggcaaacctcaccactcacagaggctcctggccttgatccctgcccctccaggtgtccagggtaaagtgtaactcagactgacctgtggggcacagggggcaccagctggccttgccctctctggtctgggctgtctaccttcctcactgtatctttgcccagacccacctgggccagtaggcccctgtccccagccacacaccttagatgctggcatgccttactccaggtgcctgtgtttggccgaggcctgtgtgattcccggtctgcaccacatggcggggttggggggccgctggaggccacctgccaaggcgtgggatgggatggtcctgctggtttaggccgtgattctggaaaaccttggatgggccttcgtcctatgtcagccttccctctgatcctcaggccctacctgtagagacctccactcctagagccagtctcagggtctgggatttccctgcaggagctcagccaccactgtgccatggtgacacaggccaaggcagacattggccctcccttctcccagcccccagaggcctggccttgggttcgtcagcatgggccgaggacgttgcctgtagaatcctcctctgcctgggagtggctctgtgtggaccagtccctcactggcccattctttttttgacgcagccaatctgtgaccacgattcctcccacagatgcctcctgcttggattctgagtggtcagagatctgtaaagcatgactttcaaggatggttcttaggggactgtgaaagtgttgggtcttcctccaggatgcctgcatgggaccccacccggagctggtgtggccattccccaagtgccactggcccatggatgggggtgggtgctggtgccagctgggctgggtgtgggttctgtgtccttccaggatatgtgtcatttcccatgaggggccggggcaggtggctgggtgggggcacaggctggagtattcttagttctactggttctacactgtgaggtggcaatgggatttgctcagatgccacccaataaaatgcctgttacttaaaaaaaaaaaaaaaaaaaaaaaaaaaaaaaaaaaaaaaaaaaaaaaaaaaaaaaaaacaaaaaacaaacaacaaaaaaaaaaaaaaaaaaacaaaacagaacacacaacagagacaaaaaaagagaacagaagagaacacaacacacagacagcagggccgcgcgcggcacgagcacgcagccacgactgaagtgccactccatccacccctgcgcctgcgccggccgccgcccgacccaggccgaggtcgccggccgacggggaggcgcgctcgttccccccgcccactgaccccgccacaccactggcgcca

SEQ ID NO: 532665 - DNA, 537 bp, Homo sapiens
  misc_feature (529)..(529): n is a, c, g, or t
cgggaacctgggggattcaagcgcaggctgtcaatcattgtcactgtgcgattggtggtcatgatccttcggatgatactggctatctgtctacacaactgtataaaggccggagtcgggctgtgcatgaagcgacaaattcccactgactgtgtgatactggaagtactaggactattcactcaagccgctatgttgcactgctatacgtgagcttgaatgaggatagaatgcaagggactgcacatgttgatttctgacactgaataccctggtgttatgacaggtctagatatgagcagttagaaccattagtattgtggaaatgacatgagcattagacactatgtgatcgaacggactggaccacacccgattccacgatatgaagggtgcgcccatggtcctcttgcgcatatcatgctgtacattatagattccgtactcaaggtgtcaccatgatcttcaatcgaaaacaaatgggactatgtcgtaactagcagtggctacagcgagcgattatgagtcntattgtgg

SEQ ID NO: 532666 - DNA, 2135 bp, Homo sapiens
caccttcccacgcctggctggagagtgcggcggaaagaacttccacttcgtgcaccgctcggccgacgtggagagcgtggtgagcgggaccctccgctcagccttcgagtacggtggccagaagtgttccgcctgctcgcgtctctacgtgccgcactcgctgtggccgcagatcaaagggcggctgctggaggagcacagtcggatcaaagtgggcgaccctgcagaggattttgggaccttcttctctgcagtgattgatgccaagtcctttgcccgtatcaagaagtggctggagcacgcgcgctcctcgcccagcctcaccatcctggccgggggcaagtgtgatgactccgtgggctactttgtggagccctgcatcgtggagagcaaggaccctcaggagcccatcatgaaggaggagatcttcgggcctgtactgtctgtgtacgtctacccggacgacaagtacaaggagacgctgcagctggttgacagcaccaccagctatggcctcacgggggcagtgttctcccaggataaggacgtcgtgcaggaggccacaaaggtgctgaggaatgctgccggcaacttctacatcaacgacaagtccactggctcgatagtgggccagcagccctttgggggggcccgagcctctggaaccaatgacaagccagggggcccacactacatcctgcgctggacgtcgccgcaggtcatcaaggagacacataagcccctgggggactggagctacgcgtacatgcagtgagcccctctcgggctccaccgtccagctgtctgtccgtccaggtggccgacctcactgcacagaccccactccagcccctccaccccttcttcatgcacagctgcctttctataatccgggcttgactcccttcttaccactgtattctggcctctcccatgcctcaggctctggtttgagatcgtgctggggaggaacatggccactaccccttatcccatcggccatgtgggaggtatgaccctggtgcctggcaggttctccctctgccctccactgggcccagtggctcagggacctggggaaaggagatggagcagctcttgggatcctttggggaaaaggaggccattctgggccccttggcaaacctcaccactcacagaggctcctggccttgatccctgcccctccaggtgtccagggtaaagtgtaactcagactgacctgtggggcacagggggcaccagctggccttgccctctctggtctgggctgtctaccttcctcactgtatctttgcccagacccacctgggccagtaggcccctgtccccagccacacaccttagatgctggcatgccttactccaggtgcctgtgtttggccgaggcctgtgtgattcccggtctgcaccacatggcggggttggggggccgctggaggccacctgccaaggcgtgggatgggatggtcctgctggtttaggccgtgattctggctacctgtagagacctccactcctagagccagtctcagggtctgggatttccctgcaggagctcagccaccactgtgccatggtgacacaggccaaggcagacattggccctcccttctcccagcccccagaggcctggccttgggttcgtcagcatgggccgaggacgttgcctgtagaatcctcctctgcctgggagtggctctgtgtggaccagtccctcactggcccattctttttttgacgcagccaatctgtgaccacgattcctcccacagatgcctcctgcttggattctgagtggtcagagatctgtaaagcatgactttcaaggatggttcttaggggactgtgaaagtgttgggtcttcctccaggatgcctgcatgggaccccacccggagctggtgtggccattccccaagtgccactggcccatggatgggggtgggtgctggtgccagctgggctgggtgtgggttctgtgtccttccaggatatgtgtcatttcccatgaggggccggggcaggtggctgggtgggggcacaggctggagtattcttagttctactggttctacactgtgaggtggcaatgggatttgctcagatgccacccaataaaatgcctgttactta

SEQ ID NO: 532667 - DNA, 2476 bp, Homo sapiens
caccttcccacgcctggctggagagtgcggcggaaagaacttccacttcgtgcaccgctcggccgacgtggagagcgtggtgagcgggaccctccgctcagccttcgagtacggtggccagaagtgttccgcctgctcgcgtctctacgtgccgcactcgctgtggccgcagatcaaagggcggctgctggaggagcacagtcggatcaaagtgggcgaccctgcagaggattttgggaccttcttctctgcagtgattgatgccaagtcctttgcccgtatcaagaagtggctggagcacgcgcgctcctcgcccagcctcaccatcctggccgggggcaagtgtgatgactccgtgggctactttgtggagccctgcatcgtggagagcaaggaccctcaggagcccatcatgaaggaggagatcttcgggcctgtactgtctgtgtacgtctacccggacgacaagtacaaggagacgctgcagctggttgacagcaccaccagctatggcctcacgggggcagtgttctcccaggataaggacgtcgtgcaggaggccacaaaggtgctgaggaatgctgccggcaacttctacatcaacgacaagtccactggctcgatagtgggccagcagccctttgggggggcccgagcctctggaaccaatgacaagccagggggcccacactacatcctgcgctggacgtcgccgcaggtcatcaaggagacacataagcccctgggggactggagctacgcgtacatgcagtgagcccctctcgggctccaccgtccagctgtctgtccgtccaggtggccgacctcactgcacagaccccactccagcccctccaccccttcttcatgcacagctgcctttctataatccgggcttgactcccttcttaccactgtattctggcctctcccatgcctcaggctctggtttgagatcgtgctggggaggaacatggccactaccccttatcccatcggccatgtgggaggtatgaccctggtgcctggcaggttctccctctgccctccactgggcccagtggctcagggacctggggaaaggagatggagcagctcttgggatcctttggggaaaaggaggccattctgggccccttggcaaacctcaccactcacagaggctcctggccttgatccctgcccctccaggtgtccagggtaaagtgtaactcagactgacctgtggggcacagggggcaccagctggccttgccctctctggtctgggctgtctaccttcctcactgtatctttgcccagacccacctgggccagtaggcccctgtccccagccacacaccttagatgctggcatgccttactccaggtgcctgtgtttggccgaggcctgtgtgattcccggtctgcaccacatggcggggttggggggccgctggaggccacctgccaaggcgtgggatgggatggtcctgctggtttaggccgtgattctggaaaaccttggatgggccttcgtcctatgtcagccttccctctgatcctcaggccctacctgtagagacctccactcctagagccagtctcagggtctgggatttccctgcaggagctcagccaccactgtgccatggtgacacaggccaaggcagacattggccctcccttctcccagcccccagaggcctggccttgggttcgtcagcatgggccgaggacgttgcctgtagaatcctcctctgcctgggagtggctctgtgtggaccagtccctcactggcccattctttttttgacgcagccaatctgtgaccacgattcctcccacagatgcctcctgcttggattctgagtggtcagagatctgtaaagcatgactttcaaggatggttcttaggggactgtgaaagtgttgggtcttcctccaggatgcctgcatgggaccccacccggagctggtgtggccattccccaagtgctggtgccagctgggctgggtgtgggttctgtgtccttccaggatatgtgtcatttcccatgaggggccggggcaggtggctgggtgggggcacaggctggagtattcttagttctactggttctacactgtgaggtggcaatgggatttgctcagatgccacccaataaaatgcctgttacttaaaaaaaaaaaaaaaaaaaaaaaaaaaaaaaaaaaaaaaaaaaaaaaaaaaaaaaaaacaaaaaacaaacaacaaaaaaaaaaaaaaaaaaacaaaacagaacacacaacagagacaaaaaaagagaacagaagagaacacaacacacagacagcagggccgcgcgcggcacgagcacgcagccacgactgaagtgccactccatccacccctgcgcctgcgccggccgccgcccgacccaggccgaggtcgccggccgacggggaggcgcgctcgttccccccgcccactgaccccgccacaccactggcgcca

SEQ ID NO: 532668 - DNA, 2157 bp, Homo sapiens
caccttcccacgcctggctggagagtgcggcggaaagaacttccacttcgtgcaccgctcggccgacgtggagagcgtggtgagcgggaccctccgctcagccttcgagtacggtggccagaagtgttccgcctgctcgcgtctctacgtgccgcactcgctgtggccgcagatcaaagggcggctgctggaggagcacagtcggatcaaagtgggcgaccctgcagaggattttgggaccttcttctctgcagtgattgatgccaagtcctttgcccgtatcaagaagtggctggagcacgcgcgctcctcgcccagcctcaccatcctggccgggggcaagtgtgatgactccgtgggctactttgtggagccctgcatcgtggagagcaaggaccctcaggagcccatcatgaaggaggagatcttcgggcctgtactgtctgtgtacgtctacccggacgacaagtacaaggagacgctgcagctggttgacagcaccaccagctatggcctcacgggggcagtgttctcccaggataaggacgtcgtgcaggaggccacaaaggtgctgaggaatgctgccggcaacttctacatcaacgacaagtccactggctcgatagtgggccagcagccctttgggggggcccgagcctctggaaccaatgacaagccagggggcccacactacatcctgcgctggacgtcgccgcaggtcatcaaggagacacataagcccctgggggactggagctacgcgtacatgcagtgagcccctctcgggctccaccgtccagctgtctgtccgtccaggtggccgacctcactgcacagaccccactccagcccctccaccccttcttcatgcacagctgcctttctataatccgggcttgactcccttcttaccactgtattctggcctctcccatgcctcaggctctggtttgagatcgtgctggggaggaacatggccactaccccttatcccatcggccatgtgggaggtatgaccctggtgcctggcaggttctccctctgccctccactgggcccagtggctcagggacctggggaaaggagatggagcagctcttgggatcctttggggaaaaggaggccattctgggccccttggcaaacctcaccactcacagaggctcctggccttgatccctgcccctccaggtgtccagggtaaagtgtaactcagactgacctgtggggcacagggggcaccagctggccttgccctctctggtctgggctgtctaccttcctcactgtatctttgcccagacccacctgggccagtaggcccctgtccccagccacacaccttagatgctggcatgccttactccaggtgcctgtgtttggccgaggcctgtgtgattcccggtctgcaccacatggcggggttggggggccgctggaggccacctgccaaggcgtgggatgggatggtcctgctggtttaggccgtgattctggaaaaccttggatgggccttcgtcctatgtcagccttccctctgatcctcaggccctacctgtagagacctccactcctagagccagtctcagggtctgggatttccctgcaggagctcagccaccactgtgccatggtgacacaggccaaggcagacattggccctcccttctcccagcccccagaggcctggccttgggttcgtcagcatgggccgaggacgttgcctgtagaatcctcctctgcctgggagtggctctgtgtggaccagtccctcactggcccattctttttttgacgcagccaatctgtgaccacgattcctcccacagatgcctcctgcttggattctgagtggtcagagatctgtaaagcatgactttcaaggatggttcttaggggactgtgaaagtgttgggtcttcctccaggatgcctgcatgggaccccacccggagctggtgtggccattccccaagtgccactggcccatggatgggggtgggtgctggtgccagctgggctgggtgtgggttctgtgtccttccttgtaccgggtgattttccatgtattgctattgcttgtttctggtacttggtctgctataattatagatatgatactgtgaatacttttttaagttgtattatttataggatc

SEQ ID NO: 532669 - DNA, 705 bp, Homo sapiens
ggtcccccgggctgtaggaattcggcacgcgatgggatgttcctgctgtgttatgccgcgattctgtctacctgtagagacctccactcctagagccagtctcagggtctgggatttccctgcaggagctcagccaccactgtgccatggtgacacaggccaaggcagacattggccctcccttctcccagcccccagaggcctggccttgggttcgtcagcatgggccgaggacgttgcctgtagaatcctcctctgcctgggagtggctctgtgtggaccagtccctcactggcccattctttttttgacgcagccaatctgtgaccacgattcctcccacagatgcctcctgcttggattctgagtggtcagagatctgtaaagcatgactttcaaggatggttcttaggggactgtgaaagtgttgggtcttcctccaggatgcctgcatgggaccccacccggagctggtgtggccattccccaagtgccactggcccatggatgggggtgggtgctggtgccagctgggctgggtgtgggttctgtgtccttccaggatatgtgtcatttcccatgaggggccggggcaggtggctgggtgggggcacaggctggagtattcttagttctactggttctacactgtgaggtggcaatgggatttgctcagatgccacccaataaaatgcctgttactta

SEQ ID NO: 532670 - DNA, 1528 bp, Homo sapiens
caccttcccacgcctggctggagagtgcggcggaaagaacttccacttcgtgcaccgctcggccgacgtggagagcgtggtgagcgggaccctccgctcagccttcgagtacggtggccagaagtgttccgcctgctcgcgtctctacgtgccgcactcgctgtggccgcagatcaaagggcggctgctggaggagcacagtcggatcaaagtgggcgaccctgcagaggattttgggaccttcttctctgcagtgattgatgccaagtcctttgcccgtatcaagaagtggctggagcacgcgcgctcctcgcccagcctcaccatcctggccgggggcaagtgtgatgactccgtgggctactttgtggagccctgcatcgtggagagcaaggaccctcaggagcccatcatgaaggaggagatcttcgggcctgtactgtctgtgtacgtctacccggacgacaagtacaaggagacgctgcagctggttgacagcaccaccagctatggcctcacgggggcagtgttctcccaggataaggacgtcgtgcaggaggccacaaaggtgctgaggaatgctgccggcaacttctacatcaacgacaagtccactggctcgatagtgggccagcagccctttgggggggcccgagcctctggaaccaatgacaagccagggggcccacactacatcctgcgctggacgtcgccgcaggtcatcaaggagacacataagcccctgggggactggagctacgcgtacatgcagtgagcccctctcgggctccaccgtccagctgtctgtccgtccaggtggccgacctcactgcacagaccccactccagcccctccaccccttcttcatgcacagctgcctttctataatccgggcttgactcccttcttaccactgtattctggcctctcccatgcctcaggctctggtttgagatcgtgctggggaggaacatggccactaccccttatcccatcggccatgtgggaggtatgaccctggtgccgtgctggtgccagctgggctgggtgtgggttctgtgtccttccaggatatgtgtcatttcccatgaggggccggggcaggtggctgggtgggggcacaggctggagtattcttagttctactggttctacactgtgaggtggcaatgggatttgctcagatgccacccaataaaatgcctgttacttaaaaaaaaaaaaaaaaaaaaaaaaaaaaaaaaaaaaaaaaaaaaaaaaaaaaaaaaaacaaaaaacaaacaacaaaaaaaaaaaaaaaaaaacaaaacagaacacacaacagagacaaaaaaagagaacagaagagaacacaacacacagacagcagggccgcgcgcggcacgagcacgcagccacgactgaagtgccactccatccacccctgcgcctgcgccggccgccgcccgacccaggccgaggtcgccggccgacggggaggcgcgctcgttccccccgcccactgaccccgccacaccactggcgcca

SEQ ID NO: 532671 - DNA, 1454 bp, Homo sapiens
caccttcccacgcctggctggagagtgcggcggaaagaacttccacttcgtgcaccgctcggccgacgtggagagcgtggtgagcgggaccctccgctcagccttcgagtacggtggccagaagtgttccgcctgctcgcgtctctacgtgccgcactcgctgtggccgcagatcaaagggcggctgctggaggagcacagtcggatcaaagtgggcgaccctgcagaggattttgggaccttcttctctgcagtgattgatgccaagtcctttgcccgtatcaagaagtggctggagcacgcgcgctcctcgcccagcctcaccatcctggccgggggcaagtgtgatgactccgtgggctactttgtggagccctgcatcgtggagagcaaggaccctcaggagcccatcatgaaggaggagatcttcgggcctgtactgtctgtgtacgtctacccggacgacaagtacaaggagacgctgcagctggttgacagcaccaccagctatggcctcacgggggcagtgttctcccaggataaggacgtcgtgcaggaggccacaaaggtgctgaggaatgctgccggcaacttctacatcaacgacaagtccactggctcgatagtgggccagcagccctttgggggggcccgagcctctggaaccaatgacaagccagggggcccacactacatcctgcgctggacgtcgccgcaggtcatcaaggagacacataagcccctgggggactggagctacgcgtacatgcagtgagcccctctcgggctccaccgtccagctgtctgtccgtccaggtggccgacctcactgcacagaccccactccagcccctccaccccttcttcatgcacagctgcctttctataatccgggcttgactcccttcttaccactgtattctgggtgccactggcccatggatgggggtgggtgctggtgccagctgggctgggtgtgggttctgtgtccttccaggatatgtgtcatttcccatgaggggccggggcaggtggctgggtgggggcacaggctggagtattcttagttctactggttctacactgtgaggtggcaatgggatttgctcagatgccacccaataaaatgcctgttacttaaaaaaaaaaaaaaaaaaaaaaaaaaaaaaaaaaaaaaaaaaaaaaaaaaaaaaaaaacaaaaaacaaacaacaaaaaaaaaaaaaaaaaaacaaaacagaacacacaacagagacaaaaaaagagaacagaagagaacacaacacacagacagcagggccgcgcgcggcacgagcacgcagccacgactgaagtgccactccatccacccctgcgcctgcgccggccgccgcccgacccaggccgaggtcgccggccgacggggaggcgcgctcgttccccccgcccactgaccccgccacaccactggcgcca

SEQ ID NO: 532672 - DNA, 1359 bp, Homo sapiens
gtgatcgccatcttagggagtagatgttctcgtaccgtgcgagcacctgtgcgcgttgcgaaccccttcaagacgccacatctgcagctcggtgcacgatggtctcaggaggacctccgcagcaacatccccagtggaccacgggccaagccacctgccgcaatcgacaaccctgtgcagcctgcccgccgtgagaaagaagtaccagtttcgtgcaattttggctcccgcgcaaggtatctatgcaactagctgtggctctacgagcatagcgcgagtctataaagcatctgatggaatcctgacacacaaccaccatgcatgctgcacatatccacactgacgaatcttgacgagtagaaccttgcacagataattgccacagcttggcacaccgcaccaaagaaggtacacaacggagcaactactatacaacggcaattccttcaagctttaacacctttaacaacgacggacgggacttgggttcgcttaccgatacggggacatcacggagccgtcaaaacaagtcgactccggcggacatccagcgaacacattattaccgttctgcagccctataactcgccaaagttgacaaacgaggggcaccacctcctctgcagcaaaagatcttcatgaaccacatcactagaaactcgaaaagcacgtcattctacaacacggtcccattagcgtaaaacttcacccccacacatctactcgcccactattgactgacaccacaggccgcacgcaacactacccctacacatttcccatcccattagcacacaccaccaccccaactcgaaaccagccacaccaaataactccgcaccacactaagaacacgaatccattctgacaccccacgcactgtccctgacacacatcatctaccgcgtcatctccacacgtggccacacacatattgccacccacaacacgaccacccacaatataacctccagaacaactccctatatactataacccgatacatttcacagaaccaacatcatccccaacacaaccccccacaaacaagtccctaacgacatatctaccactcgcaccaccaacaacccacatcccttaatattgacaccgagagtcgacataatatgcacacgacaatatcccacgaccaaatcacgatatgtacgcagcaacttacatcactgaagaaatcacaggcaactatacggtctctctctacacaacacacaacacacatatctgtcatatacccacacaaccgccataaccatcgacctactagcaacctcacacccctactcttcatcactagtagtcaatattaaatctcaacgacagctaaaatttacaccgtag

SEQ ID NO: 532673 - DNA, 107 bp, Homo sapiens
tcccaaacctgtcacactttttcttttattttttttgagaaaaagttctgctcttgtaacccaggctggggtacagtgacacaatctcagctcactgcaacttctgc

SEQ ID NO: 532674 - DNA, 814 bp, Homo sapiens
gtgcagtggtataatcatggctcactgcaagactccttgaatccctgggctcaagcaatcctcaacccttagcctcccgagtagctgagactacaggcaatggaccatgcccagctaatttttttttttttaaattttggtagagacagcatcttgctatgttgcccgggctggtcttgaactcttggcctcaagcagtcctctcgatcctcccaccttggctcctaaagtgcttgagattacaggtgtgagccactgcatctggcttacttatttggtctatggtctgtccactagtatgtaaagtcttagagagcaagaatttggtaattcttctcttcctcctttcctttcttcctcttttacttcattcactactgtattccacataaaatatattggcatatagctaggtgtccacatatgttgaaggaatgaaagactttatagacttgagttgcaatataaaatgtctttttttaactgtgagtcatggcaaaaaaggtttgaaagcggtttctaaattaatgcagattgtcaggtggcttggtattgacccctcggaataaaacttgaaaatggactagtttacaacacgcaacacaccacaaaaacaaatttttgcgggcgggccgcgcacgaaaaagattttataaaacacttcgtgtggggccgcggacccagaagtgatatgaaaactgtcaacacggtccaagagaccccggcaaagtggggggttcaccaaaaaagccggcggccgggttgaccacacgaggtgggcctacggctcaaggccggatacccgcccagggtc

SEQ ID NO: 532675 - DNA, 357 bp, Homo sapiens
  misc_feature (73)..(73): n is a, c, g, or t
tgatgtctggagagttgacacttgctccaaagcaggccaacagctgtgtatgggtatggatgaaccctacgtnttagctgtttctcgctgtgaaaatgccttgaatttacctctctgggttggaagtgggaagacttcttttaaaagtcctttctaagtttaaaaatccaaaggttacgaaggtagtttttatttatctcaataagtggcctatttgcttaaagcaagtgtacctctgtatatcagcccaaagcttagggcagtgcttcttggctttagtatctgagaaaggtgcctttgggaagagtttggtcagacagaaggtagtctgaatcttaaaggtttcagatgaatgtt

SEQ ID NO: 532676 - DNA, 1463 bp, Homo sapiens
cttcgtcgtatagtagtaggccgggggagtctactccctcgcatgagtattaagtcagggccccggggcaggaatcacgtttttacagacgggaacgctgttgtacacttgggtccttcttggggggcactcattaggagaccgcttgtgcacaaaaacacaggcggtgatcgccgtgtccgggatttctcccgcgattttctttaaccaccaaaggggtctgcacaatcgcttatttaaataataggtataatccccctgtcccctgtagcccccctaaaaaggggggcctctctacagcgccttcccttaatggagcccctcccggcgccgaaggacacaaatcgggggtagtatgcacccgctgctaccccggtgcgcgctagtaaacgtcgtcgccgtcaaaaacattagggggccctcagctgtataccgccgatagccacccccgccgtcgcgccaagaatgatggcgccaaagggagcgggcgccgcagaaatgtgtgaaaccacccgggcggatagggcacacaattatcccaaagggcacacacacgaacaaacaagcacaaccacgtgggtccccccaaaaaaagggccctctcttccgtaatatccggcggggaattatactcccctctagttgtgaattttaccccctcccacgaaaagattgtgtattttgttgtttttcaccacacgcgagattgttttcttgtaggccccgcctgtttgtagacccacacgtgctcactagaccttaatagctccctttatctcccccccccacattatatagagagagggcgacacacgtgggcgccccacacacacacagggcgatattctaccctccccctgcggattaaaatctccccccttatagagagagttccctcacacgctccgtaaagaacacacacatcccgcgatatgtaacgctctgccacatcacacgagagagatatatacacacactcaccctcgagaggctcacacacacaataggtgttaaagatatgaggaaacacacacctcggagaacaccacacaaatagatgtcacaagccacacggcgtctactaaacacacattttatactgtggtgttcttatatgtttacacccctcctcaacacaagccctcacagagagtatctcttcggagagatctctcccctctacgcacacatggtctcgagcgggcgacatttatcgggcgtcacaacacattttgttgtgagccccacagggttcccacggagcattcacagtgctatgttattggcgtcaacatttcctccaatatagtgcgtgtcatacccgcccaactaataatattccacatttacacatacgccaaacaatccactttggggttcgaaacccccccctgatactggcattttgataaaagtggtttgaatatttttgataagtttccatctaattgatgagggtctta

SEQ ID NO: 532677 - DNA, 685 bp, Homo sapiens
  misc_feature (239)..(239): n is a, c, g, or t
  misc_feature (302)..(302): n is a, c, g, or t
  misc_feature (304)..(304): n is a, c, g, or t
  misc_feature (315)..(315): n is a, c, g, or t
  misc_feature (317)..(317): n is a, c, g, or t
  misc_feature (394)..(394): n is a, c, g, or t
ttcaatatcatatattttaaaggtgactcacagttggagcaagaatgaaagaaccacgaacttcaaggtaaaacgggcaacggcgtggggcaagcctctctgcatctgcgtgtccagcctctcctgcatgccagaagtccccaggcaggagtgtggtgggacatccggctggggtaaggacaggcaccctcccactgtgtcagggcccagagagtggatggagaagctctgcaagaganctgcacaagggcgccttgtaggagcctgcagtccccacaggggtgttgtggataacacttggngngccctggcctntnggggtcacggagggcttggctctcacctcagagctgcagaagagccacttctacatcaggacctcagaagctggaangggatggcggcgaggggcctcttgtggggtcacagagatgggtctcagagatggccgtgtggaaggttggattctcaccccactctgcccctagatgtctggtgacctcccctctgtagtccttgtatttggaaaaacagttatgactccgtgcataactgggtactttgctatgtatcgtgttaactcttttacgcggtgtctcccctggtaaggtttacgaagaagggtctaagtgggtggggttctcagaggcatcgcaagttacagaagaaggcccggactaccggc

SEQ ID NO: 532678 - DNA, 497 bp, Homo sapiens
tctaggactaagacaatttactggccttatgagatgagatgagacacacccttacaccattttgtcattgaagaatatctaatgactatattattggtttgccattggattaaattccagaattcttatgaaaaataaagcaagaggcttctcagaaatttctctactctgagaggtctttcttctgtgcatttcttgggttgacactgaatctgtgccagaatttcatcaccacctagcactgccaagcactctaccttctgaagcagtttcagggtcgtgacggggtcaaaggcaatgaccccatgagtaccagactctggtagtttgactggctaaaactagtcacagggacctgggccatcctcttactgtatgggaagcttacctaagttaagcctcagtccttgaaactgtcagacctggctctgagatagcaacatttacacaaagaaaggaaagtttgaaggctgagcatgagcactcctctcctggta

SEQ ID NO: 532679 - DNA, 876 bp, Homo sapiens
gatccgagtggtgtctgaccgctggtcctctctatgtgaacagccagactgcctgtctccttgccggcatctgatcttgcccggagaagtacccccctccaagcgaactttaggacctgggagccctggcccgtgtctgctctgagtaaacagtgcctttgagagtctttaccaagataagagtttcctttctgtcacatccgcatccagacccaggtgtataacgagctgtatacaagcgagtgacgactaactgtgtttgtgggggcccctcacgggcagcgggaagactattcgtgcaagagattgggcatcctgcgaatgcatgttgcagagctcggaggggcgctgtgtgtacgtcacccccatggaggccctggcagagcaggtatacatggacttggtacgagaagtgtccatggacaggctcgacaagaaggtggtactcctgacaggcgagacacagcatctagacctgtaagctgctgggcaatagggacacagttatcatcagcacccctgagaagtgggacatactttcccggcgatggaagcagcgcaagaacgtgcagaaacatcaatctcttcgtggtggatgaggtccaccttatcgggggcgagaatgggctgtcttagaagtgatctgtcccgaatgcgctacatctcctcccagattgagcggccattcgattgtggcaatcagtcttccgtctccaatgcaaggatgtggcccactggtgggctgagtgcaccttcaactttaaattcattccaatgtgggtccgtccttggggtggaatccaggttaaatagacataaaaaccctggttccaggaatgggtcaagtgtacagatgcagaactgatgttgtaggta

SEQ ID NO: 532680 - DNA, 992 bp, Homo sapiens
  misc_feature (31)..(32): n is a, c, g, or t
  misc_feature (202)..(202): n is a, c, g, or t
  misc_feature (233)..(233): n is a, c, g, or t
  misc_feature (235)..(236): n is a, c, g, or t
  misc_feature (238)..(238): n is a, c, g, or t
  misc_feature (251)..(251): n is a, c, g, or t
  misc_feature (253)..(253): n is a, c, g, or t
  misc_feature (263)..(263): n is a, c, g, or t
  misc_feature (277)..(277): n is a, c, g, or t
  misc_feature (308)..(308): n is a, c, g, or t
  misc_feature (328)..(328): n is a, c, g, or t
  misc_feature (364)..(364): n is a, c, g, or t
  misc_feature (378)..(378): n is a, c, g, or t
  misc_feature (391)..(391): n is a, c, g, or t
  misc_feature (714)..(714): n is a, c, g, or t
  misc_feature (717)..(717): n is a, c, g, or t
  misc_feature (864)..(864): n is a, c, g, or t
  misc_feature (892)..(892): n is a, c, g, or t
  misc_feature (904)..(905): n is a, c, g, or t
  misc_feature (926)..(926): n is a, c, g, or t
  misc_feature (929)..(929): n is a, c, g, or t
  misc_feature (931)..(931): n is a, c, g, or t
  misc_feature (988)..(988): n is a, c, g, or t
tttggaaaaaaaaaaaaaaggaatcttcagnntagatcactttcttatccggactgggatattaaatatacgacacatccaggagtttattggagcgcagactgatggcgcaaaggtacgatgagctgccccattacggcgggatggacggagtaggggttcccgcttccatgtacggagaccctcacgcgccgcggccganccccccggttcaccacctgtaaccacgggcngnngnttcttactgtttntntatttatttnttttttttattttntttatctctctctaattttattgtcttggtnagtatggtgtatccgctgtnaacgagggccttgaaggcgggacaaggacgcgatcnatgggccacccgtngtttccccctgcnagctctggtctttgagaagtgcgagctggcgacctgcactccccgggaacctggagtggctggcggagacgtctgctcctccgactccttcaacgaggacatcgcggtcttcgccaagcaggttcgcgccgaaaagccactttttttcctcaaatccagagctggacaatttgatgatacaagcaatacaagtactaaggtttcatcttttggagttagaaaaggtccacgaactgtgcgataacttctgccaccgatacattagctgtttgaaggggaaaatgcccatcgacctcgtcattgatgaaagagacggcagctcnaantcagatcatgaagaactttcaggctcctccacaaatctcgctgaccataacccttcttcttggcgagaccacgatgatgcaacctcaacccactcagcaggcaccccagggccctccagtgggggccatgcttcccagagcggaganaacagcagtgagcaaggggatggtttanataacagtgtannttcacttggtacagtaatgtntgntnatccggataaggacaaaaaacgccagaagaaaagaggcattttcccaaagtagcaanaata

SEQ ID NO: 532681 - DNA, 1104 bp, Homo sapiens
agcgggctgagttgctggtactgcccgtggtcgcttggttcgaggtgtgccgtgatcttgatctccgcggagttcgatctccctggcttttgccgctcctatacgtcgctcgcccttttcgaggatcgacggatgtctgctcgcgtgggccggaatatcgtggatcgacctgggcaccacctattcgtggcgtcgcgcggatcttaccatagcaatgagccagaggatggaggatcatctgtgcaactggaccgaagggcaagtcgcatccatgcacctagtcttacggtggtccctttcgacggaacagtcagaagacaaccgtaagtagtgcgaaacgactctgcggaaagtaacccagtgttgaggctatagaaaccctcgatctaactatctatcatttcggaacggcccaagaagtgcctgaatttgggtaccggcaaatatacgtaatggtgatgctgatcaagttgtaacatttcagcaattactgcaaatccaagctgaggtacccgagttgccgcgttgatgtagaatggcagtgccgagaggaggaagcggcccacacggtgacctccaataagatgtgttgaccaacacgtgtaaaaagtgattaacctacaagggggctagcactataccacaaaaggaaattccatattatctgtactctctcgagaaagggagagaaaatacattacctatccccaatgtgggaatccccgtcaagccggcattcagagcaaattttaaacacgggtatcgcatttcggacgggtcacaatgtctcattaccacatgtgtggggggggcgctcaaaagtggtatgcctgccaagggacggtcggagtctccgaattccacccgtgagttcctctacgtggaccctggtaattctctacaataccgcacatctttcgatgtaagcccgaaccctggggagccagacgcgcaatattgcaaccgccaggggggcaacaggtcttgacgaggaggttaccttccaacgttgcgttgactatgatggccatttcctattccaaatacggaaagggcccccaacagggtttgtgtccaacccatttacgtcaacgggtgctccca

SEQ ID NO: 532682 - DNA, 185 bp, Homo sapiens
agatttaggtgtatgctgaacctgtgtttgcatcctggttctgttacacctgagtgggtgacccttaagcagattctctagatcccagttttctcttgtgtaaagtacaggtaatgatacatgtctcttccagtattggggaggaataaataagatgtgtaaggaaagaattttttcatgtacta

SEQ ID NO: 532683 - DNA, 349 bp, Homo sapiens
atgctgtctccatgtgttaagagatctgtgctgtccgctgtgtctggtggatcatgatcgatggagccctctcttagaccagacgatgatcgtggtccccggcgtggcatgcgttatgcccgtggccctagacgtggtcctgcggacgataggttctctacgtcgtgaggcagacgatgaccggccttcctggcgtaacacagatgatgacaggtctcccagacgaccttgccgattaagacgggggaaactggcgtcatgcgaaaaatgacaagaccacctaaacgagaactagataaggcacggaggaagctggcaaacagctaatgagtacagaggaccaagacgt

SEQ ID NO: 532684 - DNA, 341 bp, Homo sapiens
  misc_feature (16)..(16): n is a, c, g, or t
  misc_feature (52)..(52): n is a, c, g, or t
tatatattcggccggntgcagtggttcacacctgtaatcccagcactttggnaggccgaggcaggcggatcacctgaggtcaggagttcgagaccagtctcaacacggagaaaccccatctctaacaaaaatacaaaattagccaggcgtggtggtatatgcctgcaatcccagctactcgggaggctgaggcagaattgcttgaacgtgggaggcggaggttgcggttagcagaagactcaaaaccttccgcagaaatgcttatcggttcaagtccgatatgagccaccatttgttaaataacgccaaaattataacactaacactaaaatcaaaaaaag

SEQ ID NO: 532685 - DNA, 227 bp, Homo sapiens
accagcctcatttttcctccggtagcctttcccacctaacctttgcatcccccagcctcatgtcctgccccatccctatcctgcctgatccctggatttccctcagatccccttttttcaaacagcgccaggccggggtggggccggggttggggccgagccccccaactgcccccctcccctccctttttgtataatttaataaaaaaatggtggggcttttgtta

SEQ ID NO: 532686 - DNA, 483 bp, Homo sapiens
ctaggataggcgggttccgcgagtgtctcagctgctcctctcgagtcctgcgcatcccggtcgagagtcatcggcgtgccggtctggcaccaaatttgagcatgttccagtctgaacacgtagtcatatgagaagccctggtgatggaacagattccggaaaagctgccgcagatacgagtagtcaggctcgtcgtcaaaacgccaggaacggcagaaattcaggtatgtggcaaattcggaagggtaagcctttagacaatacgtatctgatgggagtggatcatatacttctcgctaatcctttcgtattgctgtctcttggtgcgagccttcaccccctgtcaggggagatagcccaggttgaattacattagcacgttgcccagagcactccaagtcatctcttcgggattggccaattccaaggtgccgtgtagatagaggcgtccgagcagttcccgtaaggttcttgtactcacga

SEQ ID NO: 532687 - DNA, 376 bp, Homo sapiens
ctgtagaagtttcacacctttatgtggagactgataagtaagcaacaataaggaagggtccccaggttggggacgagaccccaatgttgagaacaataatgaacaattatagtatgaacaatagttagagacagctaatcacaaacaacctgcgggcacaatgacctcattccacacgtagcaccctttagcaggaccctataaaactttcctccagcacttgcctctttgcaggtagccccttctctgctgagctgcccactgcaacatattttcacaatttctctaataaatctgcccttctttcacctacaactatctcggtcacatggctttaccacctgcaaaactgaacctaggttgtaagctacccaca

SEQ ID NO: 532688 - DNA, 191 bp, Homo sapiens
gctagaataaagcgcggcagaagaagatagaaagaacagacttgtctgattcttccatccctttatctttctcgcatactgatgcttcctgccctcaaacatcagactccaagttcttcaacttttggactcttggacttacaccagtggtttaccaggggctctcaggccttccatgacagactgaagac

SEQ ID NO: 532689 - DNA, 126 bp, Homo sapiens
ctaaaccgatgttgctgctgaagtcaagaacgactggctaaaaatcacgcgacactgatagatgcactattaaccgctgcaccagtgcgcaacaccaagaaattatgaaaacgattctctactgac

SEQ ID NO: 532690 - DNA, 257 bp, Homo sapiens
ccaaaactttttaaaaaaggttaaagggattttttttttaaaaaaagtaaaaaaccagttaggcattattttaggtaaaagcactgggtttttcccgaagcatctggccccaaatgcctttgggggtaataaggtggggaagaaacccccagttgggccagtattcgggaaggccccgcccccaatgaaatgtttaagggtttgccttttcccaggcctctgaaggtttttggatccaacccagattttgtttggca

SEQ ID NO: 532691 - DNA, 317 bp, Homo sapiens
gaggacccccggcacgagcgcagcggccgccacgaccacccattgtttcggaacggacctctcccacaggagggtgccggaaagattccacagcccctccctacgtcggcctgaggccctgctcggcctcccccagcagtgagatggacaccttggaggagttcctggaggagagcaaccgcagcttccccacccatgacactcccagttgccgggatgacctgctgagagactacttccgaaaggccagcgatcccccagccatcggaggccaaccaggaccacctgccaagaaagaaggggccaagatgcccacc

SEQ ID NO: 532692 - DNA, 953 bp, Homo sapiens
gagcagcaggcggaggcagagcacagcatcgtcgggaccagactcgtctcaggtcagtggcagccttctcaggccagacgccgaccaagggaatctcattaccgtgagaatggcaagtgatgtgcgttctgcctcctaggcatcaccgtgtgccatacgcagttaatgcgaggcttgatcttggagtgtcctgagtgatacaagctgctgtccaggagcaaagtactccaagattgtgtgccgagacccacatgtggtaatacctcttgagccaatctcaggaaggcgagtatttcttcgcatagtcctcctacaggaatgctgagttgctcggaaatgaaacccatgtgaattttaaactaaggagacccatgtcgctgggtataggtccaaggaacgccatgggcgcgtggatgctatggatgctgatgctgattgggtgacctatgtggcctcagtgggggtactccatgtgttctgcgggcggacgctgactgattgtgctgacactgatgattctcgcccagtactggtggtcgcaccattcgtgttgcagtctgatgatctggtcccgattttcccacggaccttggcagaacgaagtttcgctccggttgtccccctatgtagacggatttggcctgccgaggagatagtgtggaattggccttgtggtcactacttaagaagttcactgccaggacatgcgtacctgatggtgggcgagacgtcacatacactgcagcaggcttaatggggtatagcactcccgatgtcaggcatgaagccgaaagatggctccggaagaaacaaatgccgcgcggaccaggtgttcaccaccactgccggctcggacggttagcgccgtgatagaagagacggacagatcagagggggcaactaaaatatcaattagaaatatatgtatctttcctttgtcttcttcttctggg

SEQ ID NO: 532693 - DNA, 186 bp, Homo sapiens
gccggggaggaggtggcctgtgaacctctcctcttggccgagaagacaaagccccgccgcaaattcaaaacggctggggatgagagtcgaggaggcgagtgcgggatcagagcaaagaaggacctggggcattgcaaaagcggaaacagaattctgggtgaatgctgggctgcttagtagtcgaat

SEQ ID NO: 532694 - DNA, 777 bp, Homo sapiens
agggttacagattcacagcatctcaaggcagaagaatttttcttagtacagaacaaaatgtagtctcttatgtctacttctttctacatagacacagtaacagtctgatctctctcttttccccacaattccaagtcattaaaagttcagatgctgccaggcatggtggctcatgcctgtaatcccagcactttgggaggccgaggcgggcggatcacgaggtcaggagttcaagaccagcctggccaacatggtgaaactctgtctctactaaaaatataaaaattagctgggcgtggtggcacacgcctatagtcccagctactcgggaggctgaggcacaagaatcgcttgaacctgggaggtggaagttgcagtgagccgagatcacaccaccgcactccagcctgggtgacagagtgagattctgtctcaaaaaaaataaataaaacaaagttcagatgccgggcgcggtggctcacgcctgtaatcccagcactttgggaggccgaggcaggcggatcacgaggtcaggagatcgagaccaggtgaaaccccgcctctactaaaaatacaaggcgcggtggcgggcgcctgtagtcccagctactccggaggctgaggcaggagaatggcgtgaacccaggaggcggagcttgcaagtgagccgagattgcgccactgcactccagcctgggcaaacagagcgagactctgtctcaaaaaaacacacaacgcaagaaagaaaattcttatttccttgggccctcctacctt

SEQ ID NO: 532695 - DNA, 388 bp, Homo sapiens
  misc_feature (12)..(12): n is a, c, g, or t
  misc_feature (18)..(18): n is a, c, g, or t
  misc_feature (23)..(23): n is a, c, g, or t
  misc_feature (72)..(72): n is a, c, g, or t
  misc_feature (142)..(142): n is a, c, g, or t
  misc_feature (160)..(161): n is a, c, g, or t
  misc_feature (166)..(166): n is a, c, g, or t
  misc_feature (172)..(172): n is a, c, g, or t
  misc_feature (198)..(198): n is a, c, g, or t
  misc_feature (214)..(214): n is a, c, g, or t
  misc_feature (224)..(224): n is a, c, g, or t
  misc_feature (230)..(230): n is a, c, g, or t
  misc_feature (255)..(255): n is a, c, g, or t
  misc_feature (302)..(302): n is a, c, g, or t
  misc_feature (305)..(305): n is a, c, g, or t
  misc_feature (317)..(317): n is a, c, g, or t
  misc_feature (326)..(326): n is a, c, g, or t
  misc_feature (346)..(346): n is a, c, g, or t
  misc_feature (349)..(349): n is a, c, g, or t
  misc_feature (360)..(360): n is a, c, g, or t
  misc_feature (362)..(362): n is a, c, g, or t
gagaccatacanacagantacantgtgtatatggatgaactctcctccttcattgtggcaaagcccaacatnccatgggtgtttctcacagatcccaaattggccacggaaggttattttggcccttgtagtccctaccagnttaagctgtggggcccanngcagnggccangagccagaaatgccatactgacccantgggaccggtcgttgnaacccatgcngacacnagtggtcgggagactctagaagccntgcttctttttccattggctgaagctctttgcaattcctattctgtnaancgctgtgttccntgtggtganccaatcatcaatttctctanganttctgggtacngnctacccagacaggggctttgctattt

SEQ ID NO: 532696 - DNA, 273 bp, Homo sapiens
gatctcatgggagtacagtaccgggatggcgcccagcagttgcggcgggaacttgcgcagcagcaggcgtttgagctgtacctcgccgctgtcgcgcacctcgccgccgtaggcgacgacgatacgattggcgccgccggaggacagtgcgttgaccgccttgatcgccgcgatttccagcgcctccccttccagcgcggcatcgagcctggcgattcgttcacccaccagactggagaacagcccgcgctgctgcgggtcctgctgcatggc

SEQ ID NO: 532697 - DNA, 789 bp, Homo sapiens
tctgcacgtgcataataataataataataatcagttatgaagctaggtgcaatggttcatgcctgtaatccgaacacttttagaggccaaggcaggaggattgcttgagcccaggagtttgagaccaccctgggcaacattacaagaccctgtctctctatttaaaaaaaaaaaaaaaaatctgttaagggctttaaggcatgacttggttggctacaggaataggtttacagggtgaacgaaaaatttatttggatgatttcacttgtgaagtaaaagatagttaggtgggaataaacagctacccacttgtttcctgagaactgaaacaagtttcacacaacttcttctacttttggtaaaacctgtccgggaagccttagacaaaagcatgatgggattttcaaaaaagggggagctcttctagaaatttcaaacgtacatctgttcgcaaaactagcaacaataggtgggtccttttacagctgatccatacaatgtgaatggccctcagtggcatgccattgtagtcaacaggggttagagggccccttaattgtgaagtaaatcatgggacaaaactaccattgggccatttgggtatttctaaaccccaatgccattgttaaatatttatactcgtaacgtttacacatttgttcccatattagttggtattaaaccgtgtcacattcctactttattgataattgaaatatattttccataactacatagtttaaacacccctcatatatattagaacccccatgtttaaagagggtataa

SEQ ID NO: 532698 - DNA, 554 bp, Homo sapiens
tgtctacaggaccctattttgcatcttcccttgtggtggaggtgggagagtcttactcagtgtgagacggctgttggggtccgagcctcaacttcaaggttccccaaaggcaggagggaggcctgcgtgtgccctggccctgcagcaccggcactgacttgggaggcggggagcctgcgcacgtagtgtggggggcccagtctctacacagctgtccagctgtccttgccgattgctttaggaggttcactcatctctgtaacccttcctgtcttggacagcagtagtgcctgtgaccagtgtgtttgtgaggacgaagtggctctgtgcacacagctggcccctgagaaatgccagctgccagttctgtgtgcatccagtcgttgcacacggactggactattttctaagtggtgcttttaagaaaccaagtgtcagctgggcgctgtggctcacgcctgtagtcccagcactttgggaggccaaggcgggtggatcatgaggtcaggagatcgagaccatcctggctagcatggtgaaaccccgtctctgct

SEQ ID NO: 532699 - DNA, 370 bp, Homo sapiens
agaaattagcctgtctcttaccaacggaaaatcacatacggggaactgggatactataataaagaacaatagtgacactgtgtcaggtgagatgacggacttgtcatgtgctgtggggggtcaaatactgcagaaggccttcttcctctggaaaggtcataaagacatgtcacacttgtgtcggcacttgtgacgtgggtacgaatttactcaagtagacaatgagacgaaaggcatgccaaagcaacggactcgggcctgaactaacggtctactaagttggtggtcctctggctaagaattcgtgctgtgcctccattaagagaaacgcaggagctagtttgcctggagcacatgatttatgcatgac

SEQ ID NO: 532700 - DNA, 633 bp, Homo sapiens
atgctcttgatgcttgtagatctgatcaagcttcagatgcctttctaacttagtctatcatgtaaaatgttggtaacttgaaccacaatcattgtaccagaaagactagtcgttgaataggcataagtcacagggatatacacatgagaagatgctttattgactgtggaagagatgttatgtcctatgtagcaaatgacggttcttagaggctgggcccagtggatcatgcctgtgaatcccacgtgctcggaggatggctgtgaggtggacaagatcaatctgatggccatggaagttcgacgaccaaatctggtgcaacatgccaaaaacccatctctatccaaaaatactaaagaatttgtgccaggtgtagtggcatgcgcctataatcccagctactagggaggcatgaggttacatgtagaagattgcgccatctgcagcttcagcctgtggtcaataaagtgcgactctaaaaagaaggtttagtccagatgcagtggctcacacctataatcccaacactttgggaggctgaggcaggaggatcttttgagcccaggagtttgagaccaccctggacaacatagcaggaccctgtctatgcaaaaaaattagctgggtatagtg

SEQ ID NO: 532701 - DNA, 177 bp, Homo sapiens
aaaaaaaaaaaaaaaagagttattacttgttgaagtctcacatccccacaagggaatgatagaaacaaatattttgctggtattcatttcttcatttctattccagctgagtcttgaattcctgggctcaagcgatcctcttatctcggcttcccaaagtgctgggattacagacac

SEQ ID NO: 532702 - DNA, 768 bp, Homo sapiens
gagatttagattgtgggtcactgccaaaaccagtcagagtgaagaaggtatatagtacatgctaaaatacgggataaggagggttacacgtcaagggctgtggagaaaaagtacttattaattgtccaactgggagatgattgcacagcaaggaaaatgtagtgaaaatacccaattcaagaaagagccttgattcagaaacagtacagttacagcagggagtagaatgtcgatcattcgtacttctggtgcatatttatgattgaagcaaaatggctggaaatatattaggtatattaggtgtccatgcaattatggattagagagcctagttatttttaattagggacattaccaaaaaacatcaaaggggttgaacttatcgttctatttagtatgttattatatgtaacaaaaggaacctattttaatttcaaaatttgaacaaatgatggcaattatggaagtacagaatatcaatggtgcctgtgtgtgtagtgtaggtgtgtgtgtgtgtgtgtgtgttctgcttttgtgaggcacaacaaggaattaagtagtcaaatcatttcatccatttacaaacattacacaagagaataattccaatagtctttttccccccatttgaaactgctcgcgggctactttagatagtctaataaaattttgagagtactctgcgtgtaggaggggggccaggcagcagaggctctcaaacaggtttcaagactgggtttgacatttggggccagataaaatggtggg

SEQ ID NO: 532703 - DNA, 102 bp, Homo sapiens
gcggccgcctactactactactactgctcggaattcaagctgctaacgatgtacggggacatggaaataaacacccacgctgccctgggcccctgcaaaaaa

SEQ ID NO: 532704 - DNA, 430 bp, Homo sapiens
aattccagctcggtttccaggaccagtcttaattgataagtgttacgtgtgttctgactgctccaccaactggctgttttccagtctctctccctctgttcggcccccccatctcctaagacacaaaaatattcaagttacaccaataataaccctccagtggcctctgagtgttcaagagtaaggaggagtcgcatgtctcactttaaatcaaaagctagaaatgattgagcttagtgaggaaggcatgtcaaaatgcaagactggctgaaggctaggtctcttgtgctaaacacttagtcacattgtgaatgcaaaggtaacgttcttgaaggaaattgaaagtgctgggctgtgcgtggagactcttacctgtaactgcaacactttgccaggctaagatgggaggatcacctgaggccatgagttt

SEQ ID NO: 532705 - DNA, 1141 bp, Homo sapiens
tcggcgcatgcgcgctgaggcctgcctgaccgaccttcagcagggtctgtggctaccatgttctctcgcgcgggtgtcgctggagcgtgtcggcctggggaccttgcatgccgcaaatggacttcaacgtacgaacatatggcaactttgaagatgatatcaccgaggagactaacagtccatcaagaaacatccagaaaattaccaagtctatgaacacatggtagcggcagcaaaaatatgcccgagctgagagagagcttgaaacccagctcgaatatatggatggggatctttagctctgtattgacaaacgctgatatcaagtggggcctgaaagacaagaagaaacaccttccttatgggtgtgtcctcagatcgaggacttgtgtggtgctattcattcctccattgctaaacagatgaaaagcgaggttgctacattaacagcagctgggcacagaagtaatgcttgtgggcactgggtgacaaaattcaggaggcatacttcatagcgactcattctgaccaagttccctggtggcattcaagagaatgtgggcaagaaagccccccaattttgggagatgccgtcatgtccatttgccctttgaatttactaaattctggattatgatttgatgaaggctccatcatcctttcataaactccgggtcctgtcatcctctatataagaccagaagaagagccccaatttttgcccttaaataccggttgcaggtgctgaccggaatgagtatctagtaggcatttgaatgcggacgtgggctggacactttccacgaatcaatcggggcaacatacatcttacaagccccgtgggaggtccccactagtggacacgtgcccaatacacacttgacacgtccccaaaaggtcctgagactgtgtcactgtgctcataccacgggaaccacacggcgtacacagcagagtgaatacataggggggccgcgcaataaatgatccctccaacaaaagaaaacacccctgtatttgcccgtaggaccaccctactaagaaaaagttaatccaaggagcacgcggccggaccttctattctgctcttttactactgtcactcactgacgcctcggtcacacggcctagacgacagcgc

SEQ ID NO: 532706 - DNA, 110 bp, Homo sapiens
cagatcagcctaccttaaactctaattctacctacgcctattttacaccaacccccatagtattgtggtagtagtaagcattcaactcacggggtacgcgagactcgaca

SEQ ID NO: 532707 - DNA, 345 bp, Homo sapiens
agattttttaaaacctccataagtagtccaggggccgggtgtcacgcctgtagtcccagcactttgggaggccgaggcaggcggatcacaaggtcaacgagatcgagaccatcctggccaacatggtgaaaccctgtctgtaccaaaaatacaaaaattaattgggcatggtggtggacacctgtaatcccagctactagggaggctgaggcaggagaattgcttgaacctgggaggcggaggttgcagtgagccagtgcactccagcctgatgacagagcaagactcagtctcaaaaataaataaaaataataaaacctccataagtaatcctgaaaaaaaaaa

SEQ ID NO: 532708 - DNA, 459 bp, Homo sapiens
cccccgcttgcggcttctctcttcttccacgcatcgattcatcgatgaagaggatgcagggcatcttcgagcaagggcaataagtctcggacttggcaaaaacagaaagagagtcacctgaccagagaatattatgtattctctgaataagaaatgaaataaatcggccgggcacagtggctcatgcctgtaatcccagcactgtgggaggccgaggccggtggatcacctgaggtcaggagttcgagaccagcctgaccaacatggagaaaccccatctctactaaaaatacaaaattaggcaggcatggtggcgcgtgcctgtgatcccagctactcaggaggctgaggcagaagaatggcttgagcccaggaggtgaggttgcagtgagcctaaatcaccccactgcactccagcccagatgagagagcaagattccatctcaagacggcaagcgg

SEQ ID NO: 532709 - DNA, 816 bp, Homo sapiens
gtagtagtcccaagttctcagagatctcagtgctgatctgggacgatgcccgggagggcgaggactccaaggcagaagctggtgctggagttcaccttgcaccaagccagtgactttctgtgcgcgaatgcgccatggacaagatcgtgatcgtgctgaagaaccgcatctatgtgtactcccttccccgagcaagtccccgaacagtctgttgtgaggtttgatacctcgggacagagccacctaaggggcgcaccaggccgctcccctccatgcttcgcaccctagcggctctgtgaagcttgtgcgctgcgagttctggcagtgacgcatgctggctaggtgttgcccgggtatcccaggggtggtgggggggtctgtcgacactttgtggggatcgctgggggtgagcccgtggacgtggcccgcctcgctcctgctccattgcatccactccaacgggggcaccctttcagtcactgtggacgtagcccgctggtgatgttctgctacagagcccgtccaggcctgtgtgtttggggcgctcagggctcgccttgagcgggtagcctcgttgttgtgcagctctgggttgtgatatccttaatgcgcgagaggagaaggcttggttgagaggcgtggcgggctcaaggcacttggaccgcgtggccaatcgctcctaactgcggtgtaacctgtcgagcccactgcaatcctcgctttcctgcttgcggccttccaggttgggtcccgggttctggtcgcatagtgcttcgttctcaatggagttctccagcctcgaactcgacgctaccg

SEQ ID NO: 532710 - DNA, 247 bp, Homo sapiens
gtaaaatacaaaattagccgggtgtggtggcgggcacctgtaattcccacttactcaagaggctgatgcaggagaactgcttgaatccttggaggtagaggttggcatgagctgagattgcgccattgcactcctgcctgggcaagaagagtgaaactctatctcaaaaaataaataaagaagcctcccagggcctggatcattccaatctgcccataggccatggtgatcagccgctcattcctac

SEQ ID NO: 532711 - DNA, 1699 bp, Homo sapiens
taacaaaaaaaaaaccctttttttttttgtgtggagtaaaagatgtgttattttctcttttgtgtgtggtgtgacaaaaaatatagggaccaaaatatatgtggggacaaaaaatgtgtgttggagaaaaaaaaaaaaaaaaaaaaaaaaaaaaaaaaaaaaaaaaaaaaaaaacaaaacacacaacaaaaaaaacacaataatacaaacaataataataacaacaaacatcactacaaaatcatactaacaaactacaactatcaatcattaaacaatctatcaaatctgttcgcgtctcctcactatcatttattctctcctctctcttctgtcacacacacccctactttcaatatttctctttaacacacatactactcatctcttctaaatcaccaaactacactcacccagccttccctaaccctccacacactcatcatcacacttcctaactaccctctcatccttctccctcttccatactcccccctacttctatcctctccccacctctcacaacacctcatcaaccaccctacacctgactcaacctacctatcctacaataaactctcacccacttcctcattctatcctaaaccctaacacaacacaacataaacacacaatacctaaaaaacacaaaataatgagcagacaccactcacaacacaccataacactccaccccaaactaataacaccaaccactcaaacccctcaaccacacatactacataaatatcaaacactcctcactcttcacctcactatcacaccactccacctccaactcccaatacatcaactccaccataactccatctcctccactcatcacgccccaacccacccaacccgatccaccatccacacctcacatacaatcccgtttcccactattctcttacacccccaacaacatcaactccctctaccccactaccaccctcccacacccaccaacaaacaacactataacccaacacaaaactaatccataactcacataccgtatctacaacactcacacattcacctgaatcccacctaaacattcctattctacacactatcacccatctattctatcacgacacaccatactaattcatcatctacaacaacacactcatccactctcctccccactacccaactcactcaccactccccactcatcatcacaccactctctaaccacaatcacatccaccattaccacaccacacctcctcaacacccaatcacacccacccaaccaactcccccctacccccacaacccactcccccaacatccctaccccacatccaaccatacaccaccaccatatccatccaccaattcaccccacccactcaaacaaccatctccacctctaccacacacgtatacctcttaacaaccaacacaatcaacccaacaccacccccaactatcatccacattcaccccctactcactctcatcccactatcactccatatcatcaccacacatacactcaacatactcccaaccttcactcactctacctcacaactctcacacatcaccctcatatcatccatatcacaccctccgatcctcactccactcccctcacccctactctacacactctctacaatccaatcacatccatcttagcttacctactccaccctctcacaccgccctcccactcacc

SEQ ID NO: 532712 - DNA, 702 bp, Homo sapiens
tgtgtccctttgtcttaactgttttttcacaccctatgtatgtaaaatactgcctccccactaggtcacttataaaaactgtcaggcctctgagcccaagccaagccaccgcatcccctgtgacttgcacgtatacgcccagatggcctgaagtaactgaagaatcacaaaagaactgaaaaggccctgccccgccttaactgatgacattccaccatggtgatttgttcttggcccaccttaactgagtgattaaccctgtgaatttccttctcctggctcagcagctcccccactgagcaccttgtgacccccgcccctgcccaccagagaacaaccccctttgactgtaattttccattaccttcccaaatcctataaaacggccccaccccatctcccttcgctgactctcttttcggactcagcctgcctgcccccaggtgaaataaacagccatgttgctcacacaaagcctgtttggtgtctcttcacacggactcgagtgaactttgatgccgtggctcggatcgggggacctcccttaggagatcaagcccccgtcctcctgctctttgctccgtgagaaagatcacctatgacctcaggtctcagactgacagccaagaaaatctcacattcaaatcggtagcggctttttatctctttcaactcctatcctaactctttcttcattggggc

SEQ ID NO: 532713 - DNA, 108 bp, Homo sapiens
gtagtctagacgcccgactctgtgggcgccaattccctatagtgagcgatacacccaccatcatgcctagggtcttgttaccgagctagtggtgttactttcatggtc

SEQ ID NO: 532714 - DNA, 186 bp, Homo sapiens
  misc_feature (12)..(12): n is a, c, g, or t
  misc_feature (88)..(88): n is a, c, g, or t
tttctggggatncttgctgccttaggagattgaggaaaatttcatggagaaggagacacttaagaataggccagaatcaaatgagatncctcatttgagagaaattagacatcccttgagtgaagacatatacatggctaacaggtatatgaaaaaatgcaaagatacagagaatatttgaaaatg

SEQ ID NO: 532715 - DNA, 190 bp, Homo sapiens
cagaatattctgtggacaaattattggtgagtatcagtctatacaggacaataaagctcttaatcccccagattacttacaaagcatagcgggctctatgcttgcacaggtcgtgactcagacactgctagtggaaagctccaaatccatgacagtcaaagtctctgctccttcaggaacaggacatctt

SEQ ID NO: 532716 - DNA, 576 bp, Homo sapiens
  misc_feature (69)..(69): n is a, c, g, or t
cattagtttggtaatagtattttggaagctggatttctctaaagctgaagtgccaattaaaatatttcnataatgcttgtagaaaaaaaatcccaaaaattttgaaagaaaacttctctggtgcctaaaaattaacttggggagtttttagcttttaaaagttgcatctattatttttctctaatactttgttagagtcatggctgacacttttagaagcgactttgtatttttttgttgataaaccagccttcctggaggttagtgttttttcaaatataacaaactgtgtagggtttaggagtagtcagtgttatacttactgtttagatattttaatgtgaatctattttaatttcctttgtgttttaatttgctcatagaaacattatatgtaaaacatactcaagttcacttaaaagaactcatattttatcgacataaaatctctacttaggttttatgagaatattaaagttgtaagttatcactcactttcacgcatcctccctggactatagagcaattgaattcctcacaaaattcttgcagcaaataaagaaatactttgcaaaa

SEQ ID NO: 532717 - DNA, 143 bp, Homo sapiens
ctatgaatatgtacaaatgatatttgccaatcataagtcctgcaatcctccagaatgcatgcatatccaatacttctttcatcatccctcttccctctgtcagcgtactgtgtgcggtgtactcctcgtatcagtcttaaagt

SEQ ID NO: 532718 - DNA, 1041 bp, Homo sapiens
gttgactattctctacaaaccacggaagacgagtggaagcactatacctatgattcggcagcatgagctggagtcctaggcacagctctaagcctccttattcgagccgagctgggccacggcagggtagaccttgctaggtaacgaccacactcgtacaacgtgatcgttcacagtccatgcaatttgtaatacatcttctgtcagtagtgacatatccagtcataatcgtgaggcttgtggcaagctgactaggttacccgcatatataatcctgccccgcgatatggggtttccccgcataaacaaactataagcttctgacttctggtacgtccctctctactagtcctgctcgcatctgctatagatggaaggccggagccaggaacaggttgagactagtcatacccgtcgccgtatattcagggaagctactctcgcagccctggagcctcacggtaagaacctaacacgagtcttctccttaacaacgtagcatgtgggtcatctcgtcgtatcttaggggccatcaattgtcatcgatcaacagtgtatcaatataaataccccctgacatagttcctagtacgcaagagccccgtcttcgtgtagatccggaccataaatcacgagaggcctacttcttctatctctcccagtcctaacttgatggcgtcactattactactaacagacggaagctcaaaacaacttgtttcgactcgcggaggaaggagaccaattctatacaataacattttcgtgatggtcggtacctgaagttatatttgtatccaccaggttggaaaagtttgcatttgtacgttatactcgggggaaagacattgctccatggatggttgacagaatacggatcaaggtttcgggtgaaccccaaatagtggatggcgaacgaggattaccggataacgtgacacgcgaataattgcgcccgaactaaattgcgtggcaagattccggggcgaggccacacacaagacgtttggtgggaactgcgaaatatgcgcagactatagg

SEQ ID NO: 532719 - DNA, 431 bp, Homo sapiens
agggcagatgcacaagcccactcgagcccagcaaatggaggaggccccccaccgccaccacaaatgtctggcccagccaccaagctgcttccagctgggccagggtagccggctgaggttctcgggtgtcctcagatgctcaaaggcaaaggaaccccctgccgcctgaggctgctcctccccctgccgagggcgtgcagaggcctgagtgctgcccctgtggagtgggcgtggctcaggaagtatactccctgcaggcagcaggtacgacgctgccttaatggtattacaggcaggggtgtgcaccacctaaaccccagaccctcaggccccagggacgatcagaacacagggaacagggtagcgagactggcagggaagcccccgggtgtgccttgaggaggctggccccgcagaagacagggcggccg

SEQ ID NO: 532720 - DNA, 990 bp, Homo sapiens
gcgttggctgtgtgagaggttctctcgctctagggagattccttcatgtcattgcattcgtatgtctaatggtgataccgcgttgtttccgtgtccttcatatgatggaagatatagtggatcgaaactcattcggaaagctgaagaggcaccattgcgttagccctgtgggaattaagcgggtggttctgcatgcattctgttgctatattggatttatatagaacctagatacgaagctagaggggtagatactaagagattgtccacttacatctggactcccacatagcgctgtaggtgagacccacatggttttatgtatgtaagagaagcagagattcgttcgggtataggcgctatgccacttgtatctgggaattctgggggccgaggctatgccttagaatgaagagatgctgtgcgttggtccttagctgcaggtagcttgctaaagttaagatgtcttattcattcatcatgtttaccttattttatcgtttggatatcactctatgtttcgtcctagggtctaggaatggtaacaatggtcgatagtgaatattagcccttcctttctttgcaatgggtggataagcagttgggtgacccgagttactagatgactagtttacatggctagcggcgttcacggcatgtctaggttaagccttaaggcattgtacctaggtgccacttgacggcgttggaatgtccccctttctaattttctaatgcatgtaacctggttcttcaggacgcatcccagggccttccgcggcgtcccccgggtggtgccgcagtcgactgttgggtgttgcgttgagtcttttgccccgctttcacctgtgttgcgcgttgtgcgcgggggcggtgaacctgtccgtggttggctctggggggcccgggtatttgttgtttcccgccctgtggggagtgtgtgttacccccggggcacgcgcttgtcttggggtcggttgaaaacagccg

SEQ ID NO: 532721 - DNA, 819 bp, Homo sapiens
  misc_feature (37)..(37): n is a, c, g, or t
  misc_feature (63)..(63): n is a, c, g, or t
  misc_feature (74)..(74): n is a, c, g, or t
  misc_feature (77)..(77): n is a, c, g, or t
  misc_feature (103)..(103): n is a, c, g, or t
  misc_feature (117)..(117): n is a, c, g, or t
  misc_feature (129)..(129): n is a, c, g, or t
  misc_feature (183)..(183): n is a, c, g, or t
  misc_feature (230)..(230): n is a, c, g, or t
  misc_feature (234)..(234): n is a, c, g, or t
  misc_feature (242)..(242): n is a, c, g, or t
  misc_feature (244)..(244): n is a, c, g, or t
  misc_feature (260)..(260): n is a, c, g, or t
  misc_feature (279)..(281): n is a, c, g, or t
  misc_feature (286)..(286): n is a, c, g, or t
  misc_feature (294)..(294): n is a, c, g, or t
  misc_feature (298)..(298): n is a, c, g, or t
  misc_feature (301)..(303): n is a, c, g, or t
  misc_feature (318)..(318): n is a, c, g, or t
  misc_feature (321)..(321): n is a, c, g, or t
  misc_feature (331)..(331): n is a, c, g, or t
  misc_feature (415)..(415): n is a, c, g, or t
  misc_feature (501)..(501): n is a, c, g, or t
  misc_feature (619)..(621): n is a, c, g, or t
  misc_feature (694)..(694): n is a, c, g, or t
  misc_feature (796)..(796): n is a, c, g, or t
gctccctggcaccctccaaagatggagcgttcatctnggagaccgaaaataaaaaaggacaanagaccaggctnagngggagcggagctcaatggggggaagngaaagcggcgatcntctcctgcagcnaagccagggcaaggcactagagacgccacatccttcccatgccaccaactcgtnaggtcccacgcgaagcggagccactgaccgctacagcccagctaccntggnttgcctgngntgggagggcagcacgncttccagaagcttccaaannncaccntgaagccnaagnccnnncaggaggtctgaggngcngggggctggncaggcatagagggcccggggtggtccttcctcccagggtgcaaaggcttcttctattgttcggaagggagcggggtgggcggancccagtcagctagtgaggagttccattccagcccacccagctgggggaccctcctctggcttcacttgccccagttgagggccaanaccaagcaggagagactgaggctccagtgagaatgaggcaggacttcaaataagctgaaaaacaggaatgtggtgctaagaggccagggactgagctgccctatgcccactgcccggnnntgccctccctgcacagcaggggaacctgcgaccctgctcctgtcttttgtgttaaaggagcactctgtgctancaaccccaagaagcttcactgggagcgactcgtttttctgaatttcccacacttctaggccagacaaggagccaggggtgggaggggagggaatggggtcanggggcttgaggtgctagagatgg

SEQ ID NO: 532722 - DNA, 328 bp, Homo sapiens
agcatccttttcagctgggcactatcattttaaatcaattggtaaaaaaaaaaaaaaaagcaatccggttttaattttttaattcattagtaggggttatgtttaattcattagtaagagaaggttatgtttattagccatttggaattccttaatttctggtaatttctcctggccggtaatggacgggtatattaatttttccatatttattggtaagagttctttatctttatatggggaggccagctagcatttatggagcacttaccaggtgctaggaaaatgctagggtctgggccgtgcgcaggggctcatgccggtaatc

SEQ ID NO: 532723 - DNA, 239 bp, Homo sapiens
cccatgtgcccttcacgatgtgtctcacacactcaacttctctgcaaaagcatctccctcactcctcctgagctccgtatagcgacttgtcaatatcttgctttatataagatagagaaaagatggatccaatatatagcagcatatagatacagatcagatagatcataaaaaccacaattgcagagacacggaggagtggtatagacctatatatcccgaactgaagtgaatattct

SEQ ID NO: 532724 - DNA, 903 bp, Homo sapiens
ccccttcttgtcttactccttctttcttgccttttcattaggcgtctttttcattcggggattttgtctgggtatccgcatcctgatctccggtttcttcggcttttgtctctcttgttatggctatatcggcactggattggtgtcgcttgtgaatacttttctctgtcttactttgcagggtgcttcgtattgtcccttgtgtttattatatggtggtcatcctttatcttgattaatcattgttatccgccagcattttttccaaagtgtgcggagttttcttaatgtggcctcgaacctgaagttctgttccatctattagtgctttctaatgggttttctgtcggtcacgttctttagaatgaaagggacccattgttcccgtattcacgcgagtcgtcatctcttcttctaacatgatgtcccttacagtttatcttgtcccttttcctctgcttcaacgccatccattcctatgggcttatgagcgttcatgaggactgcatgcccatgagagagacgaggagatttctcgcgagggagcctcatcacctgctcctagtgaccgttgctccctttgtaagctcaccccattgcgcagcagtgacccttgggctggactgcccagtgctctttcagggcactacccctagctctcggatcataggtacaggcacgcatgctgaagtgggcccctctccgtcgtgacccttaggggtccatcccctcttgcccagggtccccatcattgtacccaagcagagctgggcccgaagaaccgctggcagaacgcagcactctgcatcacacccgccccagcttctgccacggcttcagtcatgggcaaggaggaacacgctgaaggagaaagagaaatgcaggagccgcggggctcccgag

SEQ ID NO: 532725 - DNA, 984 bp, Homo sapiens
gtggcagctcaagtggccaaggcaagtatgggtcaaagtcagcagtggtggctcatggctcctggaggtggcaagaaggatgacaaggacaagtaaaaagaaatatgaacctcctgtaccaactagagtggggaaacaagacacgaagaacaacaaatgggaccagatgctgccagcaaactagccactggtgacacctcacactcagggccggttcacattactgacagttagacgagaattcaagactatcttctcatggaggcaccgaattcattaggaaatcaggaacaaaatgaaacccattagaagcaaaagcaagacggaggaacagatcaaaagtggcatgatctgcacgggggaccccgatgtcagtaggaaccttggaacgagattattgactgacactcatgccatcgctgtactaccttctgttggaagctcacgaaacatctaccgttcagcaatacctaacaatatctagtagaacaaaggatacatgcctaggaaaccctggcctggctccgagaccttgctaacaaaccaaccaaatggtgcattgacaggtgcatcagcgagagtgccttgcatggattgcacatcgggattcccactggagtcacgaagtgaaatgaaaggatcggacaaagggccccccaggaaggaccgttaatgtccacgaattacttatggagagaagagatagaggatcgagacctaaaagtttccagcgggaaaatttaaaacgggcaacattcctggtggcggaagtgtttatacccttgattcactaagcccaaggtaccttgtagaccatactaactgaaacggaagaactgcggacaatttaaatggacccttaccacataacgagatggggggttccaactattacgccaataataggatatccatccctgtgggcaaatcatagcggattaaaaatccatttttgcatgatatcgccacacatgataccacatt

SEQ ID NO: 532726 - DNA, 109 bp, Homo sapiens
ttgcagcgagccgagattgcgctactgcacttcagcttgggcgacagcaagactccgtctcacaacaaagaaacaacgattaacaaaaaaaaagagccattcaagagac

SEQ ID NO: 532727 - DNA, 126 bp, Homo sapiens
taatagccggcccccctttgattttttacctcggtttctcttcgtcaggtgtggatatcggcggtagtcccttgcatgaagtgctgactacagtgtgggttccatcgtgtgaagaaagagtgctgg

SEQ ID NO: 532728 - DNA, 337 bp, Homo sapiens
  misc_feature (127)..(127): n is a, c, g, or t
  misc_feature (188)..(188): n is a, c, g, or t
atttttctgtgttttaaaaaatttattaataatgccacccacccatccggatgttaaaatattttatacttaaagaagtttcctggctgggtgtgttggctcgtgcctgtaatccccagcactttgntaggtcaaggcaggcggatcaccgaggtcaggagatcgaggaccatcctggctgacacagntgaaacccattctctactaaaaatacaaagaaattagctgggcgtagtgggcgcctgtagtcccagctacttgggaggctgaggcaggagaacggcatgagcccgggaggtggagcttgcagtaagccaagataactgtgtctcaaaaa

SEQ ID NO: 532729 - DNA, 749 bp, Homo sapiens
cacggtggctcacacctgtaatcccaacattttgggaggcagaggcgggcagatgacctggggtcagaagttcaagaccagcctgaccaacatggagaaaccccgtctctactaaaaatacaaaataattagccgggcgtggtggcacatgcctgtaatcccagccactcaggaggctgaagcaggagaattgcttgaacccaggacgcggaggttgtggtgagccaagatcgcaccattgccctccagcctgggtgacaagagcgaaaccccgtattgaatgaataaataaactaaataaactagttttaaacaaaaatagtctaaaacacacacaaacacaaaacacacacagcacacacagacacacacagagagtgaatcgagactcctaacctctcaccgtgggagtctgcactatcacagtggtagatgtattctgtcagagtatcgtctgcgaacattgaagaatacttgcgtgagaactcaggccttacagcgctgcactagaccttaaaccctatataagcgggaaatttaaaaacgtgcgtgttataaacttataggtacaccttatccacctacattctatagaagagtgagagtgctgtgtgtgtgtaaatgcagtgttatatgcacactatattatatatgttctcacatatatatcggtaggtgggcaaaacagcacaaattctgataggtgtcctccttaaagttccccaagggaacatatttactatcaacac

SEQ ID NO: 532730 - DNA, 205 bp, Homo sapiens
ggtcgacctcagagggaagggtaggagggatgtaagtcagagatataaaaccaaacaatgtatgttctcacttataagggggacctaagctattaggacatagaggcataagaatgatataatggactcttggaactcagagggaagggtaggagggatgtgagggataaaacagtacacactgggtacagtgtatacgtcgacg

SEQ ID NO: 532731 - DNA, 177 bp, Homo sapiens
catgcatttcaatgcagcccattcgccagtttccactgtcacctggcctgtgctgtcacttcagcaccatgccatggcttcacatctttgcagccccagccatcatggctccattccactccagttcatggtggggcatcctctcagcagtcgcaccttgccaggccatgccacagc

SEQ ID NO: 532732 - DNA, 320 bp, Homo sapiens
cccgccaccttcctcctgctctggccatgtgaaatgcctcgcttccctttcaccttccgccatgagtaaaagctccctgaggcctccccagaagcagatgccaccacacttcctgtacatcctgctgaactgtgagccaattaagtctcttttctttataagttactcagtctcaagtatttccttataacaatgcaaaaatggccgaatacacttgcctacttttctctatccccattttaacaccttaatccaagccaccatcatctctcacctggatcatgcaacagcctcccagctcgtctctctagggtcctcca

SEQ ID NO: 532733 - DNA, 236 bp, Homo sapiens
caacatgtcagtcccttcaacatctcatccctccttccaatatctcatgcccccttccaacatctcattgctccgttccaagcatcccatcacaacccactcccaacctcccatcacaacccactcccaacctcccatcacaacccactcgcaagctcccatcacggcccagctcgcaagctcccatcacaggcccagtccgcgaagggcttcccagccgcccatcgcaggcgcct

SEQ ID NO: 532734 - DNA, 1082 bp, Homo sapiens
gccctatcattcttttccaatgggtgctagcctgcttatggttgatgatcataccaaggactcaatacttccagagtatctatgttgcctctggtctgagggagggagagtccggttactctggcaaccatataagtggcagcccatgtacctgtcatcacatcttgaaaaataatgatgatgatatgaactagtgactaattttcccttagagattcctctagtcgttgggtcccagctccactggaagttagctcatacgatatgtgcggagacccgtattacgaagcagctggtggttctgtataactactcaaaatggacaagtaattcctaggtgctcaacgaaggtaaggatgttcagtatattgaccaataataactgaagcaaattaggcttatgtgacttgagcagttattaggtctgggggatgtgtgtaagagggttggctggatctcccaagacagttttatgtgagacatgaccacacgaaagcagtggtcttgattgattccatggtgtcctcagttgcgggtacttatcgcctggcgatagcgcagatctgtccaggcgttaagacaccttctgacccatagctcagtatgtctgaattccagaggtcaccatcgaggcttctcgacttgctgatgtcacaaactcgtcacccctctgatggctgccttcaccatctaaatgcagtgtcacacataaaacagggttccaatttgtgaccatgcttgcccactggtatgtaatctcggagagatttggcctcccgatcgcaagaacgtgggtccacttaacatagcgtacgattagatggcggtgactctcttgaagaggtaagtcaaggctgtctccgttaaacgtgcgtgaatcctctatttgcaggccctaagcgcggaatcaaatagagggatgaaacacatcgagggtggcacgctggttttgcaaaatgccgggcatctccgctgactgtacatctagcgcacggacactacttcgggataattcccaggggctcgttaaaaggtattcgttatcacaaaacaagagcggccctaatgtgccacgaccaaac

SEQ ID NO: 532735 - DNA, 223 bp, Homo sapiens
gagagagagctggattatgtcatccccctggctgttacttctgtttttcttccccttttttcctcttcccagtatagggttactactttcccaatatagggttgattcccgtttgtccttcaaacttcagatcagtgtcccctcctccggctggccttcctcgctctaactccacaccttgtttctttcactcgtgctttcattacaagctgccatggaacct

SEQ ID NO: 532736 - DNA, 887 bp, Homo sapiens
  misc_feature (404)..(404): n is a, c, g, or t
  misc_feature (488)..(488): n is a, c, g, or t
  misc_feature (563)..(563): n is a, c, g, or t
  misc_feature (858)..(858): n is a, c, g, or t
gtgaagaggtgccttccaccatgattctaggtgtcctgtggcttccccagtcacttggaactacaatagctgaagaatgtgagaaagaaaaatcaaaagcacacaaatgagactgtgcagtgaagaggccacagagacaaccatactgtctttttgtatcacaataagcaaaaataccaaggaaagaggtttattgagcacgtggttctctaggctgggaagttcaagactggacagctgcatctggaagcttctggtaaaggctttgtacagtatgaaaatatagagaaacagaaggggaagcaggtgttgttaagagaccagacatgagagacagcctcattttataacagccagggtaactaaatcagtctgatgagagcaagaatttactcttggaaaanagacattaacttctcttaacgatctaatcttaaggcacaatgtctcaacaatgtctcacttgggaacaagcatcaacgtgagtnttgatgggaacaaaccatcttcaaattataacagtttacttttcactctattaattgtgttctttgatgaatganagtttttgattttgatcaaggccaatttatctatttcttcttttttgttatctgtactttttatgtcatacctgtaaaatcattgccaaactcaatgccatgaattcttttatccatattttctcctaagagttttatattttagctcttatgtttaagtctttgatacattttgagttaaattttgtacatggtgtaatataaatatccaacttttgcatgtagatatattttcccaagcaaaattgttgaaaagactgttcttttcccatcgaataattttggcacacctgtnaaaaataactgggattatgaattcagggg

SEQ ID NO: 532737 - DNA, 1272 bp, Homo sapiens
  misc_feature (79)..(79): n is a, c, g, or t
  misc_feature (81)..(81): n is a, c, g, or t
  misc_feature (83)..(83): n is a, c, g, or t
  misc_feature (93)..(93): n is a, c, g, or t
  misc_feature (97)..(97): n is a, c, g, or t
  misc_feature (133)..(133): n is a, c, g, or t
  misc_feature (135)..(135): n is a, c, g, or t
  misc_feature (177)..(177): n is a, c, g, or t
  misc_feature (193)..(193): n is a, c, g, or t
  misc_feature (515)..(515): n is a, c, g, or t
  misc_feature (552)..(552): n is a, c, g, or t
  misc_feature (789)..(789): n is a, c, g, or t
  misc_feature (873)..(873): n is a, c, g, or t
  misc_feature (948)..(948): n is a, c, g, or t
  misc_feature (1243)..(1243): n is a, c, g, or t
gtgaagaggtgccttccaccatgattctaggtgtcctgtggcttccccagtcacttggaactttcagtaatttgcccananantggactctantganaaccgcctgaggaaagtaagttacagttaaatgaananatcttgtacacaattcaatgtatatacctgtgaaaccactancccaatgaagaaaaanaaaatttttgtcattccagagagttcactcaggccctcttccagtcaatctccacactcctagacaatagctgaagaatgtgagaaagaaaaatcaaaagcacacaaatgagactgtgcagtgaagaggccacagagacaaccatactgtctttttgtatcacaataagcaaaaaacagcgtctcagtatgttgctcaggctggtcttgaactcctgggctcaaatcatctcccacctcagcctcccaaactgctgggtttacaggcatgaccaactgcacccaggaagacatctaggaatgagaatcctactttgtaaggnactccacaagttaagaagaggttatgtcacagtaaanccatcaataccaaggaaagaggtttattgagcacgtggttctctaggctgggaagttcaagactggacagctgcatctggaagcttctggtaaaggctttgtacagtatgaaaatatagagaaacagaaggggaagcaggtgttgttaagagaccagacatgagagacagcctcattttataacagccagggtaactaaatcagtctgatgagagcaagaatttactcttggaaaanagacattaacttctcttaacgatctaatcttaaggcacaatgtctcaacaatgtctcacttgggaacaagcatcaacgtgagtnttgatgggaacaaaccatcttcaaattataacagtttacttttcactctattaattgtgttctttgatgaatganagtttttgattttgatcaaggccaatttatctatttcttcttttttgttatctgtactttttatgtcatacctgtaaaatcattgccaaactcaatgccatgaattcttttatccatattttctcctaagagttttatattttagctcttatgtttaagtctttgatacattttgagttaaattttgtacatggtgtaatataaatatccaacttttgcatgtagatatattttcccaagcaaaattgttgaaaagactgttcttttcccatcgaataattttggcacacctgtnaaaaataactgggattatgaattcagggg

SEQ ID NO: 532738 - DNA, 163 bp, Homo sapiens
ctcctgacctcacagtgacccacccgctcggctcccaaagtgctgggattacaggagtgagccagcgtgcccagcctgagactactttattgatggagcccactacaaggggatgaggaggtataagcacaccgtgcccaggtgccccccccagagagagcgt

SEQ ID NO: 532739 - DNA, 447 bp, Homo sapiens
gcagggattgcccccaccaagccccaaagttgggagtgggcaggacggggcagcgccaggaagggcaggacagaaacctggcgttggtgagattttgtggctgatcccacagcttcttgggcagatttggggccttttgtgccagagtttgtggaatctcacacaggcaagagttttaagccagtaaatacaggacatcggcatcaaagactcagaattggggtcctggaaaaaggccccccaggatggaagcaggaagccaagtgcacggcagaccacgccgcatcgggttcccggcaggccactctttaaacccgatttgtttttttccaggccttagttaaaccaggccccctaaatacctgtcattatttgtgatgatttcgcattaattggggtttttgtcccttctgttcctttttttaaaggctggctttttaaacccta

SEQ ID NO: 532740 - DNA, 809 bp, Homo sapiens
  misc_feature (9)..(9): n is a, c, g, or t
  misc_feature (104)..(104): n is a, c, g, or t
  misc_feature (132)..(132): n is a, c, g, or t
  misc_feature (149)..(149): n is a, c, g, or t
  misc_feature (160)..(160): n is a, c, g, or t
  misc_feature (166)..(166): n is a, c, g, or t
  misc_feature (168)..(168): n is a, c, g, or t
  misc_feature (175)..(175): n is a, c, g, or t
  misc_feature (179)..(179): n is a, c, g, or t
  misc_feature (199)..(199): n is a, c, g, or t
  misc_feature (201)..(201): n is a, c, g, or t
  misc_feature (206)..(206): n is a, c, g, or t
  misc_feature (310)..(311): n is a, c, g, or t
  misc_feature (346)..(346): n is a, c, g, or t
  misc_feature (357)..(357): n is a, c, g, or t
  misc_feature (368)..(368): n is a, c, g, or t
  misc_feature (393)..(393): n is a, c, g, or t
  misc_feature (488)..(488): n is a, c, g, or t
  misc_feature (516)..(516): n is a, c, g, or t
  misc_feature (523)..(523): n is a, c, g, or t
  misc_feature (528)..(528): n is a, c, g, or t
  misc_feature (591)..(591): n is a, c, g, or t
  misc_feature (626)..(626): n is a, c, g, or t
  misc_feature (648)..(648): n is a, c, g, or t
  misc_feature (655)..(655): n is a, c, g, or t
  misc_feature (663)..(663): n is a, c, g, or t
  misc_feature (666)..(666): n is a, c, g, or t
  misc_feature (681)..(681): n is a, c, g, or t
  misc_feature (684)..(684): n is a, c, g, or t
  misc_feature (694)..(694): n is a, c, g, or t
  misc_feature (696)..(696): n is a, c, g, or t
  misc_feature (707)..(708): n is a, c, g, or t
  misc_feature (808)..(808): n is a, c, g, or t
agtgggggnggccacgaccacggccccggcctgctgctgtgggagcatccacagtcgagcgggggttcttgatggtttcatctacagacacgatcaggcacgcngcctcagaggctgctgtcagcgcattgntccgcaccatagctggntcccacacganagcttnanagttgtnagcnatgtcctcgttgttgatgtntnctccntaccatgtacccccctgggcatgccgggcccgcagcttgttgagaatgtttgtggcatcaaagccagctttgtcacacagctggcgtgggataatctccaaggnnttggcataagccccaatcaacagctgctgttttcntggaatagtcnttgagttatcncgcagtacttggggagttccatctnaatggccccgccaccagccaccactgaatcattcttgatggccctcctgacgatcatgatggcatcatgcagggaccgctctgtctcctccatanaactgctcggcgccagcgacggagaatnaaggtgnatgtnttggccttggggcagacagtaaaaaaattgtacctctcgcctccaatctgggtctcttcaaanacctggcatcgacccagcacatctgctgacagagnattcacactggtctggattgancctacanaggccatnatngtcctcttcagatcntcntcaggtactngnccaaccaagannatgtccctgtcaaaaaagtactgggtggccacatccccaatggggagtttggacaagacaactttggctccagaatgatggatcttctctaacttgtcana

SEQ ID NO: 532741 - DNA, 780 bp, Homo sapiens
cttccagacaaccaagcatcaatagacaaagctctcacataatgttcactatttgggcgatgggtacacttagaagcccggacctcacaattttgcaatatccatacaacaaatctgaatcttgaaaaaagagagagacagagagagagaccaaaatgaacaacatacggaaggaacttggaagaaagagacagcccagcagaagaaaatggtgattgctgtctgcagagagaaattaggaaacaattaggaaacagagtacaacaatccaaagagctttacaaaattaaaaagcagattactggaatacacttggaataaaggttagaaaatagagaaaaatctccctgaaaacagaacagcaacaaaataaagtaacagtaggagagaaaacgtttaaaagtttagaggttcaattcaggaagcccagtattcagaagagagaataaagaaacaaagaaagaaaattactgaaggaatcatattaaaaaactttctcagaacatggatatgagtctccagattttaaaggggccaatgtaaattattgaaatttcagctcactagagattggagatgaggcttaaaaacttccaaaagaacaaaatgggtcacattaccacaggattgtccgtcggcacaaaaccatttggggttcctaatagcaggctttaaaatttacaattagagcttactttcaaaattctggggggaatttaccttcaaccaggaatttttttattccgccctttaaacagggggagggccaaaaaatgggcc

SEQ ID NO: 532742 - DNA, 957 bp, Homo sapiens
cacgaggccaagagcctgcagccccagccgccttggtgcagcgtacaccggcactagccctgcttgcagccccaggattagacagaagacgcgtcctcggcgcggtcgccgcccagccgtagtcacctgtgagttacctacagcggcagcgtgcagcgtgagccatgcgagaacggccaaaggggagcagcgtcccgagaggagcgcctcttttcagggacccctgcctggctggcggacgcgcgggaaagcggcgtcgcgaacagatgccagattgagggccctgcgggtggagagagcgacgcccgaggggatggcggcacgcgtcccggagcgcctctgtgctggagcgctacttgctgctaggtgcgcacctttggccacgcatgcgcgctggcctggctccgcgcgtcttccagccttgcagctgcatggagttccactccacctgcagcgcggcgtactgtgccagtgggcgcgccttgcgagcgccgtgctgccggactttcttccgccgtctgccttaagcacttccaggcggtcgtctcgcccggaccctgccccttcgggaccgtctccacgccggttctcgggcaccacctcctttcgctgtccgggacgacacgacgcggcggcggtgcgcaagcctctccagactgcccttcaccttcaccctggcccgggtaccttctcgctcatcatcgcaaccttggcacgcgcccatgcgactgtacctgcggccaggaggccttgcccaccagcatgccctccttgcgcaagaattcgcatccgggctcccttgctgtggggtccggaactggctacttgggcttgcccccttcccggccatcccctctcacacggcctgtcgcctcgctcctaaccggggctcctctggccgctgccgccttactacgggggagcacgcggcttcccgccgtgttcccgacacgcgcc

SEQ ID NO: 532743 - DNA, 1030 bp, Homo sapiens
ggatatgctcaagcccactctggatcgaactgaagcgcaacatcagtccaatacgtaatgaagctaggcccttactagaccaaggggagcttagacccacaaacactgagtgaacagctaagcaccctaatcaactggcttcaatctacttctcccgccgccgggataatagaaggcgggagcaagtccaccgagcaggtctgcaagctgctgcttcgaaattggcaatgcacgtatgaaaaagtcatccctcggagcgtggctaaacagaggtctaagcccgttcttggaggaagagcagatcgcaaatgctggcacatcaagaccgaattattaccctgcgagcccgcaagaaaaaaatacagaaggaacacccgaagacataggaggaaacacaagacatagggagagaattgcgggatcacgaggaagaacagcaggagtgaggcgcgacgttcggagaacgtgagggactctatagagaactttcgtgaatacataggtaggaaatcttaggggactgttcgacgattaggggaggaccaaaatgttaggaaacagataccggaggacatgagcagaattaacagagattgcgtatggtacaggaaagcaagggatcttaatgaccgaatactaacgaaatggatgaatattggaggaagaaaggatgatcttaataagacggtaacccgagatcgcctctgatggacacggcgcctctacacggcccagaagagtcaagcatcgagggaaaagacaagtaagcaaagggaccaacggagtaagcagagctaccgcaacacacgaggaaaccagacacgcccgacgacgcaaaggacgaagatggcaggagatggggcacacacaacaaaacacaaacgccaccgaggcacacaagcagcacccgaacgatagacatacaacaaccaaagacggcaaaccgacgcacaccgcaggcccagaggcagccaacgagaacaacacaacaacaaaacacaaacacacaccacctaagaaccacaaaaac

SEQ ID NO: 532744 - DNA, 317 bp, Homo sapiens
gcggccgcctactactactactactactactaaattcgcggcgcgtcgaaccctacaagcctcagagtatttgagtctcccttaacaatttcggagggaatctagggttcacaatttttgtagcacaggttccaaggacttcaagtcattaatggctcaacttttctcaataactgcttcatccggcaactaatatttcaatttacatccaaacatcactttggcttcgaagccggcgcctgatactggcattttgtagatgtggtttgaataattctgtatggctccatctattgatgagggtcttaaaaaaaaaa

SEQ ID NO: 532745 - DNA, 826 bp, Homo sapiens
gaaatggttcgctattcacttgacccggagaagcacacgaaatcatgcagaatcaatgaggttccaatatcttgcgtgttcactttatagaacactcgtgaaaactgctcagtgccatcaagggtatgcatatactgaaaagccacgaagtatctgaaaagatgtcactttacagaaacagtgtgtaccattccgacgttacaatggtggagttggcaggtgtgcgcaggccaggcaatggggctggacacacggtcggtggctcctggaatagagtgctgaatctgtgctgcacatgcttacatgaaacgcgagagagtactgctgaacttaagggtttagatgtagatcctctggtcatcgagcatatccaagtgaagcaaagtcagctaagatgcgaccgaccggacctacagagctcatggtcggatgaacccatacatgagctctcactgacacgttgaagatgatccttacgtgaaaaggaaccgattgttccttaaatcagaagaggaggttgcccagaagaaaaagatagtcccagaagaaactgaagaaacaaaagtttaattgggacgggggagtttaaatttcaggcaattaaacaagttacaatggttaaccaaagacaaaaagataaaaagaacaaaaacaagaaaaaaagcgccacaggacaatacatcatagtggacagaaagagcgagaacaaaaagaagatgatcaaaacacaggtaaaacagatgaagaacaaaacagagagtcaacatcaaaacccagcaccaggattgtgcaaaaaccagacgagtaaaacacgagaggaaaaccc

SEQ ID NO: 532746 - DNA, 139 bp, Homo sapiens
aatatttatacttcctctcacgctcatacttgtatctcaacgcttatacttcctctcaacgctttatacttcctctcaacgctttatacttcattcccggtatgaagtataaagcgttgaggaagtataaagcgttgag

SEQ ID NO: 532747 - DNA, 222 bp, Homo sapiens
gacccaatggcagatctcttatattggctcccacgggttccagctcctgccaccagcctgcataatggcctccctccagcaccgagattgatggcggtgccgctgcccattagcctccagtggtgcccagtggctcgccacatgcaatggctgcattccctgccagctcagcccctctgaaatctgcccctacttccattcttccacctgggaggccatcac

SEQ ID NO: 532748 - DNA, 215 bp, Homo sapiens
tagaaaagcttcagaggttaatgcgacatctataaataatgtacctaaagtatctaccatagtaaggaattctagcttttctccttttcttcttaaaccttttttagcattctctcttacgcactagagaaacctcaccagcccacttattttgaacattatctgaaatacttttgaccattttgagcaacagtgttcacatctgtctgtcttta

SEQ ID NO: 532749 - DNA, 1617 bp, Homo sapiens
  misc_feature (408)..(408): n is a, c, g, or t
  misc_feature (554)..(555): n is a, c, g, or t
  misc_feature (557)..(557): n is a, c, g, or t
  misc_feature (612)..(612): n is a, c, g, or t
  misc_feature (663)..(663): n is a, c, g, or t
  misc_feature (965)..(965): n is a, c, g, or t
  misc_feature (1538)..(1538): n is a, c, g, or t
tctctcattttattacaatgaagttaaacagtacagaaaatgtcactatggaccttggtgggtgtcagatttcttaaaaccctggcaactatggaggacactctaatatactttaaattattggttcccctattcagacttccgaatggtccaagtcactgggaaacagttaacaagccctccaccaagctaaggttgggggcacttgaatgtcccaacgagctatctggaatatggctggtggaagggcacaatctttcacaatataagcattgtgtcaagcttacacgaaaatcttggcgctttaactagagggtggggtatatggtctcatatgtgtaatatcttccgagcgcgccttcacacaatatttaacacggacacccaatatttacactatatacactntcacactttcttaaaaacaccttaagtatggcacacactatgagcacaaaaagaaacgcccatatacacagagtatatacaatatctggcgcacatcttccgagagcaaacatgtctcccgtgagctgttttaattatatctcccnnanatattatattgtgttctccccctatgtgtgcacacatatcaatatgtgtgccccnaataatgttccccctgggtgtttatgctgtgggggcgcacaacgcaatacnaatggtgtgtcccgggtcgtccacaacaatgtttcccacacatatgtggcaaaacgctcttttctattatggcaacgggaaagacgcattgggggcgtttcattctataacaacacccgaggcccacccaacatgtttgcggccacgccacacacgcggggttgttaaaattcttgcgcgaaaagactctttatatgtaaagaactgggcgttttcggaaagtttaccaggaactcccgacgattaaaagcggggccgccgcactcgttgtgggcgaacactattctcacccaggggggagncggtgcctcccattatcccccccattgctgggacagagtgtttcgcgcaaagggggaggggccgcccaaccctcctgttgtgttcacgatgcggcgggtcgccccccccacttttgtggggcgggcgtcccctttgtgctcgcccacttctctacgggggggcggcgatttaaatcgaccccgccgagggacagacgggactaccccctcgggacaatgacactctttgtctgttgaaggatggaggccccccaataaatgttgtgcgccccacaagaagtaggggggccaacaggaggggagagaaccacaacaccccccttggaacagggacgagaggaagaaaccacacgagaggagagaggagggaggaggcaaacacataatcccgcccgaagagtgggtcccccccgggggcgtgggtatctccaacacaggagagcggcctgaccatctcgcagccgaacgagacacaacactcgtggaagaaaaaggacgaggaaggagcgcacccctatatacaaagagggagagaactcaatccacgaagaggagaagaacactaccagtagngcaagagaaagagcgatatggatggcaacgacgccaaccctgtatgtgaacgaacacgagcgagccgacaacacaccac

SEQ ID NO: 532750 - DNA, 499 bp, Homo sapiens
gaccagaatgtaaaagaaacaactggggggaaaaaacaggtccacagtgatagagcaagcatcaaagaatctttaagggaggttaaaaaaaaaaaaaaaaaaaaaaaatgggtggcctctgccttggtgaccctgagtccaaaagggtccacaaggtgtttttttggtgatgtccctcacctaaacaaccagaggcgggcttgggggctaccctccaacccaggggcttctcaaatgcctcggtgggcatcagtatgtcactcgggtccctttaaaagagcactccgggaaaaagcaggaggggagggggggcttggctgtggtggggacagggcattctagacgggtagcagcgctcgctgacggctggggaggaaccctgagatcggggtttttaaattggatcgtcctccgggggagtaaaaaaggcgggtcgggagtgcgtgattgtggcttaattggtgctggaggctggtcccgcggggggaccctctagagt

SEQ ID NO: 532751 - DNA, 379 bp, Homo sapiens
  misc_feature (51)..(51): n is a, c, g, or t
  misc_feature (78)..(78): n is a, c, g, or t
  misc_feature (161)..(161): n is a, c, g, or t
ccccaaaaaaaaaaaaaaaacctcccccccgggttttggataaatggattngtggttggaaattcccatagggggcangttggggggagtggttggcccataatggataggtaaatcctccctaatcctatgagcagggatgttttccccatttatttaanctttaaatattttattattttagatctattgagaatggaattgttttccttaatttcattttcaaattgtttgttgctagcatatagaaatacaagtgattttgtatattgctcttgtatcctgtgactttgctgagcttattttagtagttttttttcactgaattctttaggattttctacataaaaaattcatatcatctgtgaataaagacagt

SEQ ID NO: 532752 - DNA, 297 bp, Homo sapiens
agtctgactctagagatcccagtggagagagaacggcaactatctgacactccagtgctatgggagcatcggtactgctgggtgtgtcttccccaacggaacggagtccccaacaccagaagccgcggcaccataactgcagtgagtcactggaactggaggacccgtcttcttgggctgagtgtgaccaagcaggatctgggcccagtccccattgttgagagcagcagaggcggtcttcaacatcctgcacagcccacagagctacagatttcttgctccttttctctctccact

SEQ ID NO: 532753 - DNA, 376 bp, Homo sapiens
  misc_feature (61)..(61): n is a, c, g, or t
  misc_feature (73)..(73): n is a, c, g, or t
  misc_feature (81)..(81): n is a, c, g, or t
  misc_feature (114)..(114): n is a, c, g, or t
  misc_feature (118)..(118): n is a, c, g, or t
  misc_feature (122)..(122): n is a, c, g, or t
  misc_feature (134)..(134): n is a, c, g, or t
  misc_feature (143)..(143): n is a, c, g, or t
  misc_feature (163)..(163): n is a, c, g, or t
  misc_feature (166)..(166): n is a, c, g, or t
  misc_feature (168)..(168): n is a, c, g, or t
  misc_feature (171)..(172): n is a, c, g, or t
  misc_feature (184)..(184): n is a, c, g, or t
  misc_feature (202)..(202): n is a, c, g, or t
  misc_feature (255)..(255): n is a, c, g, or t
  misc_feature (325)..(325): n is a, c, g, or t
  misc_feature (353)..(353): n is a, c, g, or t
  misc_feature (368)..(368): n is a, c, g, or t
cttcagtcctgcaagcaaagtgtacaatggcattttggagaaatcctgtagcatgaaccanctttccagtggnatcccggngcctaaacctcgccacacatcatgttcctcagntggnaacntcagtaaaccangttcaggangccccaagttgttgccagantangnagnnatcccacatganctttgtcataatggaganaaaagcaaaaagccatcaaaaatcaaaagcctttttaagaagaaatctaagtnaactggctgacttgatggaatcatgttcaagtggcatctgtaaactattatcccccacccttcactcccnaccttttttttgggttaatttagggatntaactccattggggntttccagg

SEQ ID NO: 532754 - DNA, 215 bp, Homo sapiens
gtacggatcagccgctggtcagaagaagcggctgcgccgttatcgatgaaacgggcaccctttgcacgatatttgtcagcgcggcagaagaggattggaagttgaattgccagcggcggtgttggctgaacatcaccccccaggccaaattcgcaccgatctggggggctgatattcattctttgaagtctatgaggatcaaatgggtaacagac

SEQ ID NO: 532755 - DNA, 163 bp, Homo sapiens
ctctagacggatcccccgacggtctttaccccgaagactctccaaacgaccagcatcaaccagtttataacaaatattaataataaaagtaacaacgactctcatttcttctgtgttatacattgtgctaagtgccttagattacctcggtgtcagaccgtcg

SEQ ID NO: 532756 - DNA, 640 bp, Homo sapiens
gcatccctgggagggccatgtgtcccagacagataccagcctccgtgggcacctcctctgccaatgcctgtgatagaggagtttctgccatagccccatgtcccatcctgtgcgcctgtggggacctgggtgactcgggtgcttgtgagtgtggctcctgtgtcgccaggagtgtctggttcctgagtctcagcgcctgaaccttctggtgacatggtgtgagagtctagcttatccaccctctgcttcgcccttggtccatctgtgcagttggcctgtaggataaagaccttccagtctcctgtgtacttagatctctgggggataagggagtccaggttggattatctcaatctcccgtgggcagctcaagccccaaatggttgggggaggggcctagacaaggctccaggccccacctcctcctccatacgttcagaggtgcagctggaggctgctgtggggaccacactgatcctggagaaaagggatggagctgaaaaagatggaaatgcttgcagagcatgacctgaggagggaggaacgtggtcaactcacacctgcctcttcctgcagactcaactctacctgcccccatcataagggcactgagccctatccaggctggatactaagcaaa

SEQ ID NO: 532757 - DNA, 606 bp, Homo sapiens
ttttttttggaaaagttcatttattatataccattttacactttctgtaataaaaaagaagcctcccaatccattgcgccatcttatacatgaaatgcgaaaataaaattttcatctgtttacaaagggggttaaattaatcagcacaagctatcatatgtatgtctgccctgcagtatatatgaattttaatgaagacatgtggagaaaaaaatggtgctttattatttggcactataggatgctcttgaacattgagaagataccttattccactttttatttttgtatactttttagatgagtgaaaatgtaaatatatcctaaagacgctctttgacttattttactcaaattaaaaaatttgaaaaggacgtgtttgacacttgtaccttcataattggctttactaaaatataaaacacacaagtgatctttgctctgatttgaaaaaaagggtcggaactccagaagttttaggctgtgagttggaattttaaatccattttttgttagctttgttatgaaagtgaccaagaatgaacggtggcattttttcgcaggggtaccccttatacttaaaggtggaccacttatttatttttt

SEQ ID NO: 532758 - DNA, 180 bp, Homo sapiens
tacactaacatgggagtggggtcacgaaaatatgccatttgcaatcaggagaaaaaaatgggaagtttcactacagcattgttcttttcagtctggctcaaactattccctatcgactatgggctgaaaacagatctcggacagggtgagaaaagaacatttctaggggagggggaacag

SEQ ID NO: 532759 - DNA, 186 bp, Homo sapiens
tagtattagaggatctttggaggcaggacactgaggagactggagatagtgctgctgtccccgtgttggtgtgcggactggaggagccgtcctggagggtcttccccttgctgggcctgactgagcacgagcagggggcctcccctgtgggctccccggaggagggctgtgacgtgggtgctggcc

SEQ ID NO: 532760 - DNA, 422 bp, Homo sapiens
  misc_feature (92)..(92): n is a, c, g, or t
atatgacgtcagaaataaatcaagaaactacccaaactggagacctaggcaataaaaatttaaacattgtactttttagcatcaggcgcttnttggcatgtgctgattgccttagcgtgtgtgttggccctgtgagttaggccacctaatctccttcctaatgtattttggcaggaaaataaaataaaataacaagaagaagaaagaaagaaatcccacagaaacagataacctaacacagcccgtgcaacgtattttatacaatgctctgaaaatcatagtctcaatctagacagtcttttcctctagttccctgtattcaaatcccagtgtctaacattcaataaatagctatatgaaatcaaacactctctgccgtatatatgaagaccttcagtattatttatcccaacagcgcctgg

SEQ ID NO: 532761 - DNA, 193 bp, Homo sapiens
gaggattccgagtgtctccaagagcacagtatcctaggacactggtttacgatacaccacataggtccagtaataccctgggaattcccaatgcaatcaccaactttttctttttataaatatataaaacacaacaaaaagtcagcaaaaccagcattatgatgtagcaaaacagagtataaactctgaagtc

SEQ ID NO: 532762 - DNA, 580 bp, Homo sapiens
  misc_feature (127)..(128): n is a, c, g, or t
  misc_feature (148)..(148): n is a, c, g, or t
  misc_feature (164)..(165): n is a, c, g, or t
  misc_feature (347)..(347): n is a, c, g, or t
agcgggcaagccggcaagatggcggcggctggggctggccgtctgaggcgctggtgtgcatcggctcctgctgctgcggagcccccgcctgcccgcccgggagctgtctggccccgtgcccgaactnnctatcacaagaacggttgtntgaatcattatgaaannatcctagaaacgtggggtcccgtttggaacgaaggggggaaaaaagggtgaaaaaaggggttttttttccccggggttttttaaagaggagaagaagttggttgggagacttggcaactgggtgtggggctccgagcggatgtggttgacggtaatgcagaattgacagcagttccaagttngggcacttgcaaaacaagcgggcgcaaaagggaatcttgggagctgtaggggggtgaaacccttttttgggcgccctttttaaaagagtgtgaggggtattttgtggtgtgtgttatacaacgtgatcgatactgagataaattgggtaaagaggttttttttagacgcgatattggaggatgggggtgcccccttttttgggggcatttgggacgggcgacattttgtgacc

SEQ ID NO: 532763 - DNA, 634 bp, Homo sapiens
tacagactgctgcctcggtactagaccgagggttcccagaagctgtcttaccattgcaaaaacgttatagcaacagcctctgattacgacatgcctgagcatcaccaatatccgacctaccttcagactgtgtcaccggctggtggccggcctcatcggggcctctgtgctgcgctggtgctgtgctctcggtgaccgctctttgctctggctcactgctgacacctagcaagcgcacgagaagaagcacagagaacccaccatacaagtttattcacatgctcaaaggcatcagcatatacccagagaccctcagcaaccaagaagaaaatcatcacagtgcggagaagacaaagatggtcctgggaggagaaggtgagacgtaggaacctgtaggtggacgccacagagagctggcctagctaagccgagacaaagatcccaggagagcctagactctgcgaatcttgtatagaccaattacccatcaaaatggactatgagggaagaaactaaggagccctattacaagcctgaccctggggagagcaaaccactctccatcattccacaggagatgtgagccagatccccactctcgcggccttactcccgagaacccgtcgcaaacagg

SEQ ID NO: 532764 - DNA, 261 bp, Homo sapiens
tttccaagagcgaatgctgtgctgctcctccttgggctccgtcaagtcgagggcagaaggtgcgggaaggtcggtgggcatgtgcctcggacctggtacttgtaccctgtatgtgcggcccagtacgcggatcgtagtaaagaggtcggcgtcttgtctgctgtgtccccgactgcatggagggccatgatgctgtccgcttcgtgacgaacgcgccgatccccgatctcgtgtccgagctccgggcgtgagtcgtgcagc

SEQ ID NO: 532765 - DNA, 379 bp, Homo sapiens
tgagctcgtacccggatcacaaaagcggcaagccaaggttcatgggccaaggatctaacccatcccacagcagtgacctgagctgctgcagtgacacccaccagatacttaacccaatgcccaagaggagaactcccaagaaagcagattttgtttgttttttgttttttagggccgcactaccgcttttgtgtggaacacaaaagcggaaagaaaccatggcagagttcccgtcatgacgcagtggttaacgaacccgactaggaaccatgaggttgtgggtttgatccctggccttgctcagtgggttaaggatctggtgttgccctgagctgtggtgtaggttgcagacgcggccgcttttgtgttccggtgatcc

SEQ ID NO: 532766 - DNA, 88 bp, Homo sapiens
agggaaaggggggggtttttcttttcccaaaggccccgaggccccccccaggagggttggctttaactttttagggccgccaatttcg

SEQ ID NO: 532767 - DNA, 876 bp, Homo sapiens
  misc_feature (177)..(177): n is a, c, g, or t
ggtttggcagacgctagcggcgagtaaaatcgtgtactattagccatggtcaaccccaccgtgttcattgcagactattgccgttcgacggcgagcccgttggccgagtctccttgtggagctgtctgcagatcaggtcccagagatggcagaaaattttcgtgctctgagcagctngagagaacgggatttggttgatcagggttcctgctttcatcacgaataattccaaggttcattgtgtcagggtggtgatcgttcacaacgccataagtgttgactggtggcaacggtccatctatggggagaaatttggaacggatgagaatttcatcctagagcatacgggtcctgcatcttgtccatgggcagtatgttggacccaatagcagaatggttcccagttctcccatcgtgcactgcaaagactgagtggtggatggccagcagtgtgggtgttgggcaaggtgatagaaggcatgcgtattgtggaggcatgggcgcttgtgggtccatggaatggcaatgagcagcaagaagatcaccatgtgctgactgtggcactcgacttaagtggactgtgtgttgaatcttaaaccgaccaagatcattccttctgaaggtcaggaagagaaccctccatcccaatagggtcgcagatcctagagtcttaggtctcgtggaggccctgggtccatgttgctgggtgccttcccatgctagtggttgcgagtgcggttttgctgtgaattacactgattggcacttgtgagaagagaaagaagtgttggggcggccgaaggattaacacggtggggggccagagtaaaaggccaggccgaagggaaggggccccaaaaggggagggtagacagg

SEQ ID NO: 532768 - DNA, 984 bp, Homo sapiens
ctgtctcgactgttggtgatggtcaacccccctgttaccgcgtgtttcccaccaatgttttggtgtgtttcttgttttgtgtttctcccccccccccgcctgttttgttgtgtgtgttccttcaggtgtttgttcgctcctgtctcgttggttgttcttcttgtgcttggttacctccgtgccccttttgaaccgcggcttgttttttagattttggccccccttcttttttttttggtgtggcctctttctttggtggttttcttcgcttggctccgcccttgttcttttgggttgtgtcccccccctctataattattagttttgtctgatatatgtgtatattgttttcttctgtgtctttgtctcccccccgttggtgtatttccatccgtttttgtatcttttttgttccccctcggtgattttgtttgtggttgcgcgcctctctgcgtcccccctcgctggatgccctctttgttcccctctttctctcctccctctcttcttaagtggctcccccccgcggttttttcgcccctcttttgtgttgttttcttgttttgttttttttttgttctttcttttgttgtaaaacacactctgtttatatgtaggtggtggccgcgctttattggtgggaattttgtcccaatataccccccctcccctccctatatttctttgttgttgtttatgaaattgatatgggaggtgtctcctcccttttttttttgtgtggttgtatatttctcccgccttgttttctttgtttataagtggggaatatgtgttttctctcctcgatttttttcttgttagatactgctctctcttctccccttctctcctcttctttccttggtccccgcgagactctctgctctcttgtattcttcttgattttttttttttttttccctctttttataggcgctctttcttcccttaaggtgggggtaaaaagtgtgtcccctttttata

SEQ ID NO: 532769 - DNA, 1441 bp, Homo sapiens
  misc_feature (563)..(563): n is a, c, g, or t
  misc_feature (1132)..(1132): n is a, c, g, or t
aaagagtgtacacgcaggatgtaattgttgaacacgtccttgccccccggtgtgttgccgcggaagggccaccttgcgtgggggaagtttgagagagaagttggggtggccctgtgtaaccccctttgctgtgggtgaacggccctccctcttttgtggtgctgctgttgtgtgggccttatattggtagtcgctttctcctcccccatggggtgcccacacttgctgttcggcgcaatttaaattccggggcgctttggggggcggcccaattattattggtcgcccaccggcgccgcccaactttggtgctttgcggggcgcgagttcttgtgtggaaaccccactttgtcccggggtgggttccctcacggaggaagtgttgttctctgggtagaccaccacaaacgggggcggggtcccaacaggcccccaacaaggggcctctttgatgggggaaattccatccgccgcggggtaatttttctccacggggccacaggaagttgttttgtgtgttcttaatcccccccgttggaggaccattgggcgttggccccccncaaatctctggagagttgttcaagttccgcggtctgtgtgggccctgggctcccccgtgaagcacaccctgccacatcccgcagggggaacttctttgtccaacccccacggagacctttcttctttcccacggagatagagatgatagggggaaacacacagcgctggtggtttcaagtcacacgcaaactcacagccacgcgggggcgaaaccttcggtgataaccccacgcgagcgagacccttgtatcacccgggcccctctgtgccccacagctgggtataagagattgtcacacgctgttctggagatctcgtgagatgttggagacgagaggccctcacgagaactcaccgtgtcctcatcacaaaccaccgcgctctcttctctcgagaccctcgtagaagagaactcgtgtgtgagttttctggcccgccacacacattgggccacgctggccacacccaccagcggagtaccgcgccacacacacgccacatgttctcctctgtttgggcacggctaacacacacactctggctcgggctcgcgctctcgagagagagnggggagagccgcagatgcctctcaagtgagaactcccaaggctcgtatagcccacaccacgctatagagagagatggagagggcccgcggagaagcacaacccgctgccccctggtatttgtcacgacaccaccccacggcttgaatttggagtccaccacggcacgaggcccaagggagaaggtgtgatttcttctgagggagaaagaagtgagttttgaataataatgtaacttgtcacacacttggtgttggaacacatttgcgcccaaagtatggtaattttattattaaataatttttctgaga

SEQ ID NO: 532770 - DNA, 841 bp, Homo sapiens
gcgcagctggtgctggtgacgaaggggacgggcagacgaccgggagcacatagcggccgggagcccggctgcacaccaggctgctgctttgtccgtctatccagccgggcagcgagccacgcgaagcgcaaccggtcatacgttacaggtgcggggcccggagaacgcacagcaccgccacgtgagaccaggccgacagaacatggaccagctacgatcctgtttcaaaaggcagactcgggaactgcgcgtgaatgtggcttgtgggacacgagagcctcatcatacttgagtgagcgaacaagcaagaacatttcctccctcccggtcctttgaattgaacactggcacagttaaggacttgtcagcgagcttctcacatagggactgggagacctcagttccgttcacacccagcgtagtcagccagcctctggagtccaggccaggaggcacccatggcttcatccggcacaaggcaaacaaaacgcctatcagcacgcgctagactagatgggagcaccattgccatattagtgagagcgcaagcagcccaagcccacattcttggcacccgtgcacgcaagggagaatcagcaccaaaggtaataagagccctggggagcaaacacggaagcaagaaactggagcagcgagacattgcgtcggtacacaaagggtgaaacgaccacttgtggcccccgagtggaggaccgatggcatagtaaaagcgtagccactccttaccagtcttagcccaagaatatgccccttcgacatagaattacggagaggatggaataataacacgcggaagtaacactatcagatacaaaatagc

SEQ ID NO: 532771 - DNA, 145 bp, Homo sapiens
tgagtagtagtattgtattgtagacatctgttagtctcataatacagtatggccaacacacagaaattacaagtagaaacaaaatgagggcacacttgctccctgtccttgtgttgggccctccaacctcctattagaactggct

SEQ ID NO: 532772 - DNA, 250 bp, Homo sapiens
ttttcaaaaagctttttttttgttgggaaggtggggttttggggggggggggggtattagcccgtggccagaaaaagcttcctttaaaaagaggggaaggcttttttttttgttttgggatttttttttttgaagggaaatttaactttttgggcaagggggactattaacccccttttcggggttttacttgggggggttcccattccaacccccccttttatttttaataaaacggttcccttgttta

SEQ ID NO: 532773 - DNA, 746 bp, Homo sapiens
tttatttggggtacatcttgatttaatttacaaataaaaagccaaaaccctcaatgcgaaaggaaaactgcagttaacacttattctggagatcattttaaaccacagaaaatgtgcccctgtagcactgttttaacatggcaagtgctatgattggcccagattatccataaactgcttgtgtggaactccataagatgaagaaattcataagtgaagaaagattgggtttctagtcttgtctctcctaggtcacgaacaggatatttcccacaaaatgttttgacctgaaaggaatgtatgatcccagtacttctggtcttacctcttctgaattacactgcaagctgaacttcgggtaaacttcagccacattttcttttatcaccattttccatgtagcttgggcttaaagccctctttgcgtgtcgaactcagttcctcctgtactctgtgtcggatcatttcttcctcacgccgcgatgcacctcttcatgtctaagtagtattaggctcccgttttagcaactctgtggtttcttgagttcttcccaagcgtctgagatccttcttgacgcctcattagatcttgcttcaattagcacttaatggggtgttcaagcctagcgtgcttccatttctgcctcccaggtctcttcggcttctctgaagttctatcacctgctccgctgctgtttccattcatcagacttcctcggatctctccattctttccgttgcccctg

SEQ ID NO: 532774 - DNA, 102 bp, Homo sapiens
catgcttgcacgcagggtgcgtgtgggcatcctactgggcgaggcgcccgtcgtgtgctgcttcacgtgaccgggctgtcgtgtgggcctggcgcggggtcc

SEQ ID NO: 532775 - DNA, 149 bp, Homo sapiens
tggaggatactctagaagtcgacagctccagcttaacgatatttggaggtcagcactggtgctcacgtagtcgacggaactatgtacagggaggcatagcaccgcatggtaaatacacgtcgaccaggctacatgtatacgtatctttg

SEQ ID NO: 532776 - DNA, 350 bp, Homo sapiens
gaggcactaggaggttgaacaggatcattcttcacgataatatatctgccttgacaagcacagcggctactagtacccaggaaagtgagctacaggagaccgagtctttctttgtcgtaccgttccacgagaacaaattttccccaatccatcatttgactgcgctgtttgggagggatatctgatgtttgttagcaccgttctcttctttaagactttttaagtaaatcagggacgctagatgcacgaaaacatgtatcaaatactgatgtattccggtgcataatggtccctatccacacttgtaaccgcactacctctcagaattggagaacagagttcgagcagtg

SEQ ID NO: 532777 - DNA, 303 bp, Homo sapiens
ggtgcatcgggacggccaccgtgcaccggtgcctcacctcctccctgtccaccagtgttttcctagtgagcaggtgaaccaggggccacgtacactctggagtctccccgactgggacccgggccggccgcatacactctggagtctcctacactgagacccgggcctggctgtctcaggcggctcccatgttggctctgggtacagcccgggaggcgtgtccagggccgtgttggcgcctcccctggagccactcacctgtttgctttctcacccagtcctcctcatgcagaagtaccggcg

SEQ ID NO: 532778 - DNA, 205 bp, Homo sapiens
agcatcaaagaaatacactgatatcctctgtagaatcttgaggattccatcttgacaaattcctctaaatccccaggggaagagttgtttcgagactcctggatgccctgagggagcggctccagagcttgccttccctcctctgttttcacaacggtccagcgataggcactgttctctgacaatccttcttggcactgtttat

SEQ ID NO: 532779 - DNA, 468 bp, Homo sapiens
  misc_feature (177)..(177): n is a, c, g, or t
tggggcccaaggccagtcctgccccagagacactccaagtccgccaggggcacagaccagttctgcagtgactgtccctggacaatgggtctttattctgagtttcctatggtttacaaagagggccccagcccagccccaccacagatcccagagaatagggagcccaggtctccnatgggggcaaggaagcataagaggatgtttttccagggaagggggctcagaagctgcactaggccccgaagtcccctatgtggtctcctctgaatatgatgaagagtgctcctgggaggggatgacgtgacatatgtggatgttgtcacccggggactgcaaacagtctccgtggcacgcccccagaagagagtgacccatgaggctcaagaccagtgctttgttgtcactgctctgcagtatacctgagattataaactgaattgcatagaatgaagaaaaataaaaaga

SEQ ID NO: 532780 - DNA, 235 bp, Homo sapiens
ctctagaggacccccttgcgggcttcatattcaggtcaagctctaagcactcctgcagccaacttttacgtagactggctttcctaggctggggcttgaactacatgtaaacgaagccatggagttcagatctagatagcagagaagtacgtctcattctaaaacattgcaactactgtcagagtcctacccctatgatgctgtagcagagtggtgatatcttggacctgaagtt

SEQ ID NO: 532781 - DNA, 256 bp, Homo sapiens
  misc_feature (14)..(14): n is a, c, g, or t
  misc_feature (16)..(16): n is a, c, g, or t
  misc_feature (58)..(58): n is a, c, g, or t
  misc_feature (81)..(81): n is a, c, g, or t
  misc_feature (136)..(136): n is a, c, g, or t
  misc_feature (174)..(174): n is a, c, g, or t
  misc_feature (217)..(217): n is a, c, g, or t
gtcatttggaactntnttaccaaattttaaaacagctgctatttttcctgcccatgantgatagactggataaagaaaatntggcagatatacaccatggaatactatgcagccataaaaaggatgagttcatgtnttttgcagggacatggatgaagcaggaaaccatcattntcagcaaactaatacacgattagaaaaccaaacaccacatgtnctcactcataagtgggaattgaacaacaagagcacatga

SEQ ID NO: 532782 - DNA, 694 bp, Homo sapiens
gcattgaaattttgcccaggttaacctgttttgttctggaaagggggcaaagcaaggtcaattactttctaaaaataaaagcccatttggacccacaaaggattgggaataaccccctccccctccttgtttaaagcccatgagcccccacgccatacttttcttagttgcagccccttgggaaaagaaggggtgcatgaactccccatagtccacaggcgcctccttatggcccaagtccttcttcacaatcaattttgtagcccgagcagcagctattttcaaaaaagtgtaaagctgttatggtcccacatttcatggtatgtacaggggctcgtagtaggaataatgcagagctttcccccggaagatttggaggggtagggggtatatataagagtagcagcctttgaccaggagtggtggctcacgcgtgtaatcccagcactttggaagggggaggcagtcagctccatatgtcaggagatcgaaatcagggtggccaagataataacgccccgtctgtactaataaatacaagaattacccgcacgtggtagcgtccctttgtttcccacccccaccgaaatcgtgaggcagagagaatggcgtcaactggacgggaacaggttgcagtgagccaagttcgcaaccctgcactatagaatggtggacagagccagactccgtctca

SEQ ID NO: 532783 - DNA, 132 bp, Homo sapiens
ccttctcctgaatgtgcactggcaatctggctcagagagtcaaggaagttttggccccatgtgccattgggtgtcatccagagagacctgggccaagactggctgtgttagattgactatcactaaatctgc

SEQ ID NO: 532784 - DNA, 136 bp, Homo sapiens
gtaaagagataactgtaaaatatatactagcagtattattcatataagctaagaactagaatcagcccagatgtcggtcaatgggtaaagattaaagaagggggtacataccatgaagtatactagtcaacaattt

SEQ ID NO: 532785 - DNA, 531 bp, Homo sapiens
  misc_feature (64)..(64): n is a, c, g, or t
  misc_feature (75)..(76): n is a, c, g, or t
  misc_feature (85)..(85): n is a, c, g, or t
  misc_feature (130)..(130): n is a, c, g, or t
  misc_feature (132)..(132): n is a, c, g, or t
  misc_feature (136)..(136): n is a, c, g, or t
  misc_feature (138)..(138): n is a, c, g, or t
  misc_feature (140)..(140): n is a, c, g, or t
  misc_feature (160)..(160): n is a, c, g, or t
  misc_feature (162)..(162): n is a, c, g, or t
  misc_feature (168)..(168): n is a, c, g, or t
  misc_feature (196)..(196): n is a, c, g, or t
  misc_feature (220)..(220): n is a, c, g, or t
  misc_feature (237)..(237): n is a, c, g, or t
  misc_feature (243)..(243): n is a, c, g, or t
  misc_feature (249)..(249): n is a, c, g, or t
  misc_feature (269)..(269): n is a, c, g, or t
  misc_feature (271)..(271): n is a, c, g, or t
  misc_feature (284)..(284): n is a, c, g, or t
  misc_feature (288)..(288): n is a, c, g, or t
  misc_feature (298)..(298): n is a, c, g, or t
  misc_feature (320)..(320): n is a, c, g, or t
gaattctttatttgtgatatccataaacgttgctattctctatttctatccagaaaggcaattntcacctataannacttttgtncttctctaataaacaacaacttgaatgcaatagcaggaaagggcnanaaanananatttgtaaaccaagcagaananacaganattttgctttacaacttgcacctaaaanaccagtatacgtagctggttcatnagttgtaatagcaattnagggcnattgcncaagcaatgcatagcagtananattttcaaacctnaaanagaaagggcnattgtgaaatgaactggcaacnacattcctgtaaagcccatctcagtaacaagcaaatgtgtaaacttccaattctgcaaagaattttgatggcaaaacttccaaatctgatgcaattgtcttaagcaagtatttaaacaaattgtttcgcagcaactctgccattctgccagtagatggtgcaacaaagatcgggaaagggatttccatgaggccaacagttcggatatagg

SEQ ID NO: 532786 - DNA, 742 bp, Homo sapiens
gggcgcggcctgtcctactgctgccggcgccgtggtcgtcatggcgggttcctgaatactgattgagattgagaactttaatctcgtacaagggtcgagcagattatcgtgaccatttcagaggttcaccgccatcattggacccaatggctctgggtgctgtggaatctattgccatgaagaaccccaaatagaggacagctctatttgaagagattagtcgttctggggagctggcgtcaggagttatgacaagcgaacagaaggacaactggtgaaggctgacatgaggacacacaggtgtctaagttaccagtcgcaaagaaacaatattgcggctgaacgcaacggaagcaaagcacggagcaacagacagtaggctgagccggtaccaagcgcctgaaggatgacggtagtacgggctcaggtacaggtgtctagctctttaagcctgttaccagtaactgaagtggaacattgacgaagctcaacaaggaactggtctcagagaaccaacggagatcgagaacgacacggtaagcgtactggacacaggctggaggactgaatcttgtcgaggacgcacaggaccgacacgagcctcggcgcctatgtattgacttgcggggtatacagtgagccagcggattggccgtaaggatcagtccaaggccagaagtgacatgagtaatagccctgcaaaccgggggacctccagtacattaaaaggcacggtagaccc

SEQ ID NO: 532787 - DNA, 286 bp, Homo sapiens
tgcaggacgttcacttgggtgacaccgaggtgatgccacggtcctcggcaccagatgaagaaccactgtctcaatgaggtccactgctgtgtgtgtaatggttaccgtgagagcttccctacaatccgaatttgagtgactcattctcagtgacaccagtgatgctgttaaacaaggacaatccggttcatggattgtgacaacgcacgctgacatcaagcagaccctgccgtcacgtacagagggcaccacagtgaccaggaactgctgtcctttcataccaggt

SEQ ID NO: 532788 - DNA, 710 bp, Homo sapiens
ccacgcgtccgctgccgcggtctcatgaggggcccgagcagaagcaggatagttgctccgcctctgctggcacatttccccagacctgagtctccccatcaccccaggtggtcccctccctcctctgtccctagtgtcagcttgctgccctaggctcgcgtcagtatcaggcctgccagacggacccacccagcacccagtaagctccaattaacaagaaactcacccccaaggggcagtctggaggggcattgtgacagtcagcttggcgttagaatgcggaggaatggagagaaggggaggagggcggggggctacctactacatcgcctccacatccctgattcctgtgctaatggaacctgtgccagagatggaggttctctccggagtatctgggaactgtgcctttgagtttcctcaggctgttggaggaaaactgagactcatgacacggagatgggaacggccccacagagccaaggtacgccctgtgccaggaggctgtgtcgagtctcagggttggcatgaggtgggatatccctatgtctgcctaggcttgaccgttgaactcctggtgctctaagcagtcataccgcgatcctcaagactcgctgtgtacgctgggatccctagcatgggagccagcaatgcccgagtcacagggtggtctccctaggattgaccttgatcagtctacgatgggtcgg

SEQ ID NO: 532789 - DNA, 127 bp, Homo sapiens
gctgtatcttatttgctattacaagattttcaaggctctactggtcaaactgctgaagagtcatgaatctaggcacccagtgaaccgtagctgatgatccccgttactctcgagttcccgtgacctt

SEQ ID NO: 532790 - DNA, 247 bp, Homo sapiens
  misc_feature (158)..(158): n is a, c, g, or t
  misc_feature (216)..(216): n is a, c, g, or t
tggaagtagattattggtgagtattacagaggggggcagcacattggaagccctcatgagtgcagggccggcacttgtccagagggccacgatgggggatgtacttgacccacacagccatctgggatagagccgcttttcagccaccatgtcttcanaattcatcatgcattgaaccttggtgaatgccccaactatctttgagagtgtggatcnttactggcggccagggaaactatgaactttg

SEQ ID NO: 532791 - DNA, 106 bp, Homo sapiens
tgttctgctttccttccccatccaccgcttcctcagcactctgtgttgtagcctggactatcctgtcttcaagcctccgctgtcccttgtaccttccgctctacct

SEQ ID NO: 532792 - DNA, 795 bp, Homo sapiens
ggagaccaagggctaaagctgggagactgaaaaaatgcatgaccgtcacgtgggcattattcatttctccagtctctggtaaggtgccgcgccgcggtgctctgtagttaccaggtgtatggtgtggacgccatcagtgtttaatgaatgaacccaggggagcttggcgtcctgatgatgtaggctctttgaggtggctgtaggatcgtgatgaacggtaacccctgtttatctggtgcctgtgaaccaagctatcattggctttggaatgtggtcagagagtctggattggatttttatccccagtctgtcctggccatagtagacagccctactaatacacagtggttttcaacagtggctgcacgttagtacatcatcctagggaactttttacaatatcctgatgcctgagctgcaccttagaccatttgcatcagacttgtgggaactgggggtggaacccagtgctatctgtatcttcttacagacttctccagatcgattccaccgtgcagccaaagtttgagaaccactgcaactaaataattatctgtcatcagaaagccatgtgacacgatgcgctctccttggatggctattccagtacggctttcctggggctgactggggccactccattcagggtgtgtagctgtgagtgtatatcagcagacataagactttctcccatctgatttacttggtgatctgggtataaagctttactgtacctgtttggcaatcagtgtgggtcttgtaccattctgagaagctgattacagctgtgccaag

SEQ ID NO: 532793 - DNA, 833 bp, Homo sapiens
aagctggtgttatcggccgaggcccagatctggaggtgtgtcattgctggcgcttgacctgcgagcggagctggattcgctggtcctgcagctgcttggggacctggaggagctggatggggaaacgaacggtgttgaacgcccgggtggaggagggctggctctcgctcgccaaggctcgctacgcgatgggctgccaatgtcgtgtagtgtgcccctgcagtatgcttcaacacatggatgccccagtgtctgcctccacagccagctgaggcccagtgagggactccagaagttcaatggtggtgagagctggtgtccacagacccaagaggaggtgagagcctcgctgaagcaggtctgcgtgaggcgcaagggacccactaaagaccccatgaacactggatgtcctctgagtgcccctcaggaccccctgaactggttatggaatcctagttcctcacagtctacagtcagtgctcaatgcaagacttccgggattggactgaagctggccagaagacattagccaagcctccatgaacacgcattgactgaggtcaaaagccaagctccaggaactccaagagaaaactcaagcaagctggagcctgaagactgactgaacattgcgcgcaaagaagcagtgaaagggagccacagatgtactcaagaaattgatacgtaattctcagagccttattccttaaaaattagctcatgacctaaacaaggcaaataatgccctctgggtcatgtctgatgtaccaaacctaagtgaatagaaaaggaaaaattgaaacaaatgaacaacagctaccaagaactctagg

SEQ ID NO: 532794 - DNA, 355 bp, Homo sapiens
ggcgaagccgagatccagccaaggaaaaccaatgatttgcggcagcaggtgccgtctgtcaaggtgggttgtacgacgctttcggtcaaaccgcggtgtcggtgggtttgagcagaattaccgggttgattaagcttggttcacaggggttgcaaagcacaaggtcgacatcggttttgaatcctactcgcccaatttttactaccagaacagtcgggtaacagcagtctatacagccgacatcgataagcttcgggcgttgatgccaccgcaaggtactggccgccgtgcagcccttgcaaagtctggccgggtcgcgggcttgatcgcgtttactgcgtacacctatgagcat

SEQ ID NO: 532795 - DNA, 547 bp, Homo sapiens
gcaatctagaagggatatggctacttccataggcttttcttttttcagggttggaggtaggcatgggcttacatcccccaggtacatactttatacttatggtgggataaccgggcactagtaggcaggtaaagtcacaaatggggtgtcttttcacctttggacggtggacttaatagctcctctcactcggccgggagatacttccggcctcagatgaggagccagaagaaacagagcccgacttgaatgacctcagctcagagttctaaggaccagcattcggggggccattttctctacaggcaaagggaatggcttttccataacatccaaatggtaaggtggttgctgctgaaggaggaggcagcagcgaggtcctgcggaacccagggggtgatgctacttctgcatgcatctacggggcatctgacacctaacatgagaggtggcatgtgagatgagactgggcatgtgagacatagggtcactagagacccttcggggtcagaggagagagatggaatgggactaaacccgtcctcgg

SEQ ID NO: 532796 - DNA, 149 bp, Homo sapiens
acctcgaggatccccatcacggcgaagactgtggttaccgttctgggatgtatccgggctggctattagtgtcacctgcgtgtcgatgtgtctggcatgtacgtgtgatcgtatttgctggggtgtgcgtgttgccctgatgtctgtcg

SEQ ID NO: 532797 - DNA, 269 bp, Homo sapiens
  misc_feature (52)..(52): n is a, c, g, or t
  misc_feature (266)..(266): n is a, c, g, or t
ttaagggtcccaagactgctctaacaacaacacccatttccataaatatggntcaataaacacttattcattctttataattagactctattgttagaattgttttaggtttatagaaaaattgagcagatagtacagaagattgccatatacccctcacccacagaatttcacaatttaccctgcgattaaagtctaatgttaatatgatatatttagtacaagtagtgggattatattgatacattattattaattaaaatccncaa

SEQ ID NO: 532798 - DNA, 506 bp, Homo sapiens
tgtgatccctgctacactaactacactgtaccacactcctgggccctgcttaaaccactcatccaagccatgtaatctcgtactacaggttaattcctgtcatcaggagaaaagaccaggttcccctgacagcctaggcagaggcatgttgagacccagcctctcaaatgtctgtacacatttctcctctcctttaggttgagaagtcagtggccagattcaaaggagtcaccgatacatcgaacctgagccttcacgccactgagtcactgcttaattgcatcataacagactgtccgctgcaggtatatcatccagcagctaacaatccaagagcatttgcaattgctaccacgtgggtctacatccacgtctctgtgtacaaaacaatcctgatatgtcaacgctcaatatcacctgaatttaagctatggctcacgttaaatgcccttaggccattttaccttacgtactttgaccacataccgtatccaccagtgggtgga

SEQ ID NO: 532799 - DNA, 481 bp, Homo sapiens
aataggtcttttattgcgtcatttaaatatcaccagtaggtcttaagtgtcaactggctcttctttctgtaacccaggtaactccttagatcttattcatcaaggctggtgaacagttcctttttcagagacatagatacccatccaaaaatttcctgatatccttgtttttaacttgttgtggcttgctgaatccaagccggtggaatttgaaacaagctcaatgtcatttcccttcaagattaattcatctttctgggcttgagatactgaacaagcaacaactgggtctcatccgaaacctgcggctgtatttttcacccaagaaaatttcggactttaaccaggaagaccattctcctggaataacaacggttgatggggaacgtaaagcatacacagaacctcatcttgtaacggaagcccagtgtaaaaacccttgaatcatgttctggtacatgaacatacaaaaaaggcgaac

SEQ ID NO: 532800 - DNA, 148 bp, Homo sapiens
  misc_feature (91)..(91): n is a, c, g, or t
  misc_feature (142)..(142): n is a, c, g, or t
gggggtcagtaggaagccgcggggtggtgttgagagaggacccaggtgtcctggcagtgtttgccgcggggcacacgcaagacacgtcgcnggcggtttttgcgggagactgctcgcctttccctgagtactccccccttgnttctcc

SEQ ID NO: 532801 - DNA, 631 bp, Homo sapiens
  misc_feature (258)..(258): n is a, c, g, or t
  misc_feature (385)..(385): n is a, c, g, or t
  misc_feature (530)..(530): n is a, c, g, or t
  misc_feature (558)..(558): n is a, c, g, or t
gacgccaccgaccatcagctgagaattgcagctgagggctccggggtaggtgggtgacggcggtcggaggtcgttaaggaagtgtgagccagtgtggagtgtcctacggtagactcgctttaggaaacactggtcactagctattctggtactcggaaaattcagcagaataaggatacatcgaacgcatgtcattacaacttccgaggaggttagggttgggttgacccccgcggtgcccaagattgagggccccancgacgggagtacttcattactaaaacatgtaccaagaaatgagtcaaccaacaatgtgtttgcttgttggtgacacatatatcatagaggaagcgtcatgacaattcaagcgttgagatagtatacntcaaagaattcgatctatgacactctgaggggccaagcatagtttgcaagcgatgaaagcaagccaggattactaatcctatctgtgacctaatagaaaatcagtatgaagttacattagatagcagttgtgcgaatgctgctgntcactcatctcaaaccccgccagctggnagagccagtcgtttccacacacggggagcacattgaccagggaaagggggaatccgggccgtttaaggctggg

SEQ ID NO: 532802 - DNA, 118 bp, Homo sapiens
gtagggggtttagagggttggtcctaaggaaacaaggtaacattatggaaaaaccctggtgaagaatgggaagggttaaaaaacaggactaaaagacccagacccttttaattgaaaa

SEQ ID NO: 532803 - DNA, 271 bp, Homo sapiens
gagacagagttgtttccctgaatgttagaattgctatgtgacgcgatctcataggagtccacttcggtgacatttcgccatctgttccattgtggatgtgggtttcccacttcggagtgagacactcgggttagacttccggactcctgttaggaactctgaagcagatctggcatgcttttcctctgcaacaattggctcgtttctcttttttgttctcttttgataggatcctgtttcctatgtgtgcaaaataaaaataaatttgggc

SEQ ID NO: 532804 - DNA, 416 bp, Homo sapiens
tgaacataaggtgaatatggctgtggttttcagaactggttccagggtttcataaaccttttagaaatggatattgattattactattcaactaatctgctttctcagaatctgttttgcttgtatttgatgccataaaggattgtttgccctataatttcctagagattatagcacaatataactcacctagcccataggttgctatgggtttctttgtgagagagagagagagagagagagagagagtgtgtgtgtgtgtgtgtgtgtgtgtgtccgacatgcttcatgcttcgttctttctttatgttcgcactcttcgtggctgtcactttctgactcctcttcatccttgcccactgtctatccacgctttcccatcatgctcattccctcatgtacagtcgtctctcctc

SEQ ID NO: 532805 - DNA, 108 bp, Homo sapiens
ggccctctggctttatacttctcaacgcttcatacttccaaaagcgcttctacttcatttcccggtatgaagtataaagcgttgagaggtataaagcgttgaggaagt

SEQ ID NO: 532806 - DNA, 441 bp, Homo sapiens
tgggggaagccattgacggtgtaccaggcgtcagtggggttggtgtgtgagatggtagagaggcctcagcttctccgggttgggtggtgcttggcctgtgtcccctagctcatgacccttctccagttgtctggttcgcatataacatttgagctcttgacacacttgaacctgtgggggccttgctcatttgaccatgtggcccaggccaaagcccagtgttggcctaacgcatggtcggcaggagagtcagttgtgtgctctgtggaagccccacagagcaggtgtggccaatgctgtggtccgtgcagaagcgggaaaactcaagggtgtaggagtggaggacagggacagagccctctggggtggaacgagcccatcttgaggagcttccgtgagagttggccaaatatgcgattgactggggggactttgaggtaa

SEQ ID NO: 532807 - DNA, 125 bp, Homo sapiens
cctaaacaagccctgaaccagccagcaggaggactgaagcagctgaagtctctatcatctgggatctcctgtttcagcagtcttcattctgtctcctcattcagatacacgtgtattctcaagaa

SEQ ID NO: 532808 - DNA, 155 bp, Homo sapiens
ctcgtcatagcgatgcgcctgtcgaccattggttatttgcacgcgatgctaaagcgcttgtgggttacagacaatttcaaatgaccgttctggctcgatcttcgctgacgggtcgtctgccccctacctgcgctcttcgatgctgcgtactaaca

SEQ ID NO: 532809 - DNA, 104 bp, Homo sapiens
  misc_feature (6)..(6): n is a, c, g, or t
  misc_feature (61)..(61): n is a, c, g, or t
tgcaancacctcctccatcaaatgtcttcaaattcctgagaaactagaacttactaatganacttcagaaaaccctactcaggtcaccatggtgttcacagtat

SEQ ID NO: 532810 - DNA, 136 bp, Homo sapiens
tctaacatgctgttaatactctgacgtatgtttacacggcagagtggatgtgatgctctgagaatgaagttgggcttacccacccatctgagagtcttaactgtgtgtgccaatatgcataggaatccccggtcga

SEQ ID NO: 532811 - DNA, 116 bp, Homo sapiens
taacatgtcagtgtacggcgtggggaaggtgggtgcctgctgagtaactgggactgctgtctgttgtgatgtgcactgttgcagctcagtgtgtgggctctagggagtgcggaggc

SEQ ID NO: 532812 - DNA, 333 bp, Homo sapiens
cgtcaagtgagcccttactgttcaccatagctcgtttcctgacgaaaaaacctcccccaccaaactggaaaaaaaggccaaagcttttttcagcagaaaactacatgtcgcttttctaccaggagattctttgcgttatctagaggaacacactggacttacatacagctggacatgaaagtaaccaatttaagtgccttttccttcaacaattttaacttcagttgcttaaggatgatcgagccaccgatgtcaacaaaatatcctttacctttaaatagtttttctttaattaagtttaaagaaaacctatttaacgagtgatattaccgg

SEQ ID NO: 532813 - DNA, 907 bp, Homo sapiens
  misc_feature (487)..(487): n is a, c, g, or t
tctcgcttggtccgccgcgtccagggtccccgccccaattacggagcaaccttccctcagccttgggaccagcaagcggtcttgtacgttcgttttctcgcgaagtttccagagtaggttacacctgtgggtgcgcttggggtcttggttgtgacactttttaacagcgccccatcttctcaggacgcacattctccgtgaggacctgtttttagagttctccccctgtccgtaatatctcagtgtacacccacatctggggctccccccagatgtttggtgttccccgccccagaaaaaaaaggggaagtgttaatttaatccccttggggggcgtctcccccgagagcacagaggatttttagagccctgtgcattctcatgagaccctgtcgtgtggaaagcccccgacccccccctacaatggcgctgttgaacaatcgctgggggccctgtgacatgcggtctcaggaacattggtcgtgcnctgttctcttttttttgtccgggatagggattgtgaaaagagattgtggataggtataggcgtcggaatgtgaccgctgcgatgtgccggctgtggatagcgcccagatgcccttgcaatgacaccccaacccagagtggggaagcgcttttgttgtagccatggaccagacctgcagaccagggaataataatagtgtgccttatattgtgtgggcaccacacaaataaatattgacacacttagggtgttgggagacttatattcaagaagagggaaaatttcccgaagccgcttaaccacagggctgggcaccctttggattttgagatttcacaaatgggggcacgggctgtgcttgaaggccctcctgagttatttgtttgggccttggttccataaagccctgagccaattgga

SEQ ID NO: 532814 - DNA, 787 bp, Homo sapiens
  misc_feature (474)..(474): n is a, c, g, or t
  misc_feature (558)..(558): n is a, c, g, or t
  misc_feature (632)..(632): n is a, c, g, or t
ctgggcgcggcgaggtctggtgtggcagatgtggatagctggaccctcctgggtgcctctgcgttatgtcgtaatggtagatgcatttggagagaatctgtgctctccacaactgcaggggcaacatgctttcctggcctcttcagatcagggtggctgttcttgggtgctgcaccaaaactccagcagtgggctttcttcaaggtgagctgcaagatggaatctgaggcccacccgtcagtaagagtttcctcctggtatccatggaatctactggtctgtctcactttggcctttgacccaggcaggggttcctaacatctacatcggtcattcggacagccttgcttttggttcactgccttacacggggcttccagatgttgacctgcttcattttacagtatcaggaaatcactttcccctcagaaatggccggctcacctcattcctgccaagacccaggtccgtgtnctcacagtgctgccatctttcctccgtgtgagcgtgggctgtgcggagagtggacctcggtgtgtgcggggctgcgtgcactgncatcgctccctctacacgagccggcgtggacccagggctgagctgtgaccacgagggccatcccgacgagccgncatggacccagggctgagctgtgaccatgagggctatcccgacgagctgccgtggacccagggctgagccgtgaccatgagggccatcccgaaactgtgattgtatatctgatgaagaaaacaaggctttgtgactaactcaagcccttcagaag

SEQ ID NO: 532815 - DNA, 218 bp, Homo sapiens
tgagtctacatcgtcgtgtacacataagagattagttgatgcatcagtagtggagaaaagtccgccagggcgcggtggctcacgcctgtaatcccagcactttgggaggctgagacgagtgaatcatttgaggtcaggagttcaggatcagcctggccaacacggtgaaaccctgtctctactaaaaatacaaaaaaaaaggaactcggtcagaggtg

SEQ ID NO: 532816 - DNA, 567 bp, Homo sapiens
  misc_feature (246)..(246): n is a, c, g, or t
  misc_feature (330)..(330): n is a, c, g, or t
  misc_feature (404)..(404): n is a, c, g, or t
ctgggcgcggcgaggtctggtgtggcagatgtggatagctggaccctcctgggtgcctctgcgttatgtcgtaatggtagatgcatttggagagaatctgtgctctccacaactgcaggggcaacatgctttcctggcctcttcagatcagggtggctgttcttgggtgctgcaccaaaactccagcagtgggctttcttcaagtggccggctcacctcattcctgccaagacccaggtccgtgtnctcacagtgctgccatctttcctccgtgtgagcgtgggctgtgcggagagtggacctcggtgtgtgcggggctgcgtgcactgncatcgctccctctacacgagccggcgtggacccagggctgagctgtgaccacgagggccatcccgacgagccgncatggacccagggctgagctgtgaccatgagggctatcccgacgagctgccgtggacccagggctgagccgtgaccatgagggccatcccgaaactgtgattgttttctggtatgtgggggatgtgccagaaccagggctgagctgtgaccacgagggcaaaa

SEQ ID NO: 532817 - DNA, 516 bp, Homo sapiens
cattcagaaagggataaacagcacttccagggggagaaaaaaaatcatgttatcagaaagcaaagaagggtgagagcttcacatttccatgtatgccttttccccgccgccctagctcccttcgtcttccttctcttcctcatggctttcattccgtctttcgttttggtttgttttcagtcattctgccttccttctttctctttcttcgaggaggtggtgggatctctggaagaaggaatgtgtggttttttttctttatttttttataggattttgattgtttggttctctgtgatttcttccattccagaaagggataaacagcacttccaggcggagaaaaaaaatcatgttatcagaaagcaaagaagggtgagagcttcacatttccatgtatgccttttccccgccgccctagctcccttcgtcttccttctcttcctcatggctttcattccgtctttcgttttggtttgttttcagtcattctgccgtccttctttctctttcttt

SEQ ID NO: 532818 - DNA, 553 bp, Homo sapiens
  misc_feature (2)..(2): n is a, c, g, or t
  misc_feature (51)..(51): n is a, c, g, or t
  misc_feature (55)..(55): n is a, c, g, or t
  misc_feature (88)..(88): n is a, c, g, or t
  misc_feature (134)..(135): n is a, c, g, or t
  misc_feature (160)..(160): n is a, c, g, or t
  misc_feature (180)..(180): n is a, c, g, or t
  misc_feature (190)..(190): n is a, c, g, or t
  misc_feature (273)..(273): n is a, c, g, or t
  misc_feature (421)..(421): n is a, c, g, or t
  misc_feature (445)..(445): n is a, c, g, or t
  misc_feature (470)..(470): n is a, c, g, or t
  misc_feature (496)..(496): n is a, c, g, or t
  misc_feature (505)..(505): n is a, c, g, or t
  misc_feature (548)..(548): n is a, c, g, or t
cncggctgcaccggcgcacacgaacgcaccttcctggccgtgaagccgganactngcagcggcggctggtgggcgagattgtgcggcnttcgagaggaagggcttcaagttggtggcgctgaagctggtgcaannctccgaggagctgctgcgtgacacntacgccgagctgcgtgaacnccgttctacngccgccttgtcaagtatatggcctccgggcggttggtggccatggtatggaaggggctggacgtggtgcgcacctcgcgggcntcatcggaaccacgaacccggccgacgccccgcccggcaccatccgcggggatttctgcatcgaggttggcaagaacctgattcacggcagcgactccggtggagagtgcccgccgcgagatcgctctctggttccgcgcagacgaantcctctgctgggaagaaaacgctnggcactggctgtatgagtagccggnaaatgcgcgtcaaaaaggctttaaantccagctcntcaaagggccaagttgcggggctttttgcccaacccaaagggnttgag

SEQ ID NO: 532819 - DNA, 197 bp, Homo sapiens
agaaggcaagccggaagagcgaagaagaagtcgtggagagagagacgggctagagagagagaactcccagatgagagagagataagggagagagatagagagagagagatataaggccccctagaactcccagagagatagcgatcaacgcaagcaaaaatggcatgcgtccctccacacttgtttgagcttttgct

SEQ ID NO: 532820 - DNA, 443 bp, Homo sapiens
  misc_feature (2)..(2): n is a, c, g, or t
  misc_feature (11)..(11): n is a, c, g, or t
anagggcctgnaaagtccacctaattcacattcattcattcattcatattctctctctctctctacacacgcacacacacacacccagtcaaaagagggagagcaaggagaccccagatattgaaataaaaagtggtaaatagtggttatcactccctggaaaaaaaatttaagaaaagggcctctgccatgcatgtcatggggtgagggagtatttttaaatatacatatgtctaactaagacgcctctaccctcaccaggtggcctgagcagcacatgctcaactctggagcaagcagctttgcagacacattttagaaaagggattcctgcatcttctctatcagaatgcatgatctctggaaagaacaattggcacttttttcttagttcattcatttcaagaaataaataaggaactggcaattgctgaaaaaaaaaa

SEQ ID NO: 532821 - DNA, 853 bp, Homo sapiens
  misc_feature (1)..(1): n is a, c, g, or t
  misc_feature (246)..(246): n is a, c, g, or t
  misc_feature (442)..(442): n is a, c, g, or t
  misc_feature (653)..(653): n is a, c, g, or t
ntgtgctgccccgccgcactgccctcggtggtcgtcgctctgccccgtggggcgcccccccgtcgaggttcctcccttttggtcgcgcgccgtgggatagacctcgcggctcgcgcgctataatacactctctctggtatgtgttcggcgcgccctcccctgctgtgttgatcgcggcgagtggtctctcccgcggttgtgcgcgcgcgcgggtggatctcctgcgagcacaacatatttgtctcngccccggggatatgtcgtcggcgcgcgccctcttatctcccgccccccggcggtgtcacaatactctctcgcgcacgagcgcactgctctccccacaatatgatttgtttaagcagaataaggaggatccacgcacactcaggtagtgttcattttgtgcccgaacatatctcgttcgcgccgctgagcaagagantttctctataggagaaagaacaattttgtggagacactctcttcgccgccgcataatttgttaaaaaggctctctcctctgtgaagtggatttgttgtgctgtccctccctctcctgtagagatattctttgtgagtgggaaagcgggccgggcccccctcgcgggttatatatcgctgtggagtacattagacactcgtctgacgacacnccttccccgatgcctgtgtggacaacacaaccgacgacctgtgtgttgcaaaaataggtgcccccaccacgacgtgggcgccaagcttctcttattaagtcgctttgtgatacacactctttgcggccaatcttcctccggctcactcgtgtggcgcccaattacacccgcgatttattcccaaagagaaactaatagaa

SEQ ID NO: 532822 - DNA, 305 bp, Homo sapiens
  misc_feature (63)..(63): n is a, c, g, or t
  misc_feature (122)..(122): n is a, c, g, or t
  misc_feature (131)..(131): n is a, c, g, or t
  misc_feature (141)..(142): n is a, c, g, or t
  misc_feature (147)..(148): n is a, c, g, or t
  misc_feature (232)..(232): n is a, c, g, or t
ggttccaagaaggtcctcctgctcccagagcgacctcctcctctaggcatggaggtttccctnagctgggcatctgggccatttgcccctaacgtgctgccccaggatggcctcctcttganaggcggganagggggtgtnnccccnncggggcatctccaaaggaagcttttaaactcagcagctgcaccccagaatctgtatgcctgcacctgcccaaggatttattcantagcttacctaagaatttcaaatttcttaccataacacttgaataaagtttgacatttttgaaaaaaaaaaaa

SEQ ID NO: 532823 - DNA, 534 bp, Homo sapiens
ttaaggatcttagctgacagatgcaggcatgtatctcttccattccctacactcaggctcacagcaggtgaggctcaggtgaggtagggggtgggagcacatggctacattcccccagtacacatggcatctgaagcttgatgggagagcagaactggtgagacttgagggaagggtcatggtctgtattcagtcagaatcactgctggaagaggaggaggaagaggaggaatgcttgccatgcttgttggtacttgtggtgcttttggtgctagtgcatctttttatgagctttcttcattttcttctgcatcttcttgtctactatcactgctggtccaaccatgccaggagccaagggattcacaggagggaattccaggggcaggcggtgggtatggaggagggtagggacccaacggttgggatcctggataccctggctgttgcacaggatgagggggcccacctggtgggaaaggctggattgccatggggagctcctgggggaggaggacaggcgctggggaaaag

SEQ ID NO: 532824 - DNA, 473 bp, Homo sapiens
aaatcgagctcggtacgggtgtggagagagaaagagaaatacagatgagagagaggtaacattctaagtggccttatgttttgattctgccccacctttgttaccctgccatgtttgtgtgcattcctgtggatgggcgtgcccactgcctccctcacctcccatccaggctttcagaatgatgggaacatgacacgcacagagaattctctctaacccatcctctttctgttgagcatatcttttgctccctctgcttgtctatgggagtgacctgtctgagggaggttgagggtcaatgtgtaacagatacatacaaatggaagcagaaaaactcccccactaacttatcacctgctcttggtgccttcagagagcctggtgtggggacacgtagagttcaattgtttactaatttgaaattagaatctaaccacttctctccacttccattgatacattctctctccact

SEQ ID NO: 532825 - DNA, 364 bp, Homo sapiens
  misc_feature (153)..(154): n is a, c, g, or t
  misc_feature (162)..(162): n is a, c, g, or t
  misc_feature (192)..(192): n is a, c, g, or t
  misc_feature (204)..(204): n is a, c, g, or t
  misc_feature (210)..(210): n is a, c, g, or t
  misc_feature (212)..(212): n is a, c, g, or t
  misc_feature (353)..(353): n is a, c, g, or t
ttaaattctaaaagcttcagaaaataaatgcacgtaagggaaacatactgagtaaccaagatgtgtcttggaccatgaatggtgctaccacttactgagcagccctgtgtgctgggaaccttgtcctgtggtcagtgccctcggccgtatccnntaacacangggtttcatgggaaaccagggtttcaccancaacctggggcnttttangncttcttttgtctgcttgggtccatttcacttgggattgtctcctcctcctcttggggatgttcattgtcacctatgggatggggagtgtttgcattttgtccatccctgggaggggtgttccacacggcatgtttcccctngctgggctgtt

SEQ ID NO: 532826 - DNA, 144 bp, Homo sapiens
ctatctgcctacgacaaacagacctaacaatcgctcattgcgtactcttcaatcagtcacatagccctcgtagtaacagccattctcatccaaaccccctggaagcttcaccggcgcagtcattctcataatcgtccgagcgga

SEQ ID NO: 532827 - DNA, 170 bp, Homo sapiens
cttggtgctgtgggtgacagagtatgatggggtggtggttgtggtcaaactttcaatcagtgtcaggcaagctgcaataatttcatgaaggcagcaggggtcagagttatgatacggagaggatcctcatggtgcgggggctttgtatgattatgggcgttgattggtag

SEQ ID NO: 532828 - DNA, 431 bp, Homo sapiens
gtgaattctccaaacatctcaaagaagaattaatgccagttcttcttaaactatttttaaaaattgaagaagagggcacactccaaaatttattttatgtggccaacattatcccgataccaaagccaaacaaagacaccacaagaaatgaaaactgcaggtcaatatctctgatgaatatacatataaaaactcataacaaaatactagcaaatcaaattcaacagtacatttaaatgatcgtacatcctgactgagtggcatttatccctaggatacaagtatggatcaacatacaaaaataaatcagtgcgaaatggcctattaacagggcaaagatataaagataacatgatcatctcaatagatgcagagaaagcatttgacaaaattcaataccctttcgtgattaaacaatttttcaacaaaaa

SEQ ID NO: 532829 - DNA, 275 bp, Homo sapiens
  misc_feature (263)..(263): n is a, c, g, or t
gagagacagtcttgtatttttctgtatgtgtgtatatatatatattatggtacttctgggcaattctatctgtatttaaaggatgtgcacatcttggacaccatttttaaggatgagctgtggagaccgatttaaaggataattccctacccaagtgaaaattagatgtgtgtttaagagggtacaggattatcaactgatttggtcagttgctcccaatgctggtggatttcctcattgtgtaaacattgacaggtatgtgnacacatggcgaa

SEQ ID NO: 532830 - DNA, 84 bp, Homo sapiens
ttttcctgtgtgtcatgttggtttttggtacttgtattgtcatttggagaaacaataaaagatttctaaacccaaaaaaaaaaa

SEQ ID NO: 532831 - DNA, 693 bp, Homo sapiens
  misc_feature (644)..(644): n is a, c, g, or t
gggcagggggaccatccgggattgattttatccttgccttaaaaattctgattagggaaggaaatgcaagtcagtccggtcccaagccaggtggagcaaccctaaaatcgccagttttttcgccctttttgacttaaagggacaaagggttttaaaggccctttgttttttgaatcaaacttaacagggcccccggagtttggtttcctactttagcaaggggggaaaaaacactgataaatcaagttttgggggggttcgagcctcacacctaggcagcggagtgtaggctggggagcttggggggacctgctgcactggcccaggtgtcctgccgcccccacagagcacttaacacagagcttaaagacagggggtatatcacacaagatgcacttccggaactgggcctccacccctgtgtgtgtgaaaggaagagtgttccttttttccttttattttaacagttgacacttgtaaaatagttcacatgagggctgggtgcgggggctcacgcctataatcccaacacttttggagggcacaggcaggcggataacttgggggtaggagttcgagacccgcctcgccaacatggtggacttccgtctctctaaaaatacaaaaaatagctgggccgtgtnggcaggtgccttgtatcccagcttctcgggaggctgagattacaggcat

SEQ ID NO: 532832 - DNA, 179 bp, Homo sapiens
  misc_feature (9)..(9): n is a, c, g, or t
gtgagttcnatgagatctgatggttttataaggggctcttcccttcacttctccttcctactgtcttatgaagaaggttcctggcttccccttcaccttctgccatgattgtaagtttcctgaggcctccctagccatgctgaagtgtgagtcaattaaacctctttcctttaaaagtt

SEQ ID NO: 532833 - DNA, 726 bp, Homo sapiens
gagatcatgccagtatactccagcctgggtgacagagcaatataccatctccaataatagtaataataataataataataataataataataatggttggaactactgctttatacgatcttaatgtccttaatctttatctgggaatgtctggtgttgccttgattcttttttttttttaaaggatagttggcgggatatagaattggtgcctgacaactttttcttggactctcttttaatgtcatcccagtgcacccggatttccattactttgggtgcaaagtcagctggtaataattttgggtctccttggtgtaattgttttcctcacggctttggggcttttttttccggggcctggtctttaaaacagttggactaaggacgttttaaggtgtggatctcatagtgttaatccatactggggttggtagtcgtaggttttggtggtttaagcttctgggatatataatggttttttataaacattggagagattttgggacattattctcttagttacattttctggcccttggctcttctgtgattggccttatgcatttgtgggacatttcctgtgacccgtggtctcaggctcgtgtccattttttccagtcttttctccctcatattctcaggttgtgtacagttgatttttcctcaaagctcaccgatgcgtttgccatctcaaaatctacttgcatggttgggttccgaaag

SEQ ID NO: 532834 - DNA, 1066 bp, Homo sapiens
gcggcgatggcggcgtgcggcggctggcggcagcagcagcgtgggtgctgcgggctgggtctgcgggctccgggccgaggcggcgtgcgccatcttgtgcccggggccggtggggaggcctggggagggggccccgtggtgggcgctaggtggtgactacggtgaactggaccttggagtctgaggaacttgaatgcctcgatggagcttgcttgctggagcactgatgcctgaagccccgagcccagaataggagccagcaccgaggcccgtgcacagcacctgtgaatgatccgtaggcacttggggcaccatggataggagatgcccgccgagacagctcaaagaacatgagggaagcgaaagaagacactaggaactagggtctgagaggggaatgacaccagtgcaaggacagtacagactaatttggagagaaacctcagagaaacatagaaagcttagtcaaaaaagcttcgaaagttaaagggggaaacgaatagagaagctgaaaatgaaaaggccattgaggaaaggacattaaacaacggtgaagcataatcgagataaaaaggtacgcgtttaagaaagtaaaggcgaaggaaagttgaaagtgtattgaagaattcatcaacgatatacaaatagagaaaaaaattgcaagtgggtgactaacagagaaaagaattcaaaattaggattacacaacactattggacaagtagataatgaaacagaaatagaagagaaggagagaatataacaattaacaacaagaattttaagaaaaaaagaaatgaacatagaattaagaaaccacaagatgaattggagtaaaccataaaaatgagagagagagaaaaaacaaagttaaaaagaaaaaagaaaataagctggaagaaaaggaaaaaatcgagagtaatatgagaaattaggaaacagatgatatgagattatacaaagctaaaagaaatagaattaaatgacaaaacgaattaggacgaatgatgtaatgaagaacatacaaaaatgacatgaaatgttgagaaaaaacgaaaaaaaaaaa

SEQ ID NO: 532835 - DNA, 182 bp, Homo sapiens
agacatctgtacaaagtcgcttacgtagctaggaagaggtttatcctctattcctataggatatgctattctggctccgctacggagccaatacagatccgctacgcttataacaaggctccccagcagctaagcaagctaacattcttaggtttaaacgaggaagtatctactatgtcgaa

SEQ ID NO: 532836 - DNA, 273 bp, Homo sapiens
  misc_feature (87)..(87): n is a, c, g, or t
tactggcatcttacaccgtcgtgagaatcgctctacccggttagcaggttgcagtgagccaatatcacaccattacactccagcgtngccacaagagggaaactccatctcaaaaaaaaaagtagttgggtatggtggcgtgcgcctatagtcccagctactcaggatcagagaattcttctggcctttggtaaaaatgttggatgcagtgttgtgctaagaggaagaagcatctccaggctcaaaactgtaactgtggtctttccagggtac

SEQ ID NO: 532837 - DNA, 101 bp, Homo sapiens
gtgcagtccccggcccccccccctcaggtttgtgtttcttggtttttaaacgactggttgggatagaaccctaaagaaataaacttccagtgggttccgga

SEQ ID NO: 532838 - DNA, 502 bp, Homo sapiens
  misc_feature (30)..(30): n is a, c, g, or t
  misc_feature (62)..(62): n is a, c, g, or t
  misc_feature (93)..(93): n is a, c, g, or t
  misc_feature (97)..(97): n is a, c, g, or t
  misc_feature (113)..(113): n is a, c, g, or t
  misc_feature (120)..(120): n is a, c, g, or t
  misc_feature (134)..(134): n is a, c, g, or t
  misc_feature (152)..(152): n is a, c, g, or t
  misc_feature (177)..(177): n is a, c, g, or t
  misc_feature (197)..(197): n is a, c, g, or t
  misc_feature (206)..(206): n is a, c, g, or t
  misc_feature (208)..(208): n is a, c, g, or t
  misc_feature (220)..(220): n is a, c, g, or t
  misc_feature (222)..(222): n is a, c, g, or t
  misc_feature (234)..(234): n is a, c, g, or t
  misc_feature (254)..(254): n is a, c, g, or t
  misc_feature (262)..(262): n is a, c, g, or t
  misc_feature (285)..(285): n is a, c, g, or t
  misc_feature (307)..(307): n is a, c, g, or t
  misc_feature (317)..(317): n is a, c, g, or t
  misc_feature (438)..(438): n is a, c, g, or t
  misc_feature (484)..(484): n is a, c, g, or t
tgggggaccaccttcaagaaaccctgtttnttgccaattcgggtaaacttcccgaaagtttntcgcgggcaggagcaaagggacttagcagtnactnttccaaagtttaattnttttgtnattttttagcgcanagaggcgatgatgttttntgttgggtgaaaagctgttgaaatnacgaaatctgtttggctttntagtttttntntaattttttttntntgaaggttccanatgtaaacaaggttatactntgagcaanataaaatccactttccaccagtnaaaaaaaaattggaaaatatgnagtatttctnattcttgtggccagtgtacgttttcaggtattttcccttgctgtatgttccagagcttcaaagtgttgttagcgtggcggccaggatgtatttgccgttcggggagaacttcacaaaaganacgggggggttgtcgtcatcgatgagcgtcttcaggcactggcctnaggcggtgtcccagaagc

SEQ ID NO: 532839 - DNA, 1162 bp, Homo sapiens
gctcgggcaattgggggtatggggttaggcttcgttatcttctcttcgtcgagttaggggttcaggtgccccagctgcttcgggctgacgagggaccttctgggcccccacattaagtgaggcagccaccatggcgagtctgacatggctgtcgagcgacgcgcgtgtctcccatctgttctccacggttcgcgtctggcccggcgggaagggagaagacactggcgtcaagcagtgtgccccgaataactcgctggacgggaggagctctcaccgatcgagtgaaagcgactatccaccgcagatgctatccacggcccggccgcactattgacgctggacggcgagctgagccgtgggagcacagaactcatggtagagacgggcaggaagcacgggtagcagggctttgacggccggtgatgtctagacctgggtgtgcccacccttaaccctacggggtaggatgcatgcaacactgattggaaaggtgtgcaagcggaattcttacacttggtacatcaccttgggaaccttttgtattatactacttcacgaaaatttcccgactttggactcacaatacgcattacgcgggtaagtattcgagggtgtgttgcccggccataatcccgggtggattcacgtgcgagtacgaggccggtacgagggaccccatgcgcatacattttcgagtgccgatacgccacggatgcgtaagtaccagtcgggccgacgcttggaccaaggtcgagcggtgcacattcccaagcgacattgtccaagggcgtggtccgaggccttgatattcctgaaggtccctgggagtctccgcgggttaaaagccgaaacgctcagagggcccgtttggaggcctggctccgaggggccggggaccaccgaggtgaccgcgcaagtagtgcccattcggcattccataacgtggcggaccaaaggggtgtaaaggattcaccagggaggttccacgccgccccatacgacaggaaaccggcggacgttaccccgggtgttccaaatatcccctgggggcgcggcggaaccgaagatagcaagagacgcagactgatttggaagaacccccacaattcgtgcgggcccaggggacataaccggagtggaggcccaggaaggaccgatgcgc

SEQ ID NO: 532840 - DNA, 167 bp, Homo sapiens
gtcatagtcatgtagcccacacctatacattgtcaccacccatcatagtaattacgggaacaggctgcccatcaaatgtagcctccttgtaattggtggccagcaatctgggtatcagccccttgagaagagctcctaacccttaaccagcgtagaacgggaatttt

SEQ ID NO: 532841 - DNA, 143 bp, Homo sapiens
acttgaggattctgtgcgcggatccttcggcgcggatccttcggccgcgtgatccttcggccgccgtgatccttcggccgcctggatccttcggcctgcggattccttcggccgccggattccttcggcctgccgtgattcct

SEQ ID NO: 532842 - DNA, 7725 bp, Homo sapiens
gtgggggacaatgaggatgcaggcacactgggcaagagggggttaaatgtcaggcaggataggtctgattgatggtactgggtgggcatcttatctcactgctgcaccatccccaggggtacagaaaggtctgaatgaatcccatgttccctagccctacagctgggcacgcagtaggggctcaggagatgctgtggaatcaatgaccagatgctgaatgagtccctcatggaaaaagctgatgcatggggcctctccttgcccctggagctagaggtaggagtcagggaaccccagagacatgccagctcagcaaggctaggccaaggaggatgggggtggttgtggaagcccagggtgattctcagtgtcctctggtcattgctccctcgtcctgtgaactttctctgagctcccactctgtaccaaggagaccctgtccacagtgagttggatactgccagtcccaggaggaagtagcccagtattggcctgtccaactgtgcccgttaagaggccatagtgcttccgtgctggttgaccaagagctgttatcccacagccccaccccctagggctgcagtttcacccccaaagccccagcagatttggctctctcccttcccctcccacacaaaccagccagtaaagagttgagagctgatagagtggcggcctccaggaccccaccctagggcagattctaactgcttgagactgatgatgagataatttgcagtgtcatccttgtgtctaatgtgagatgaccttgatttgaagtgtctggtgtcttgtcactgccttgcatatggttctgaccagtcaggcaggctgggactgaaggtggctccctggtgaacctagcgctgtgggagttcatagtagaatcggcttaggtgctgccacccaactcaactccactccctccctttctctcttctgcaggcagccatgagctccagccaccccgagccgggtccctgggcacccctgagcccccgccttcagcccctgtcccagagctcttccagcctgctgggtgaaggccgggaacagaggccagagctccacaagactgccagcagcaccatgtggcaggcccagctgggcgaggccagcaccagaccccaggccccggaggaagaggggaacccgcctgagagcatgaagccagcacgggcctctggccccaaggcgcgacccagtgctggaggccactggcggagcagcactgtgggcaatgtgtccaccatgggcggtggtgacctttgtcgcctgcgggcccctagtgctgctgctatgcagaggagccattcagacctggtccgtagcacccagatgcggggacacagtggtgctcggaaggccagtctcagctgctcagcccttggcagcagccctgtccacagggctcagctgcagccaggtggtacttctggccagggtggccaggcccctgcaggcctggaaagggacctggctcctgaggatgagacttctaactcagcctggatgctgggggcgagtcagttgtcggtgccaccactagacctgggggacacaactgcccacagcagcagtgcccaggctgagcccaaagctgctgaacagctggctaccaccacctgccatgctctgcccccagctgctctactctgtggcatgagggagatgagggaggtgggggctggtggctgctgccatgccctacctgccacagggatcctggcctttcccaaactagtggcgtcagtgagcgagtctgggctgcaggctcagcatggggtgaagatccactgtaggttgtctggggggctccctgggcactcccattgctgtgcccacctttggggtcccgctgggttagtcccagagcctggctctaggaccaaagatgtgtggaccatgacctcagccaatgacttggcccctgcagaggcatccccgctgtcagcccaggatgctggtgtgcaggcggccccagtggcggcctgcaaggctgtggccaccagtccgtccctggaagcgcctgcagccctgcatgtgttcccagaggtaactctggggtccagcctggaggaggcgccgtcccctgtgcgggatgtgcgatgggatgctgagggcatgacatgggaggtgtacggagctgcggtggacccggaggtgctcggtgtggccatccagaagcacctggagatgcagtttgagcagctgcagcgggcgcctgccagcgaggacagcctgtctgtggagggccggagggggccgctgcgggctgtcatgcagtccctgcggcgccccagctgctgcggctgctctggcgcggcccccgagtgaggagctgtggcccttggagctggcctgggcccactgacttagtcctagacctgggccagggacagtgggggctccgtgccccctggacccaccggcagctgggcacatgtctcacccgaatatcggctgcctccagaccacaggactgcagcctggggcttccggccccacacagctgggctgttttcttaagggcttgatttccaagggccacatctctgcaccttccaggctctgaactttgagacagggctttagcactgtgcagaggggagatcctgagttttctttaaaaaatgaccttttgttcactccaccctcagaactctgccatgttgcctcgtcagactcttggtggctttatttgaaatcagtgctgagaaatagtgaattctcgacatgaaatgtgaggccccagtgacagggactgcccaggtctttagggaaggggactgatgttatcagaggcctcctgtgtgccacatactgtgcttgtcctgtcttcacctcttcatcctggcaagccttcatttggcaaggctgtagccgatgtgccccacgctggacagcttgaagaggtgggactgagatccaaagccagggccggctgagccgagggtgttgccctgtagcatgtgcccggtccagtcagtgcagtcatgtatgaggagaatttactgagctcatactctgtgctgggttctgtggattctgtggtgaatgagacagaggctgcccctgccctggctgagctcatggtgtgggttggggatgacaggggaggatgctgaccattacggagggctgccaggcttccagggtcattgtgtcagaggctggtctgaggaaggggagaatgggtggccacctgccctaatctcagttacaaagcctaaaattgcactattttcacctcattctgtcggctgaaggatttctccccagctggtgcagtttgtggaaggagggagggcaggaatggagggggacagggcaggagtttgccctggccctggggtaggggctgtgaggctgtggggctcgcttgcccacatgacctgacctaggctaggcagtgggggccaggggccttggagagacagaaacatgggggtttggcacagtctgacttcattgcccaaagatttctcaaggcctgtgaagaatgggagtgggcttgtgttcttgtcctgggtctttgtcttgaagatcctaagatcccgtgactcagccccccaatccacccttgtgagggaccagagggctagtgtggggtcatggcccatgacctggcctgtttctggagcctcttctgcacctaggagcccaggacccccacagtggtggcttacttttccccatcctcaaggacctggtactcattgaggtggaaatgactcatgcaacagttggtgaatttgtaaagcaggagtggcatttcaacaggccacaaggacaaagtgacaaaggcgtgcgtcaggtcagatgcctcctgaagcccaacgatggaccattctcacccgtaaacctgcctttcccatatgcataggtgcaccccttgggattctggggctgtcagtccctttgtgtatggtgccagggcaggcagctcacgttctggggagtgacacatgggtatatgccatcttcatgcctggctccccatggagtctccaggaaccccagcctgttagggtcacatgagagagaacaaatggctgtgggtacatggggagggacctttcacacagggccatagctaagtagggtcttgaggatgcaggggttagacaggtgggtggagagagggcaggacctgcccggcagatggaacagcctggtcagatacttggatgtgcctgtcctgcccgggccatgatgagtttctgcagtggcggctcatttggagcgtttgttgggttgggaggtgaccaggggtccccattgtgaagatcctgatgtaaatgaggaaaggaactttaagggaactgtggaaggggttctgaggtgggaccagatttcagtttagaaatatccatttggcttccagtggagatgtgccaggtgacaccaaggaggggcctgtttaggggcaatggagtgggcagctgggggctgggttcatacacgtgcacacacacgcatacacaggcacacatgtgtgcaatggatttggggaggaggcatttcaggatgctgaggtttccagtttgagcaagaggagggtgaggccactacctgggacaaggtgaatggcatgttcagcaggtgcagaaagggccacatgccacagggtttggctgggaccagtgaaacctacttcatgaagagactttcttctgtgtcacatgcagattctcatgcattcacgctggctgggtgccactctgtgctacctccatgctgccctggcttgccaggatggcaggccgggctgggctcagccaagctcccactcacctcatcatcactgagatgagtatttgcagagcggtgctggaatccaacacctgtgtcttggctggggccccagacgattctcctggctaaaccacgatccttgtctccctagcccagttgcacagctgctgctgacaggtctacctgaagtgactgcagcctcatttctgattggaactggagacccctcccaaccccccttgctgtgccctctcctgggacaggcctgatgcctgcagtggtttagggccccagagcatggccagcggtttagtttacagatctcctccccttggactctagatttctggccagactttctgggtccctttcaggccctgctctgggaggtgttggagttcactgttgatgtgtttgtttggctttgaattcaaaatagatacaaatttggaggtgagagctttgccagaccccagcagggatggggcatcggtcctggctggtcttgtttattttgtcctggtaaattctgttctctggagcataaaccgtggagtcctagagccccttgtctcagcaggaatcccccctctgtctgctccaggggctccctgcttctgcccacctgctctccttccatggcattcaggacccccgacagctgaagcctctcttcatatagcttgtcccctctgggcctgcctgtcttgtgtccaggacacaagacacgcatcccttgtctggccccaggctgccatcactgtcacaagaaactcatagagtagagctggtctgaggtcacagtgctggtggtggtggaaaagcagggatggcctgttccactgtgatcttacctcctgtgtcacctggattgggtctctgtccccttagacatgctagatcctaactttacaagggctgaaggggtcttctacatgcaggtcccaacactttgggctggggttggccaccgtagcttagtgggctaaagctggagtttgaatctggatatataggatccacacctatagccatgtgatcttgggcaagttacaagccttgatcatcttcctcatctgtaagatggggatgacaatggtgcctccttcacatgcttggtgtggagattaaatagaataacccaagtagtgcctggcactgagttagtgctcagcacacaggctggtagtgttgggcacccctctcatagccacatttaggggccacctcttaccctgccagcttggctgtgatcacagcccacatcccacttccttaaaagtcccttgttcagagcctctttccaggttcctcgccccacagctttgcaccctgcctgggacttggccctctggctggggcttctgaaaatgtagttcccagagtgcactgaggagggctaccctagccctcaccactcatcttgggctgggttccccagaagcttctgctgagatgaggatgctggagttattagggaggggagagcaagttaagggagggacagaaggcaaggcagggtgtgatttcagtccaagccagaccctaaaggggagccctggatgcagtcccacctcagagtaaggactacccaggggtgaagatgtagcctccaggcacttctgctctctggcaggcaggctaggaagctctaggagccccagggtaggtttctgcatggagttgtagggcctattttgggggaagttgtgcacagaaaccaccagagggagtcacaggcatctgggggtgcacccattgacatttgcatccatgtcatgccaaacttgtagcccacaaatgcccaacccttttctccatgcattgctctgtctcagttttgttcacgccaagcagccttggttagttaaatgcagagcttggcatttgcccatgttaaattccttctcctttttcattctggcctggcctggttttgccatctgaagctatgatgagtcctttatcagttttcatccaacttgtcaggcagggcagggctggtatgaagcccaggacatatcgctgggacatcccataggtctgtgagattcccaggtccctccaaatccacacggtcatcatgggcaaattagtttaagtctgatctgttaagatccagatctctcacaccaacagcacacacccctttttcccatggccatggaaggagggtagcatagcctgactcgagtcctcgttctcagcagaactggttctgtggtggccacttccctttctcaacttttacctacttctgtttaataggttgttctgcaagtctgagagcaacggcaagcttagaagtgtggactcggcctggtacagtggctcatgcctgtaatcccagcactttgggaggctgaggtgggctgactgcttgagctcaggagttcaaaaccagcttgggcagcatggcgaaatcccatctctacaaaaaatacaaaaattagctgggcatggtggtgtgcatctgtagcctcagctactcagggggttgaggtgggaagatggcttgagcccaggaggtggaggttgcagtgagccgagatagtgccactgtgctccagcctggatgacggagccagatcctgtttcaaaaaaagaaaaagacaagaaagaagtatggactctaccttcttgcccttgtggagattgggaactgcctgcccttggcctctttcctgtccatcttgtattatgaaaggctgtttctggcacacccgggctcctctgtgtggtttctgggaagtgactgagggtcaggggaatggagcccctctgcagccggccgctggtaccttccctattgaacccttctttaggcttgctcactctttttgatgggtgtctttccaaagctggctggggacctccctgattgagagacatggggccagttctgttgctgtggctacacgggaataataaagcagaagaacacctgaggaaagctgatgtttacta

SEQ ID NO: 532843 - DNA, 1460 bp, Homo sapiens
cgctgctcctagccctccgcactgcgccacatcaatggcatgcgtgggtggaatctgatgcgcttccatgggcacgctggctgtgtgcatcctgcaccccatacgtctgctgcgtgctactgtgctgatgctgtgcttggcatgctgtggcttccctgacacacggatccacacgtgcatggcccctgtgatcactgtacatccggtccagtacatggtcatgctgtaatgtgagacagccgttcgtaggacaccgcgagataagcgttgagcgcgagcacatccagaaagcgaactatcagtctaagaagatcgtacacgggtcaaattgctcaataacctcacacgcacaccgaatgcatagtcctatgaatgcacaaaagcggcgagtctaaatccgtaggctaacagtcaatcatcacccacaagacttgtacaaggaaccgagtccacgggaggaacatccccaccgcacacgcacaaacgaggagccaaaaacaacaggaccacggcgaacacagccacgaagacgaggagacacccacacagccgaacaggaagacgggagcgagcgagccaggcgacaacacaacaagcgacacgcaccagcgacccaaccagagcacgataggcggggagcagatatgaacaagagacttgtagtcccaccagacgtagtagaggattgaggtagagcaggacagaagtacatacgacgcaggagagaggaattgatatgggagcagcataggtgcagtacggacaggagcgagtggcgggcaccaagccatacgacgataggagactctgaccaaaagactacacacaagaagagcagaaggagagacagatgagagggaaagtgcacacagaacttggcaagccaatcacagatgaaagttcgacgaggacattgggaaagatgaatgcaacacgacaataagaagagaagagtagaagatcaggcaataatccacgaggcagaacacggaagaaagaaagccgccgcaagcacgcggggcagagggacgccgggagccgcggggccagacgcccgggacggcggaacaccgggcggccgcaccgcggggacgggggcaccacgggggggggggggccgccagccgagtgcggagggaagggcggagcccacccgggcgccgagggaggagcgcgcgcgccaacgggggggcgaccacgcgacggaaacacgggccagacagccccgaaccaggagggccgagcgccagacaagaggaacagcgggcgccggaagggggggggggcagacagcaggacagagccgcgcggagtgacgggcgcgggagacggaagccccgcgggaccgagggagcgacaggggagcggaggagagggaacgcggggaggagaagagagaagagcgtagggggccagagcgcgccgccacgcgcgcagggacggcgggcgccgcggaccgg

SEQ ID NO: 532844 - DNA, 4959 bp, Homo sapiens
gtgggggacaatgaggatgcaggcacactgggcaagagggggttaaatgtcaggcaggataggtctgattgatggtactgggtgggcatcttatctcactgctgcaccatccccaggggtacagaaaggtctgaatgaatcccatgttccctagccctacagctgggcacgcagtaggggctcaggagatgctgtggaatcaatgaccagatgctgaatgagtccctcatggaaaaagctgatgcatggggcctctccttgcccctggagctagaggtaggagtcagggaaccccagagacatgccagctcagcaaggctaggccaaggaggatgggggtggttgtggaagcccagggtgattctcagtgtcctctggtcattgctccctcgtcctgtgaactttctctgagctcccactctgtaccaaggagaccctgtccacagtgagttggatactgccagtcccaggaggaagtagcccagtattggcctgtccaactgtgcccgttaagaggccatagtgcttccgtgctggttgaccaagagctgttatcccacagccccaccccctagggctgcagtttcacccccaaagccccagcagatttggctctctcccttcccctcccacacaaaccagccagtaaagagttgagagctgatagagtggcggcctccaggaccccaccctagggcagattctaactgcttgagactgatgatgagataatttgcagtgtcatccttgtgtctaatgtgagatgaccttgatttgaagtgtctggtgtcttgtcactgccttgcatatggttctgaccagtcaggcaggctgggactgaaggtggctccctggtgaacctagcgctgtgggagttcatagtagaatcggcttaggtgctgccacccaactcaactccactccctccctttctctcttctgcaggcagccatgagctccagccaccccgagccgggtccctgggcacccctgagcccccgccttcagcccctgtcccagagctcttccagcctgctgggtgaaggccgggaacagaggccagagctccacaagactgccagcagcaccatgtggcaggcccagctgggcgaggccagcaccagaccccaggccccggaggaagaggggaacccgcctgagagcatgaagccagcacgggcctctggccccaaggcgcgacccagtgctggaggccactggcggagcagcactgtgggcaatgtgtccaccatgggcggtggtgacctttgtcgcctgcgggcccctagtgctgctgctatgcagaggagccattcagacctggtccgtagcacccagatgcggggacacagtggtgctcggaaggccagtctcagctgctcagcccttggcagcagccctgtccacagggctcagctgcagccaggtggtacttctggccagggtggccaggcccctgcaggcctggaaagggacctggctcctgaggatgagacttctaactcagcctggatgctgggggcgagtcagttgtcggtgccaccactagacctgggggacacaactgcccacagcagcagtgcccaggctgagcccaaagctgctgaacagctggctaccaccacctgccatgctctgcccccagctgctctactctgtggcatgagggagatgagggaggtgggggctggtggctgctgccatgccctacctgccacagggatcctggcctttcccaaactagtggcgtcagtgagcgagtctgggctgcaggctcagcatggggtgaagatccactgtaggttgtctggggggctccctgggcactcccattgctgtgcccacctttggggtcccgctgggttagtcccagagcctggctctaggaccaaagatgtgtggaccatgacctcagccaatgacttggcccctgcagaggcatccccgctgtcagcccaggatgctggtgtgcaggcggccccagtggcggcctgcaaggctgtggccaccagtccgtccctggaagcgcctgcagccctgcatgtgttcccagaggtaactctggggtccagcctggaggaggcgccgtcccctgtgcgggatgtgcgatgggatgctgagggcatgacatgggaggtgtacggagctgcggtggacccggaggtgctcggtgtggccatccagaagcacctggagatgcagtttgagcagctgcagcgggcgcctgccagcgaggacagcctgtctgtggagggccggagggggccgctgcgggctgtcatgcagtccctgcggcgccccagctgctgcggctgctctggcgcggcccccgagtgaggagctgtggcccttggagctggcctgggcccactgacttagtcctagacctgggccagggacagtgggggctccgtgccccctggacccaccggcagctgggcacatgtctcacccgaatatcggctgcctccagaccacaggactgcagcctggggcttccggccccacacagctgggctgttttcttaagggcttgatttccaagggccacatctctgcaccttccaggctctgaactttgagacagggctttagcactgtgcagaggggagatcctgagttttctttaaaaaatgaccttttgttcactccaccctcagaactctgccatgttgcctcgtcagactcttggtggctttatttgaaatcagtgctgagaaatagtgaattctcgacatgaaatgtgaggccccagtgacagggactgcccaggtctttagggaaggggactgatgttatcagaggcctcctgtgtgccacatactgtgcttgtcctgtcttcacctcttcatcctggcaagccttcatttggcaaggctgtagccgatgtgccccacgctggacagcttgaagaggtgggactgagatccaaagccagggccggctgagccgagggtgttgccctgtagcatgtgcccggtccagtcagtgcagtcatgtatgaggagaatttactgagctcatactctgtgctgggttctgtggattctgtggtgaatgagacagaggctgcccctgccctggctgagctcatggtgtgggttggggatgacaggggaggatgctgaccattacggagggctgccaggcttccagggtcattgtgtcagaggctggtctgaggaaggggagaatgggtggccacctgccctaatctcagttacaaagcctaaaattgcactattttcacctcattctgtcggctgaaggatttctccccagctggtgcagtttgtggaaggagggagggcaggaatggagggggacagggcaggagtttgccctggccctggggtaggggctgtgaggctgtggggctcgcttgcccacatgacctgacctaggctaggcagtgggggccaggggccttggagagacagaaacatgggggtttggcacagtctgacttcattgcccaaagatttctcaaggcctgtgaagaatgggagtgggcttgtgttcttgtcctgggtctttgtcttgaagatcctaagatcccgtgactcagccccccaatccacccttgtgagggaccagagggctagtgtggggtcatggcccatgacctggcctgtttctggagcctcttctgcacctaggagcccaggacccccacagtggtggcttacttttccccatcctcaaggacctggtactcattgaggtggaaatgactcatgcaacagttggtgaatttgtaaagcaggagtggcatttcaacaggccacaaggacaaagtgacaaaggcgtgcgtcaggtcagatgcctcctgaagcccaacgatggaccattctcacccgtaaacctgcctttcccatatgcataggtgcaccccttgggattctggggctgtcagtccctttgtgtatggtgccagggcaggcagctcacgttctggggagtgacacatgggtatatgccatcttcatgcctggctccccatggagtctccaggaaccccagcctgttagggtcacatgagagagaacaaatggctgtgggtacatggggagggacctttcacacagggccatagctaagtagggtcttgaggatgcaggggttagacaggtgggtggagagagggcaggacctgcccggcagatggaacagcctggtcagatacttggatgtgcctgtcctgcccgggccatgatgagtttctgcagtggcggctcatttggagcgtttgttgggttgggaggtgaccaggggtccccattgtgaagatcctgatgtaaatgaggaaaggaactttaagggaactgtggaaggggttctgaggtgggaccagatttcagtttagaaatatccatttggcttccagtggagatgtgccaggtgacaccaaggaggggcctgtttaggggcaatggagtgggcagctgggggctgggttcatacacgtgcacacacacgcatacacaggcacacatgtgtgcaatggatttggggaggaggcatttcaggatgctgaggtttccagtttgagcaagaggagggtgaggccactacctgggacaaggtgaatggcatgttcagcaggtgcagaaagggccacatgccacagggtttggctgggaccagtgaaacctacttcatgaagagactttcttctgtgtcacatgcagattctcatgcattcacgctggctgggtgccactctgtgctacctccatgctgccctggcttgccaggatggcaggccgggctgggctcagccaagctcccactcacctcatcatcactgagatgagtatttgcagagcggtgctggaatccaacacctgtgtcttggctggggccccagacgattctcctggctaaaccacggcagcatggaggtagcacagagtgcacccagccagcgtgaatgcatgagatctgcatgtaaaggaa

SEQ ID NO: 532845 - DNA, 348 bp, Homo sapiens
tcaccacggtcccccctggctgctcaggtctgttgattgaatagtattgcttgagctcgccacagtttgctctaagtcttatgatactataacttggtatttaatagtatctcgaaatgtgcttcgttttatttttctttcttatggtggatcatagtaatgcagctgtgatgtgatttgaaatcaaaatgcaagatccgcagtcttcgttatgaggtcacaataggagcacatggaaattcagtgatttttctctatcctaaagactgtggtgtagtccttgtggaactggagcaagcttgatttatatttgcaagctactaaattaatagacctgagcaagccagg

SEQ ID NO: 532846 - DNA, 250 bp, Homo sapiens
gagagagagagagagagagatattcacctcgccttatttcgcggcagtctggggtttacatgtactgccctagtctactccttcctcggcttaggacattcgtcgtacccgactttcgccaggaattcgatatgccttggctcatcatcctcatcgttgcctgtcagcggatcgcctctcgtcagagcttgcgccccgacctggagaggccaccgcctgctgattcctctgcttccacatcggaccgtct

SEQ ID NO: 532847 - DNA, 111 bp, Homo sapiens
cacgcctgcaacgacacttgaggactacacgaatcgtcgacgcaacagtttacctaacgacaacttacacgctaagacataggacgacggaacgcctttgcgtactttaat

SEQ ID NO: 532848 - DNA, 178 bp, Homo sapiens
gagccccgtcctcttagaggcaggcacacgactggtcgatggggcagtggagatgggaacacggaggggggctcagaccatgaaaacattggaggatcttagcgggactttggctgatccatacagatatcgtagttgcttagatatgcttattgttttcatcccagggatcctctag

SEQ ID NO: 532849 - DNA, 526 bp, Homo sapiens
tcctcaaaccgtatagaactagtctttcctcctctaatgttatctttattgtttttttgagatggagtctcgctctgtgttcaggatggagtgcagggtgcgatctctgctcactgcaacctccacctcctgggttcaagtgattctcctgcctcagcctccccagcagctgggattacaggtgcgcaccactacacctggctgatttttttgtatttttagtagagacggggttttgccatgtgggccagactggtttcgaactcctggtcttaggtgatccacccgcctcggcttcccaaagtgctgggattacaggcaggagccaccgtgcccagccaaagggccaaaggttttttttttggtttttggtttttttggtttttttggagacagagtctggctcggtggcccaggctagagtgcaggggcgccatctcggctcacggcaagctcggcctccggggttcacaccattctcctgcctcagcctcccgagtagctgggactacaggcgcccgccaca

SEQ ID NO: 532850 - DNA, 187 bp, Homo sapiens
ctcctctagggtgaattctgcttcacaattgactaggacacgcgacatcgcatggctcacacagcgacgttgtctctgaactgcttgtgccggcacgaagccagttatcccggtgttgcgctcgatccttaacacccaaacggtcagaaggagagcgcaacaccgtggcggggcgcaacaccgggcg

SEQ ID NO: 532851 - DNA, 496 bp, Homo sapiens
gggatggacccccattcctgttgagcaactgattccatatgtggatgaagatggctcaaggaacgacgaccgggctggtccacctcgttttgctagcggaagagagacgagaaattgtagaagtaaataagaaactcaaacagaagaatcaacagctgaagcagattatggatcaattacggaatctcatctgggacataaatccatgctggcaatgaggaactaaagcgatatttaaatctcctgctctactcatgtgatgaagttgggtttttcccccctcttgagtattcctccctttgaaaaacgttatttatgtctttattttaacagctagcactaaagtttctgttttcactttaaagtatttactagctttttttttaatactgtgggttttatgaaagattattgtaatacctttgatagggtataaattttggttaatcttcagaaattgaataaattaaaaaatacaaataaaaatttaaacatt

SEQ ID NO: 532852 - DNA, 160 bp, Homo sapiens
ggccgcatgggtaccatactcctgtgatgcgtccatatatccgtgtgacctctcctactattcacccaacctcctccaggcattccggttcgttaagcagacgcgattgactggcctagcggtgacatcctcgtcctcattcttcacgcacggtaacata

SEQ ID NO: 532853 - DNA, 419 bp, Homo sapiens
ggaaattcggccattatggccggattgagccaggctggggaggtaccgtttgcggttgcccaccgccctaaattaatggaagggggggttgagttggcctttaagggggacttaagaaaggctttggaaaaactttttggatatcttggaaaatgtggcccaccaaggggttgttgaaacctaatggatttaaaggcctttggataagccttttgttaacattttggggaaggcctgaagtttttagttggggattatggccagagttttttattacctaaggcaaatttaattttttggtcctagaaaaaaatttgaccatttaagttctgggttttaaaatggttatttcagaattagttaaaggccttaattaacctaattaatagctttggccatttggccaggggtgtcctccc

SEQ ID NO: 532854 - DNA, 436 bp, Homo sapiens
  misc_feature (10)..(10): n is a, c, g, or t
  misc_feature (98)..(98): n is a, c, g, or t
  misc_feature (118)..(118): n is a, c, g, or t
  misc_feature (218)..(218): n is a, c, g, or t
  misc_feature (224)..(224): n is a, c, g, or t
  misc_feature (263)..(263): n is a, c, g, or t
  misc_feature (265)..(265): n is a, c, g, or t
  misc_feature (274)..(274): n is a, c, g, or t
  misc_feature (281)..(281): n is a, c, g, or t
  misc_feature (342)..(342): n is a, c, g, or t
  misc_feature (414)..(414): n is a, c, g, or t
gaggtgccancaatggtgtgctggggtgtgggagttgactttagaaaaagtgtgcactacagaccagtactcaatggaagaagtctcgtaggctaganggtgagggtggctccaggtngccatggcgctcagctagcaggacccgtaggcaggaggaacagctcattgggttactgtgtgagttatccagctgctgttggagtgtccgcctgctcgcntctccngctgcaccctcactcagctcactttctgacgtgtctcancntgtcttctncttcttnattccaaagcctggggaacgagtatagggagctctgcctgttggagctccctgtccttgtnctgttcttgttctttctcatcgctctccttgccagctttctcctcagggtctgtctcactctcaggactatncgacttgtgtcttctcttctta

SEQ ID NO: 532855 - DNA, 126 bp, Homo sapiens
  misc_feature (117)..(117): n is a, c, g, or t
  misc_feature (122)..(122): n is a, c, g, or t
ctacgaccgacccacgtacttggtactctggctctgtgacagccacgttacccttcggacacacacacgacgttggtacgctcttgactggggactcctctacgacgtcgaccctgnacggnacct

SEQ ID NO: 532856 - DNA, 306 bp, Homo sapiens
ctcggatcttcaattgtctctctcatataaatgctgtaggggttatagttaaatgtcctaaagaagtatagttgaggcgggtgacgggcggtgtgtactgcgcttcagtggcccatgatcaactaagcactctactctcagtttactgctaaatccaccttcgacccttaagtttcataatgggctcatcgtcagttttcattggggtagcaacatgtagcccatttcttgccacctccatgggctcactacttgcactcacttctatactgtgggtacttgcgcataatacttagtagcctatca

SEQ ID NO: 532857 - DNA, 126 bp, Homo sapiens
acccacccatcacgggcctacccggtgctagctagctggacactgtacccgggtatctgcggctgtatttgcacacccatcatcatcacctcctatggtgcaaggtagaacaaaccaatgttacag

SEQ ID NO: 532858 - DNA, 318 bp, Homo sapiens
tgtcccagagctttttggcccctgggtttcactcctgagtggggccagggtgggagggagggccagggggggggaaaggggcgggcccccccgtgaaagaatttgcctgtggccttgcccgccagcctcagggccccttgacattccttgtccccagcaactttttgggccccctgggtgtcccctgtccccccaattttgccctccatggcccccccgtgccccccgtgggcagcctttttgttttaagaaaagcagacgcagcagttggggcccctcccaccctcaatgccctgccttttaatccgcaaccagcca

SEQ ID NO: 532859 - DNA, 90 bp, Homo sapiens
gtggacacagccacatattactgtgcacgcagacaccgcgtttttggatattttgactcagtccccctttttgactactggggccaagga

SEQ ID NO: 532860 - DNA, 763 bp, Homo sapiens
  misc_feature (196)..(196): n is a, c, g, or t
  misc_feature (267)..(267): n is a, c, g, or t
  misc_feature (287)..(288): n is a, c, g, or t
  misc_feature (398)..(398): n is a, c, g, or t
  misc_feature (401)..(402): n is a, c, g, or t
  misc_feature (404)..(405): n is a, c, g, or t
  misc_feature (407)..(407): n is a, c, g, or t
  misc_feature (410)..(410): n is a, c, g, or t
  misc_feature (413)..(413): n is a, c, g, or t
  misc_feature (427)..(427): n is a, c, g, or t
  misc_feature (468)..(468): n is a, c, g, or t
  misc_feature (474)..(474): n is a, c, g, or t
agcggagtggacctgctgtgtggcaggctggctggcctcgacagcggtagtgccttctactccgcttttttagtttcctccgccccctcccgtgggacgctgttgtgtggctgccttaaaaaaaaacgcaactttattgttcctcagccccacctccggctcgagcgtggcgtcctcaggatgcactgaggctgangggaggggaggcggcggagggtcgaggtcgcggtccctctcctccgagcgcccggctggaggggagggagncacgatgtctggtagccgcnngccgggtcgggctccgctgggacaagccccgggtcctcggcggctcctcggtgacttccgcctcctcgtctttatcctcttccccgtcgccgccttccgtggcggtttcngcnncnncnctngtntccggcggggtggnccaggccgccggctcgggcggcctcgggggcccggtgcggnctgtgntggtggcgcccgccgtatcgggtagcggcgtgggtgctggttgtccacctggcctgtcccggcgacacagatgcgcgggcaaggcccagcgccggcgtaaggaggcagcagctccagcctaagcagcaggacagaggaagcgactctcctcgcccgccctctgcaacgggctcatcaactccctacgaggaccaacaggcgacgactacgtattgccccatctgctatgatatgattgacagaagcatacatgacaactgtggcacagcttttgctacacaggtgtatc

SEQ ID NO: 532861 - DNA, 2084 bp, Homo sapiens
  misc_feature (355)..(355): n is a, c, g, or t
ctatctgggtgcaggagaaatgtgtagtgtcttcaaattcattattccatcagtatcgttcaagtacagtcctgattgtcgtcataacttgtggttgaccgaatcccagtcggacatgcattaacgatatgttaacctggaaacgtatacatggattaactcaatcgccgcgtgaataggaagtggatgtcaatctcgtgattcgtgctagatttcgcttactcttatggctgaaaaacttggtcgattcatccctagcagctgcctatggtatggatttgtgggggaaccatgtgcggacgttcaagtgtggctcgtgtggaagtggctgtgaagtgatggcagggtgatttgntcatccaagtgaactttgaattccaggaacactgggaacctgacaagttgaatacgtgaaaaattggaaaggaaagtgtataacgactggtggttgacaagtgcctcatgcaatgtcattcgcatgctgaatagaggtattattaccaaagcagggtcttacctaggattaacgctgtggctggatctgtattgtagatccatgtgtgcacacatagatctatcccagggattcatcccgtgtcaacaatggtaacaggggatgtctggcgttgaagaatggagtctgaccgtggacccgttccattgttattcctcaatggcccgggggatttaagccagacgtttttcgaacctgcatagctaagggatctctgaagggttgtccaggtcgagaaacagtgaagaatacccgtggggcactccggaaggcgctcaaagaagcgcgtgtataaagtgagcccaggcgggggaaattcacacttcagggggttatcccgcgtgtgataacacgcggcatgtcaaacccaggggaaggcgaacccacaactcgcagttaactgtgcgcaaaacccgactccggtgattgtgactccgccccagccaaatatgctcttgggaaaaacgacgacgggatcgcccacccacaccaaatgcatagctggctattcgatgttgtatgtatgtatatatttattctgttattgtctattaccaccacagagctagcgacccatcgctcctagcactccggcacccaccgcccgtaccctacctgccatgccgcagaacctaataccaatgcatcatactagcgcagaccgaagacctagcactgccagacacgacctcgaccgagaacaacccaggtcacgaggcgagaatcgactaatgcagtgagcgagagcggggtggatcacgacgggcgtgctacgggtggagatgatggatgacggagcggctagaaggcgaagagtgggaggcagtgccgggctgcggtagcgggtggacagtatgcgacagacgctgacggatgctggagtggctggccgagcctctcgtgctcggctcgtgcgcagatgcgaccggcagtgaggcacgagggcgcgaggagaggaggacgggagcacggtgagacgcgcgcagcacaaccgcggaagagggcggcgaggggcagcgggcagagcacggaggggggagtcggggcagagcggggggagcggtacggggcggcgcgcgtgcgaggagcacggggaccagcgacacccgagagtgtgtcggacggccgacgcagcgataggcgccgagaggcgggacgggagcgcgagcagcagggacgagtcacacaacgcgacggcgcgcacacaggcggagcgccgatggacgatgagcggatgggccgcgcgagcggcagcaagctaggggctaacagcagcaagcgcacaggagcggcacaacgagcggaggcgaaaagcagtcgcgcggactgcgcaggccgcgcctgggcagcacgaaccgaccatcaggcagacgtcagccgaaggaccacaagcacacacgcacccgcagccacgcgctgcagcgcacgtcggacatagcgcccacgcaacgacagcagagaggccgagccggcggggacgccgtggcgggcgacccgacgccccacagaacactgcggtcgggcacgcatcccacgcagcgagcgaccgcactcgcgtaccgccgaatgc

SEQ ID NO: 532862 - DNA, 166 bp, Homo sapiens
  misc_feature (13)..(13): n is a, c, g, or t
ccccccggggggnttttttaaaaaaaaaaaaaaaaaaccccccccctggggtttttgggcccccccccccccaaaacccccttttttagggggggttttttttttccccatttttttccccccctttttttttttttttttccccccaaaggccctttttttttta

SEQ ID NO: 532863 - DNA, 160 bp, Homo sapiens
ccccggagcagggaggcagccggcaaggcctctagggagagagccccccactgcagacgtgacccgagtaacttggctgctgatgaacaaatctggcaccccgacttcgagaccgtgcggtgggcattacacaccgaccccgccatagccaccgggctcc

SEQ ID NO: 532864 - DNA, 120 bp, Homo sapiens
aagttccggaagtttaatattccccgaatgtggtagtaaaccttaagtttggcaaaaacaaagagtttgtctccctacctatgagagtctcgtgtctaaacgcgggtcttttttcacaga

SEQ ID NO: 532865 - DNA, 826 bp, Homo sapiens
agcttgtcttagaaagccacattatggagtcatcaagcctgctggaacctgatggggcagctttttgaacagcttactggaagtaagaacttcagttgaaaagcccttatgatcgcttcagcccgggacatgcccttcagatggcttattctcacgtaaagcttgtatgtagactgtgacactgtatatgtgtgactcgtacaagcagtgacgtgtgtctgaagtggtgtaatcgtataggtattagcttcttggtggaagtgcaattttgtatactaaaaacatggcttatttgcagtggaatatgttataaattgtggtttatattactggtattagtcttagcctaatgaacctaattattgcccatgtctgtattcttggcttcctcaaagtagcatctgcgagaaatggcatgagcaagatcagatcatgtgttcaagtagtacataggctgtaatcacaaatcacttgatcacagatgtatataatccctggatcatatggtgccaatgtcagtggtaactcccatttgcatcaaacctatgataggactggaagtaagaccacatggggtatgtgtcgtacagtgtttatcaaagccatagcaggcgaaccacaatattgtccacgacggaccaaacacacgacggagcccggcgcaaaagctacaaacccgaaagcgcagaaagcatccccgtcagccgcggacacggccaaacgcgcgcggaacagagtgacaacaccaaacgcgatcatacttacgctcagtacaaacacgcaaccgaacaagcaaaaaagcagaaacaacagaccccacaaacaa

SEQ ID NO: 532866 - DNA, 412 bp, Homo sapiens
aagcgcactggcaacagagaacttccctgagactgggtaatttataaagcaaagaggttgaattgactcacagtgccacatggctggggaggcctcaggaaactgacagtgtgtggcggaaggcttaggaggcatgtcttagatgacagcaggcgagagagagcatgtgaaaaaggaactgtcgaatgcttataaaactgtcagatcttggtgtgaactctctcactattacaagacagcatgggaggaaccaccctcatgatccaatcagctcccagcaagtccttccttcgacacatggggatgatggggattacaatttgagatgagatttggttggggacacagagtcaaactatatcaaagaaagtgatgcaacaggtaatatatcaccggtagcagtgtgcttccg

SEQ ID NO: 532867 - DNA, 229 bp, Homo sapiens
gtattactctcctcccatgatgcgagaggaagcttcgtattctgatctctgagtgaatcccttgttctctgtttaaaaaaatctaaaaagaaaaaggaaaaaaaaaagaactgctgtgggattggtcaaccacgcttacctggcaggaatgtttcaagttctagataaactccgtgatggaaactgggtatagatcagaaattcaggtaccactccacattgtggaata

SEQ ID NO: 532868 - DNA, 1042 bp, Homo sapiens
cgctgtttaccccgggggtcccacatctcaccggaagtaggggccatttttctagacacttggttcctctaagggggcccctagacacaatgtcaattgtttagaagtggtagcaccctgggcccatgttcttaattcttggtaacgttaccttgttgggggaatactcctcgccctgtttgaaccacacagtcttaaaggctttaaacaatgtctggtttttgtctttttatccccgtttttttttgtggagtgggaaaaagttttttaccaacaccaccattgtgtgtatttggggggccccccctgttgttccccggtctgggggtgtcccgtggggtgcctggctcgtggcatctccaggcgctaatcgtcacactcgtgtaccccccttggaattgtggggaaacacttaccgcgccccacgaaaaggaatttttgccactgagatttcgggatttcccacgtgccacttgttccacactggagagggtggtgggtgaaaccccacctatctggcaaatttttgtgtgcctccaatacgctcccagacccaccccatcttgcggggaatgtggcctatattagggcctcccctatagaatctccacgattccctcggggagaagccccacggcccctctcacggtggcccccaccaccaccactcctttccctctgaacgccctgaccactttttagggcacacacacgtgagggcactctttccctggaggaccccgaagccacgaccccgtccctgccccacgggcacgcactggcacctccacggaagaaaaccacggctggaacactcggggcacactcgtttctggggaaggcctggcctatacacgccaccccaccctgaagccctcccggccacagcttcgtgctggggtgggccacagtgccacggaaccacgaagggtcccccgcggaaagccagcccccggagctcactcgtgaccacttgagagtcccccactggagagggtaggggtggctaataaacttttcccaacgattgttgtcattttta

SEQ ID NO: 532869 - DNA, 1341 bp, Homo sapiens
gcttcagtgtgttttttcggctggcttgtctgggctgagctgtggtgcgagcccgttttagcgatgcgccgtgtaagtcgcctttctccatctgtattacgggttagtcttcctcccgttgggtgggtcatctttttctttgtttagttctctcggcgggtgcgcccgccggaggcgctcctggttcttctttggggggtgcgtaataaccgtggtagtgctgtttgttggttcgcaccagacggttgtgttttcacctcggggggagttctcccgtcggccattgctgttgggccccgctcgttaccccggggcccaacatgtgggcgccaactgtgggtcacagcgccccttttgccaccccgctgccgctcctgtgggagagtgtgtgtcgcccactcgccctgcccagaaaaagtgtggaatataaatggtgtgttatcccccgacggagttgtgtgcacaagtttttgtcccttctctaccacaagttgttgggaaaccactcgtcgtctccgtgatgatttggcgcatctccccaaaagtgtgccctgtggacacgaaaattgcctgaattgttttctggaattggcccaagaggagacttcccctcgcacgggtttttttgaatgccaccccaccacaaggctgtgtctggaatgttccagctgagaagaggcgcactctgagggcacaacacgccacggttatccccgccccacaggttcacataaggtccgattcgcaaaggaatggttctccctctttaacggtgtcaccgctggtttccccgtccaatatggagccttccctgaatgaatgatttactccaagtaagccaccacgaccgggtatattcttgttttttagggaaaagtgggaaagtcccacctaattcctaaggtgggaaaatggcctgtttatactcgagtggcaccacattgctataatgcaccacaagagagatataccacaacccaccatccctcctttcttgttcttggagaggtgccatttgacaccccagatggagactgggattctgctggccagggtatagcccacattcccaaggcgtccaatctcacccaaacccatctcaaccagggacccccagtctacaagccctaccaccccatttacaccccagtccagtgcccttttcccaccaaattttccccaggtaactagcgttcatgggatgttgctgggttacccatatttcccattccttggggctccccagaaatgggaaatacccccaccccggttcggcacctttattgccagaattaccaattaccaccattccaattaaacttaaatatgaattcatctgtt

SEQ ID NO: 532870 - DNA, 406 bp, Homo sapiens
tttgtttttccacctggggttttcaaaggagttcagggttttgtaatctcatactggccaagccgcgccgctgcctaaatcgtaagaactttaatggacagtttcaatgaagggggctgttgtagacttaacccccagtgaaggcccagccagcaggacaagtcgttgaatgttctcttaagaaaatgatgctgctcatcgcagcttcagcatctcgtgtttgggagtgcggggctccctctgctgatctcagtttcctggcttttcctccctcggcccctgctcaccgctttgctggcgtgtgtagtgatttggtgagaaatcgttgctgcaccgtgcccccagcgccagtgtatgagtctcaagttttattagtgcaataaaagtgctttatgccggcttttct

SEQ ID NO: 532871 - DNA, 269 bp, Homo sapiens
  misc_feature (74)..(74): n is a, c, g, or t
tattggaattgtcaattgagattttatgttatccaaaacaaatatttttctttgtttttaaacatcctacttcncattacttatctacttatttttacttttatttgtaacttaattccatcaaggagagagagtgcattttctgttattctaaatttttgaagaatgtattgattttttatgacctgatatatggatgatatgtagatattacatgtttgtattatcaaatttcatggtgataataaaataaatacttataatattta

SEQ ID NO: 532872 - DNA, 985 bp, Homo sapiens
  misc_feature (495)..(495): n is a, c, g, or t
  misc_feature (977)..(978): n is a, c, g, or t
agctgtaggactatacatcatgaatccagtgatgatccgccagagtaccagcctcacttggactctcgcagtgagactattggagctgtatacatgctatggcggtgggaagagtttgccattgtgtacataaaagtgcgtattaccaggcgattatcgagcatcacatgtgagatctgttccctggaccacgagcgtgatacggggcattatctcacgagatgaccttatatgtgcctattcaccgcctgtgttcaatacatgctcagcgtggtgctgtcccctagtggtaaatagtgcgcgtccaaacagctatgtgcatgtagccctcagagttccaagatactttattaatatcaagagttgagttagaccgcacaagtgtggttcacttggaaactgttgtgtcgatcccctccaaatgcaagctcgaagcgttgtggctctgcgggcatggggattgtcctgagcatgagtcagtagcatgagatcccncggatcttgtaacgctgtgcagtcgtgtgccagtccagcagctttggcccttcgtagtggcaggtcattcctcagtatggcaggggtggtgctataatacctggcaggggtcgccctgaccactatggataatactctctatgcagtgagtggattatctgacatgagcaaagaggaaatgtcggtcggcacgccatatacaggaagtcgtcaaagcataccgtggccggcgacagtaacccagatagtattgctgcagagcccaagagactcattgcggcgtaaggtggcgttgccgaaaaagagcccgggaaggcagtctgacaccgcaagcggagtctcggtctcacgggtccggtaaataaccccgctgatgaaggggacactatccactacgcctcacgatagcacatcttctgacacaccaaccagagtcgcacgtagagatacatcctctcttcatctagatctactgtaccacnncacctgc

SEQ ID NO: 532873 - DNA, 146 bp, Homo sapiens
ctaacacattattatgtttattaactttgagacccagaaataaattcttcttctcttcttgattcttgctcttaaaaatacaaaaaaaaaaatgtctgtctcgtgttattttgggttgcttattggggggctttttaattgtcagg

SEQ ID NO: 532874 - DNA, 1091 bp, Homo sapiens
taaagtgaactatgggttgtagagatgcgtctgaatgagtggcagactagtacatggtagtgtctgacttatatctggtgtagtgcgttccatctatttgatgagggtcttcaagggagcgcagaaaaaaaggcgcggcgggggcaatatcctcgggggaggcccattttgcaacgggagtcttcttttgtcgaagtgctgttatccttaagagatgaggagctcgggatagataggtttaagagcaaacgtgtggcctgacgtgttgtaacaaccgtgttgacgctgggggacactagcggggaaggaagccaaacttgggtggaggggagccttacttgtggggagtggttaacctaacatgggatcaaaggtcatctaggggagaattaaaaaggctcctaggggtagtataaagctgtttacacgttgttttacaatgttggttgcttatttggcatttggggtgcgcgctgggacaaggttctgccgcaccgtgtagtttatgacctcgggggaccattttttattaccccccgcggacctagtcttgaaaaaacagcccaaccaggagaacaaccagaggcaagcaacaactaacgagccgccatacacaacacacacaacatagcccacacacacccacagcagaccgcatccaccaaccgccaccatagatgcgcgcacacaacacgcgcagagaacgaccgatacaccaagaacaggcactagcaaccacaaaaccacacccacaacgatataccaaacacggaggcagacgacagggcacgacgggacaggcaaacgacgacaaggagaaagaggacatcagagacaggacgagcggacgagcggcaggagccaaacgcaagagcagctgagaagaccagcgaggcagaagcgaagcaacgcaagaagcagagacggacagggggcagagaacagaggaggagacagcaaagaaaacagacagtggaaaggtcgagcagcgacacaggcagacggaaagaaaaagataaaaacccagaggacagagagataagaagagacgaaagaaaaaggggaaaaaacaaaaaagagcggaaggcaat

SEQ ID NO: 532875 - DNA, 293 bp, Homo sapiens
taaaaaaaaaatttgggtattacccatggttttaggtttaataaaaaggcccccctaccactggtggatttcctccccaggggtaatccttctataaaggggggggctggtataggatattaccggaactgcctggggcccccagggttttatatccgggtagggtaacctaaaggccggaatttttttaatgataaaattaatttaatggaaattaactctcctgattaacccattttttccctcctcagccctttccaggattttaataaaaaactgctgggggctgggga

SEQ ID NO: 532876 - DNA, 687 bp, Homo sapiens
  misc_feature (29)..(29): n is a, c, g, or t
  misc_feature (90)..(90): n is a, c, g, or t
  misc_feature (114)..(114): n is a, c, g, or t
  misc_feature (166)..(166): n is a, c, g, or t
  misc_feature (237)..(238): n is a, c, g, or t
  misc_feature (255)..(255): n is a, c, g, or t
  misc_feature (261)..(261): n is a, c, g, or t
  misc_feature (268)..(268): n is a, c, g, or t
  misc_feature (280)..(280): n is a, c, g, or t
  misc_feature (309)..(312): n is a, c, g, or t
  misc_feature (316)..(316): n is a, c, g, or t
  misc_feature (318)..(318): n is a, c, g, or t
  misc_feature (327)..(327): n is a, c, g, or t
  misc_feature (330)..(330): n is a, c, g, or t
  misc_feature (336)..(336): n is a, c, g, or t
  misc_feature (338)..(338): n is a, c, g, or t
  misc_feature (342)..(344): n is a, c, g, or t
  misc_feature (348)..(348): n is a, c, g, or t
  misc_feature (353)..(353): n is a, c, g, or t
  misc_feature (356)..(356): n is a, c, g, or t
  misc_feature (359)..(360): n is a, c, g, or t
  misc_feature (370)..(371): n is a, c, g, or t
  misc_feature (373)..(373): n is a, c, g, or t
  misc_feature (403)..(404): n is a, c, g, or t
  misc_feature (406)..(406): n is a, c, g, or t
  misc_feature (409)..(410): n is a, c, g, or t
  misc_feature (413)..(413): n is a, c, g, or t
  misc_feature (487)..(490): n is a, c, g, or t
  misc_feature (545)..(545): n is a, c, g, or t
  misc_feature (555)..(555): n is a, c, g, or t
  misc_feature (562)..(562): n is a, c, g, or t
  misc_feature (620)..(620): n is a, c, g, or t
  misc_feature (647)..(647): n is a, c, g, or t
atataaacatcgataaaaatatgcttttnagccaggtgcagtgactcagcacctgtaatcccagaaattttgggaggctgaggcaggaanatcatatggggccaggagttcaanaccagcctcagggagaccgtcttcacaaaaaataaagaaaaaagaaaaccangttcccgtgggacagtgagatgctacgttggggatctatgtggacatgttgggggagtcgtgttgtaatgnnggcaacgctaggctgcngttagngaatgangagttagaagtnaccaccagcttctcttccactgcccacannnntttntnagcaaagangtngccaancncttnnngttncggtnggnggnngttgctttgnngngatgtatggtcgtgtgagggaagggtgagnngnggnngcnaggaaggggctttagaaggtacagtgatgagcctaggactccaggagtccgccctggagctgggaggatggctnnnnggacggggtgggctaacacccagctgagtggagccgtcttgcagggctgtgcttntctgtgcctnggctgangagggcgccgacgccctgggcccttatggcaaattgctccactcggatgctttcccgncaccccgcgtggttgatacactgggantggagacaccttcaatgcctccgtcatcttcagctctccc

SEQ ID NO: 532877 - DNA, 210 bp, Homo sapiens
atcccccctcacacacctgaactctacactacatattttgtcaccaagatccctacttctatcctccctgttcttcataattcgaacagcatacccccgattcctgctacgatccaatctcatacacctcctcatgaataaaaacttcctaccactcacctctatcattacttatatgattatgtctccagtacccgattacaaatctcc

SEQ ID NO: 532878 - DNA, 156 bp, Homo sapiens
gagagagagagaagagcgcctcagacctcggtacccgcgagcggggaggaggcaggaaagaagacgcgcgtctgggagcaccaggaagcaagacggggcccgggcttcgcaagtggggaagtgttacggcgctttggaaaagcaagagcgccaccg

SEQ ID NO: 532879 - DNA, 362 bp, Homo sapiens
acttgaacaccacggtttgggctttggaaacttgtttggccgctgctttggtcagtgcagttaaagacacggattcaccattttccagggcatgctgcattaccccacgctcaacagcatcactccagtggatgtagtgcgagtaagtggtcatggtagacatttgctttccctttaaggtgaaggtctaagttacgagccctcattatagggttttccctagtcgaaaagcaagggtaaaccctaggggttggtttagcctgtggtttttaggggaaaaccctagggtttattggaaagggaaattaaatcaaaggtttatgggggtggggtttgtggggttttgcgggttttgtcgacgc

SEQ ID NO: 532880 - DNA, 397 bp, Homo sapiens
gggggaggtgggcggcgagggtcccggcgggagccaataaagttggtgaaaatcgttacaaaaaaaaaaaaaaaaaaaaaaaaaaaattttgggggcccctggccccaaaaattcaaaaaacacactgcgttggtggcgccgggagtcacccagatgagtaaaaaggagcaatcagggtgtcacttaatgcggtgttctcctaaagagaaaactcgcggggccgtcaggcaagcggtggcttggggatttctacccaaaatataaaaaacacgcgggggggcacaacccggacaggttttggaacaaaatcccagaaggagaggtatggagggctattagcgggcctatatccacagggggactcccaagagactgactataaaatatcccccgcgt

SEQ ID NO: 532881 - DNA, 192 bp, Homo sapiens
agtttgaataaaatgtaaatggaaaaggtgtaaatgtaaaagaaaatgaaaaaatgaaagtattaggagaaaaaatgaatgagttaagttatataaaataagagtatggaagaaataagagaaaaggttgataaatttaagtaaatttttaaaaagttggatgaaaagaagaaaataagaaaataaaatgat

SEQ ID NO: 532882 - DNA, 475 bp, Homo sapiens
gtgtatgatcacgatggtaaaatcattccatgaatactcgcctacccccacccctagagggaccatcgatgtcatgcgtgaagcagttcttttctacgctacctgttgcgcaataaggaatgtcaaaggaatattaagaaggactcctagaggtagcccagccctatccccttgtctccttggggacaacgtgatcacgtgtattcagctcgtggtcaagaatggtccaggcttcttctatatgatctgcacaatgtggttcctctcctccttcctgatggtctgccattagcattggaataaagttcctgctgaaaatccacatctcccctgggtccggtgttcgtggaagtgagagagacaatgtcacacttcaaggaggcagctctctagaccggaaggttattcacgtcccatgtcaagtctaggtagagttcagagcaattgagaagtgcaattttatctcctgcctttc

SEQ ID NO: 532883 - DNA, 270 bp, Homo sapiens
  misc_feature (1)..(1): n is a, c, g, or t
ngacaaatataaaacaaatagcaagatgatttatgcccaaacatgtcaataattacattaagtgtaaattgactaacacttcagttaaaaagcagagataatagaacttaaatttacaaaagcaaagattgccagtctggatttaaaaaagctagactcaaccatctgttgtctgcaggagaatagtttaaatataaagcacagatagtttgaaagtaagaggatggaaaaagatacatcacacaaatagtactataggcaccctggagt

SEQ ID NO: 532884 - DNA, 188 bp, Homo sapiens
tcgagctcggcaccccctcggaacttgtcaattccgaggggtaaagtttgtgtgttgcccactggctgaaaaaagtgacaatgtggattctgctgatgcggaggaggatgactcgcatgtttggtggggcggaccagacacaaactatgcaaatgggagtgaagacaaagtactaaaagtagcagagg

SEQ ID NO: 532885 - DNA, 653 bp, Homo sapiens
  misc_feature (49)..(49): n is a, c, g, or t
  misc_feature (63)..(63): n is a, c, g, or t
  misc_feature (89)..(89): n is a, c, g, or t
  misc_feature (91)..(91): n is a, c, g, or t
  misc_feature (93)..(93): n is a, c, g, or t
  misc_feature (99)..(99): n is a, c, g, or t
  misc_feature (106)..(106): n is a, c, g, or t
  misc_feature (118)..(118): n is a, c, g, or t
  misc_feature (122)..(122): n is a, c, g, or t
  misc_feature (138)..(138): n is a, c, g, or t
  misc_feature (142)..(142): n is a, c, g, or t
  misc_feature (163)..(163): n is a, c, g, or t
  misc_feature (167)..(167): n is a, c, g, or t
  misc_feature (171)..(171): n is a, c, g, or t
  misc_feature (205)..(205): n is a, c, g, or t
  misc_feature (250)..(250): n is a, c, g, or t
  misc_feature (254)..(254): n is a, c, g, or t
  misc_feature (299)..(299): n is a, c, g, or t
  misc_feature (302)..(302): n is a, c, g, or t
  misc_feature (333)..(333): n is a, c, g, or t
  misc_feature (342)..(342): n is a, c, g, or t
  misc_feature (357)..(357): n is a, c, g, or t
  misc_feature (376)..(376): n is a, c, g, or t
  misc_feature (394)..(395): n is a, c, g, or t
  misc_feature (478)..(478): n is a, c, g, or t
  misc_feature (499)..(499): n is a, c, g, or t
  misc_feature (568)..(568): n is a, c, g, or t
  misc_feature (631)..(631): n is a, c, g, or t
tgtcccttaatgaccccatcccatcccccacttagaggaaaactttganttcctgatcgtgtncagcacgggttagatgtggcattttnangnagccanttttttngagcgggatgcntggntccaggccatcgaganttanatcctagccagtttgcaatgntgtnagancagcaaggtcaaggtaagatttttttgtggagtngaggattggccgcaggaactgaccctggtgctgacggccattggnaacnttacggccgaagttgttttttttgagagcagaggtgttttttttnttngtggggcttggaggcaaagtcagttccaacntaaattttntttgcagctgcgcanagacagccaaagcgaggtngtggccatccaggttatnnggaacgccaaggggaattcaatctgcgtggactgcggggcccccagtgagttccaggaggcagcggaggggctagggagtgtngtgaatgccggggtgcctgtnctgcccggctgggagccgacctctacgctccttccgcagaccccacgtgggccagcttgaacctgggcncctcatctgcatcgagtgttctggcatccaccgcaacctgggcacacacctgttccgcgttcnctcgctggacttggacgactgg

SEQ ID NO: 532886 - DNA, 238 bp, Homo sapiens
cttatggctcagatctctagcaggatcccctctctacagttgcggcatctcaacaagccgcaatgttactaacgatgatatcacatgctgccgagcttaattgttaagcggatttatgttatcctggtagaaagcatgcctctgtttttctgtattgtttccaaaattataccggccacccattttgttcagattattcgcggcattctgctataaggtgtcgcgactcctgtagtta

SEQ ID NO: 532887 - DNA, 162 bp, Homo sapiens
gtagagacaaggatcttgctatgttgcccaggctggtctcaaccttcttacctcaagtgattctcccaccttggcctcctgaattgctgggattacaggcatgagctaccatggccagctttttttctgttttgtttcttgttccccttctgtcgtcttctc

SEQ ID NO: 532888 - DNA, 593 bp, Homo sapiens
  misc_feature (48)..(48): n is a, c, g, or t
  misc_feature (61)..(61): n is a, c, g, or t
  misc_feature (71)..(71): n is a, c, g, or t
  misc_feature (81)..(81): n is a, c, g, or t
  misc_feature (94)..(94): n is a, c, g, or t
  misc_feature (97)..(97): n is a, c, g, or t
  misc_feature (104)..(104): n is a, c, g, or t
  misc_feature (144)..(144): n is a, c, g, or t
  misc_feature (163)..(163): n is a, c, g, or t
  misc_feature (173)..(173): n is a, c, g, or t
  misc_feature (186)..(186): n is a, c, g, or t
  misc_feature (193)..(193): n is a, c, g, or t
  misc_feature (197)..(199): n is a, c, g, or t
  misc_feature (205)..(206): n is a, c, g, or t
  misc_feature (232)..(232): n is a, c, g, or t
  misc_feature (234)..(234): n is a, c, g, or t
  misc_feature (238)..(238): n is a, c, g, or t
  misc_feature (240)..(241): n is a, c, g, or t
  misc_feature (243)..(243): n is a, c, g, or t
  misc_feature (275)..(275): n is a, c, g, or t
  misc_feature (278)..(278): n is a, c, g, or t
  misc_feature (293)..(293): n is a, c, g, or t
  misc_feature (299)..(299): n is a, c, g, or t
  misc_feature (309)..(309): n is a, c, g, or t
  misc_feature (328)..(328): n is a, c, g, or t
  misc_feature (386)..(386): n is a, c, g, or t
agtgaagcctttttcagcggggaaggcgcgaaatatttatttgggttnccttcattgtttngggaaatttngtttgggttnataaaacataaanatngccaccncttaaagcaaacattcaaaaccccagggggacaaattatngactttttgggcaattaanaatccatatntgaagttgggctnccaagtngggnnnttacanngacaattctttagggcaagccctgtngngctngnntntaatacatgtcctctacagaccccaaaacagntgntttaaatgtccaaangacagntcaattcagncaaatggggcaaagactcncaataaagggaactgctgttaatttcccaaattaactttaaaaaatccctggagaagngaatcccaggaaatgaactttccagatttctacatcctagaattttggcttgtcaaacacatttcatagaaatcaggtagcattataagaacatttgcttattacttgccatttcaataagcactcaagtttatactcccttaataggcttaaagaaatgcttgcctgagagtttattttttggggaaaaaggcaagttaatccccc

SEQ ID NO: 532889 - DNA, 523 bp, Homo sapiens
gacagtggtaaagacgctgaaaatgacatcatccccaaccctcaggaacgtaccctgacttggtagacacaggcagtggcatgaccaaagctgatactcataaataatatatgggaaccatagccaagtctaggtactaagagagcagatcatagaagctctatcagaacctaatacagacaacaccagagaaaaagaagcagaatgaaataggaaagacgaaagaagacaagccaacgagaagaaacagagacagaaaagaaagagagaaaagacacaagaagcacaacaagagagagaacaagaagaagcgagatatatattacttatcttatatcttaatatattatattaacctatgacagcgaagtagctataatctaatacctataaattataatccctattaaaatgcgaaataagagtaaccaagatataaatacctacctatactatttttattttaataatacattatctaatatataaccttaatatttattaaatcattagacttgattat

SEQ ID NO: 532890 - DNA, 428 bp, Homo sapiens
  misc_feature (94)..(94): n is a, c, g, or t
atgtgaaaaaaactttggtgtttcccttatgaaaataaaggattgtaagtaaagtttcctgcgccccttaaaccaaaattcagtataaaacccncctttttgttttcaaacaaataaatcaaaaaatagtcgggattatcggtaagatctgtcttgtaaaccccattttttgcaaccatttgcctttgagaaggtttggattttaaaatgggccttttgtcttgaaaagaagtaaacccataaacttgtgcaaaacaagtttcaagtttataaaaattaagtttgtaatgtgagcatcaaatgggtatgtaaaaaaactttttcccagtttggaacttgggaaaatccagggaattttaaacataaattttaatgagggggtaaacccaaatcatgtcaataaaggtagacaggatcttttatcctta

SEQ ID NO: 532891 - DNA, 236 bp, Homo sapiens
ggggaaggggggtaaaaaataaaacgttttttttttcccccctgaattgcctttgtggtcaaaaaaaatgttttaatcgctaaaggaaaaaacagtaagggctttaaaaattaagggcccaaaggcccaaaaacagttaaatatgttttttttttcctttgggaattttttggttggttttgggtgttttgtttttcaaacaaaaaaaaagtggggggacttttttttttttttta

SEQ ID NO: 532892 - DNA, 762 bp, Homo sapiens
  misc_feature (738)..(738): n is a, c, g, or t
  misc_feature (758)..(758): n is a, c, g, or t
gttgggactacaggtgcatgccaccccatggccggctaatttttgtatttttagtagagatggggtttcaccatgttggccaggatggtttcgatctcctgaccttgtgacctgcccgccttggcctcacaaagtactgggattacaggcatgagccaccgcgcctggccctgatatccattttaatcttctttggaagggcccatttttatcttaatgaaatagagcagagtagttttcaaactaaattttttaaaagaccggcctatttcagctcaatctaaaaagtagatcatatccatatgatatttgattatatgtttagaaattaaagttcaaattggcagtctagatgttaattcattaaaaaaattgtcataatgtgaagaaaccctttaattggatagcttttccttgactctgtcaagctgtggaaatggttaagatctaaaaatgctgggaacaagttagtatgtttgaaggtacgtagctattccacacacgtgtgcacttgctgaggatatctgaggtcactttgtcattaggtgcagatagctggcatccagctaggacaacagttgatgccagctgaaaacacagaccccttggctgttaatacacaagcagaaaagattcttgtgttcaccatgcagcttgggttttaaatttaatccaagttgcagttttcaaagtatagttttttgaaatcctttcatcattattttgggcacttttacnggtgtggcctttaatttttnggag

SEQ ID NO: 532893 - DNA, 411 bp, Homo sapiens
gatttttgtaattagaggtcatttttccaaacaaatgattcttaaggtcctgctgtctctgaatattatttttatagaacaagcataagtataattggatcaatcatctaacctttcagatcctcaacttagtcttccattaatgagaggattaaatccattagttaaatgttctctaagaatcagtgtgtctccaacttcagtgtacaaacagcgggtcacccagggatcgcagtgggacgcagacgctgattccgcagttgtggacttggtggaggtgggcgctgtctcagtccatctgggccgctatacagagtgccacagacagagtggcttacggacaacagatgctcatttctcactctctggagactggaagcccaagatcaaggtggcagaaaatgccgtgtc

SEQ ID NO: 532894 - DNA, 1039 bp, Homo sapiens
ggagatgcgcggggagccattgtgctcgtggcctcggagcaaccatccctgagcatatggagctactactggtatgcattcgggcccgagtcgccgtccaatcgtctgtacgcacggtgatgctccaagacacattgtatgattacttctggatgggaacgtctgtgcgactagccattgattacacttagaccgttgggaccgtactctatcaatgaccgtatgatggacgttgtctacgccagaaggctcaggatctctatatcaggctgcccctggctttgctgcttcgctcactcgatatcgactacgtatcgtttgaggctgtatcgagtggttacaccaactggctagccctcattgaacatataaggagaaaacgtcggctgcgtggcacctcccaacgccatccttggaagcatttctacctgaccagtggcaagcatgcccaagccaggtggaagtagagcttttgtccctgtgcatagctgggctctctggccgccagtgtagcgcgttggttcccgtcgtccgtccgactaaccatggacctggtgccagtctcctcaatgaaagttccgagaagccagctggagattcacattttacctgattgccgttcattgcctggcatggccgtcattgtggataaaccctggttctatgacatgaagaaagttgggagggatatcccatacagagcactatcccttcccagtattggtactacatgatttgaactttccttctactggtcctgctcttcagcattgcctctgatgtcaggcgagaggatttcaaggaacagatcatcaccatgtggacaccatcattcttcatcagtttcctggtttgccattacgtccgagctgggattctaatcatgggtctgcttgactcttcggataacgctgtggagtccgccagagtttaataacgcgggatggagaaacctggcaaaacatcttaaccggcttcgcattgtgttatcataacccgatgggtctctgcctttgggtctgattgccctgttgttccc

SEQ ID NO: 532895 - DNA, 158 bp, Homo sapiens
aatatcctgctgctagtactaggagaggtcttatccttagacttcagttgggtcaccagattaggtaagaaagaaaagtgtggggggatgggggatggcagaatgggtacgtgagttggggatgctgagcaaaacatgaagacggagaaatgaaacaa

SEQ ID NO: 532896 - DNA, 113 bp, Homo sapiens
cgctactgtcgctggcaagctactgccctgtgtgagttgaagaggggtacataggtttgccatgggctggtctgtgtggacactcttctctttggtgggtggcacagcagaga

SEQ ID NO: 532897 - DNA, 242 bp, Homo sapiens
ttgtggtatttttagtagagatgggggtacaccatgtgggccaggctggtctcgaactcttgagctcaggtgatacatctgcctcagcctgccaaattgctgagattataggcgtgagccaccatgcccggcctgggtcacctttggatagatggacacatagcctttaagagcgcaggagacctcttactgtgtacaccaggtgcacacagtaggtcctcactgtgattttgaactgagca

SEQ ID NO: 532898 - DNA, 376 bp, Homo sapiens
gtagaggcagcgccaagaagaggcctttgccgctggttgtgattgggataaccatgaacacagtggcggcggcccgcttccggaaggtggacgtgcgcttaatatgacgagaacaagttcgtggacgaagaagatgtagcagacggtagtccgttcccgacgagggcgaggtgcactcctgcctgcggcaaggaaacatgacagctgccctacagacagctctgaagaacccccctatcaacaccaagagtcagtcagtgaaggaccggccaggcagcattgtcttgaaggtgctcatctcttttaaagctaatgatatacaaaaggcatgtcaatctctggacaagaatggcgaggatctcctaatgaagtatat

SEQ ID NO: 532899 - DNA, 856 bp, Homo sapiens
  misc_feature (471)..(471): n is a, c, g, or t
  misc_feature (548)..(548): n is a, c, g, or t
aagtgctatctgggaaagagagcaaggtgaaaaagattattcaggagcttcctgtccaaggtgaacacaaatgccctttactgatagatgtcagaagaaaacatcacaataaagttaaaacagactaaaagctgaagctaatagcatagagaataatagcttggtaaactgaatatcatgttcacgacatagaacacgttacgtacgtgattcagacatcccgagtaatggcaactgaacggtagtattgcataagctattgctctgctaagtaggtgctctcatattggtgtttagtattagcccgtttgtctccatagttggttacacgtgtctaggtgcccgagtgggcgtatccaactctaatctaagattactgttagatacctagtcttcttacttctctgcacggcacatgtttgtccaagagagtttggttcatcttgtgcaagagagactgcagcagcgtgntacacctggaggggacgtgtcttgccagagtttgacctagttatggggcaattgacactaacatgtcgcactgtggncttgtaaacttttcaatagaagtaaacacaatgcatggtaaggtttgggtggggaagagactttcacagataaaaacataaggacaagatctcccggaagaaatctgaatattacttgctcccatgcatctcttgtcttctcgcgtcactgggcctatggtgatgttgacggtcgcgcgcggtagaaaattgacattttctttgatccgctccataccctgttgtttttagaagctgggaccctttctttggcagtcttgtcctgggtccttggaacgcccatgggtggcttccgccggggggggccc

SEQ ID NO: 532900 - DNA, 939 bp, Homo sapiens
  misc_feature (14)..(15): n is a, c, g, or t
aaacatatttctcnncaactagtaacatattatcactgcagcacactcccacatgatcttttcccgcaatgttttcccggtattttacactaaagacaccccttgtttaacaacaacgtggttttaagtgctgcacttatatagcatgccctcgtgatacaaatcgttcccctttattaccagcgaaaccccctccacattttggtaatacacaccggttccgcctggaacaactctgccactatctttactgtgtaaacaaaacccttttgcgtaacaccggcacatccaaggctctctttaaataaagcatttttaattcacgacacccctgactatctatttcccctgttgacctcctcccctccctccccccccccttttagttaaccagtcccatattttggagaaaatccctctgacacaagacttgacaagcactcattcttttttcggaattaaacccttctaggatttgttatagacacctttttatgcaaaacattgttagaaggacttttctatgctcaaaccgacgtaaagaaaattaaatcatgttctacagcaaacgtcttgtcgcaggagagtaaccaaaaagaacatcgcgagagctgtcttgtttgatttcaaacaactaggcgagatttttctagggcatacaaggaaccaccacggctatgtagatcttccaccggcagggacacactcatgtgaaagtttctcgccccaacgtgttggttcacacagtgaaaacggccatcccacgatatgattctactaggtatggtcatcctctaataccgttcatgagcccacacaggtgtcgccacccgtaaaagtgtgacacaccgggggaaagtgaccaaaagatgtagcacacttacaatggtttcatgtaagaggggagttcagtaaaaaatttaaccccgcaacaaaaca

SEQ ID NO: 532901 - DNA, 103 bp, Homo sapiens
  misc_feature (66)..(66): n is a, c, g, or t
agttttataacaggagagaaggcccccgaagtacagaatgccgggtagggctgttaatggaggtcngaaaaccgccatccagacagacagcctcaagtgaaaa

SEQ ID NO: 532902 - DNA, 249 bp, Homo sapiens
ttaattcatgttagagtgagaaaacagctacaaattagagttcaatacattcttaatttttttagtctttaatataagcatatataatcaaagcactgtgctcaaaatttactcaagttagctccctccctcacccctttaagtgtggttatgttatttatttgcaatacaaatggttaaaatctggaaaaatgtgaacattaaaataaatagtgaaagtagtgaaatatacaaaatatagaatgaaat

SEQ ID NO: 532903 - DNA, 295 bp, Homo sapiens
  misc_feature (1)..(1): n is a, c, g, or t
  misc_feature (92)..(92): n is a, c, g, or t
  misc_feature (122)..(122): n is a, c, g, or t
  misc_feature (128)..(128): n is a, c, g, or t
  misc_feature (143)..(143): n is a, c, g, or t
  misc_feature (152)..(152): n is a, c, g, or t
  misc_feature (248)..(248): n is a, c, g, or t
  misc_feature (256)..(256): n is a, c, g, or t
  misc_feature (262)..(262): n is a, c, g, or t
  misc_feature (264)..(264): n is a, c, g, or t
nttaaacaaaaatgcaaaaaaagcactcctggcgttcacttgacatgatagcaaatggaaagaatataaatgcaacaggtgttaacatttanaacagtacttgtaaacctgctcatttctanaaaaanccgggaaactcgctncgaaacacntcatctatcactgcatgatttcctttgacatgaaatatgactttatgaaaatcttcctaaacctcactctggctgcacctgagtggttcctattcnaaaggcgntggcanangatgtaagagaaaaccactatctgtttcgtt

SEQ ID NO: 532904 - DNA, 1007 bp, Homo sapiens
  misc_feature (114)..(114): n is a, c, g, or t
  misc_feature (135)..(135): n is a, c, g, or t
ggagaaaggggtgcgataggcaaaggcaccatgccctctgcgggatgaaaccctccgagagtgtgggcctctgacagtgggcatgaagaagaaagcctgagcccggaggcccgnggcgccccaaacagcgaccgncccggcagagaggctaaggaagaagaggacggaggcctcgaatcttctgcgccacgtggtgatccaagccccggaagctcggagctgggacagggacggggaggcggtgggagggagccttcccctagatcctgtccaggcccgggcgcgctgcagacggtctacgccctggttcctcagggatcccgaggcaagaagccgcgacctcgggaaactttctggtagctccgttgcctccagacgcggatgacgatggaggaggaggaagaaggaggaacgactgatgctgatggatcccaggtccagtcgcaagggggcccgacgagagtggtaactgggcactgtcgggccaaggacacccaaccgtgaccccgcacaagcatccagccaaacccttaacggtagcagcgtccggaccgtgccggccacagtgcgcccgtggcacaacgtgccgcacggcccatgccgcgcatcgagacatcatttagcgctcgttattccttctgtgtcactgtcttccacccaaggatgtcggtgcaggccaaatcgccataaagcacaactcaacgcatacgaggcctctagcacgcccgcgagcgggtaacactaccagtggtagcaccaggtgccactgtgagacataaagatcaggacgtggaccctcttgtcttcatgaacgggtgcctcatgactcgcaagtgtacctcgaccaacactggcactcacaaatgcaaaccgacagatgactacgtgtagaaccatgccacagtgcgctacagcacaccaaaggacagccagacatggagcccaacagagagctcacccagacacgagatcgcagtatgcggcgcgaccatgtcgagcacaatgaa

SEQ ID NO: 532905 - DNA, 1107 bp, Homo sapiens
cccacgcgttcgaatgtcctgcgtgcccagacctctcctcacgctcgcgcagtctccgccgcgagtctcagctgcagctgcaggacatgagccgtgcacccggaggagacccccggaggaggcgacaaaacttcgcagtgccgcagaccaaccccagcccatggcctgcatgacatggcccagcgtgttccgtgctcccatgctggtagccctgtgtccatggctccaggctcctgcagcatttagcagatgttctggaaggagacagctcagaggacacgcagctttttacgctgtgctgcaatcgcgggactgacagcgccaactgcaggggcgtgctcagagcggacgccctccaccgatccctttgcacaacgtacaattaacctagcggggccaaccggaccagatgccgacaggggaatggtgcattggagcatcatcctgcagaggctcaaaggtggacctttatccttgtcccctgtgtggcccgaggcagcgcaaaagagtgcactgcgatggggggccagcgaggaagttgaccaccggatccaaacgcggtgccaaccggacgagaccattacccggtgattttccgacgatggacaacattgacccttgcagtataacccatagacagatcagacatcaacacagaaacgtatatacaccctgggacggcatgtacgcaggaagacattggacgtcccacaaagcagaaatcaaggggtaatacgtaatacagcctgcatggaagggatccacggaaaatgggacaattcacaatgcacgcacgacagacgatacgacagtacggcacgggatccaaacgtgatcaacaaagaagggcgatcagacgatatgtacatctaacaccccggacaaaaggggaacatcttgtcaccagcgaaaaattcaacttataaataccaataaaatacattggagggagaacacaagaggtacatgcccatgtgtgcacccccgccaattagggacaaccacccacaataagttggaacacgcaccccatggaagcaaaagactataatgcacaacagtataaccttgagtagagacaccatgacaaccaacaaggtctactgc

SEQ ID NO: 532906 - DNA, 571 bp, Homo sapiens
ggatgggtgtccttatcaaaagaagagaatgtatatggtaggacaaaatggaaggtcgatgtggtatataaagaaaatattagtggggagtggtttatgatgtgtatagtggtttcagttcaagcacttacaaagattggagttggtttctgcccttgtaacacttcaacagtcatatgagttggctttaccattttgctgggaagggaactgagactgattcagtagtgcaaggtgatgagcagacatgctcaaaaagccagaaatagatgggtgggcttcggactgtgagaccaggtgctctctccattgaattattctgctgatgggactgttggcttggctttaaaaaatagtaatgcacagttcggaagtgctgtggacggtgagataaagtcagtgtagatctataagtaatgcacattccaaccaaaccaggcaagggaacaaaacgcgttacgagacagtggggtggggagatggccccctcccaggaggggactgtattctcatcatcccccagatctgtcgcatggtatctgatgctggaccagggtcctgtctcatgcaa

SEQ ID NO: 532907 - DNA, 1142 bp, Homo sapiens
  misc_feature (32)..(32): n is a, c, g, or t
  misc_feature (61)..(61): n is a, c, g, or t
  misc_feature (77)..(77): n is a, c, g, or t
  misc_feature (84)..(84): n is a, c, g, or t
  misc_feature (206)..(206): n is a, c, g, or t
  misc_feature (669)..(669): n is a, c, g, or t
agcggatagccgcgcgaggtcagggagctcgncaggctgctggtacctgcgtccgcccggngagcaggacaggctgnttgggtntgtgacctccaggcaggacggccatcctctccagaatgaagatcttcttgccagtgctgctggctgcccttctgggtgtggagcgagccagctcgctgatgtgcttctcctgcttgaaccangaagagcaatctgtactgcctgaagccgaccatctgctccgagcaggacaactactgcgtgactgtgtctgctagtgccggcattgggaatctcgtgacatttggccacagcctgagcaagacctgttccccggcctgccccatcccagaaggcgtcaatgttggtgtggcttccatgggcatcagctgctgccagagctttctgtgcaatttcagtgcggccgatggcgggctgcgggcaagcgtcaccctgctgggtgccgggctgctgctgagcctgctgccggccctgctgcggtttggcccctgaccgcccagaccctgtcccccgatcccccagctcaggaaggaaagcccagccctttctggatcccacagtgtatgggagcccctgactcctcacgtgcctgatctgtgcccttggtcccaggtcaggcccgcgagcgtgtaacgtccgactgancacaggctgtggactctgacacggagtggggccagctgccgcacttctggggtggatgatgtgaccttccttgggggactgcgcgaagggacgagggttaccctggagtcttacggtccaacatcaggaccaagtcccatggacatgctgacagggtccccagggagaccgtgtcagtagggatgtgtgcctggctgtgtacgtgggtgtgcagtgcacgtgagagcacgtggcggcttctgggggccatgtttggggagggaggtgtgccagcagcctggagagcctcagtccctgtagccccctgccctggcacagctgcatgcacttcaagggcagcctttgggggttggggtttctgccacttccgggtttaggccctgccccaaatccagccagtcctgccccagcccacccccacattggagccctcctgttgctttggtgcctcaaataaatacagatgtccccca

SEQ ID NO: 532908 - DNA, 138 bp, Homo sapiens
  misc_feature (119)..(119): n is a, c, g, or t
gagtaagcagggttatgtgctaatatcttgtggctcttctcttctcttgcatgcttacttccacactgtcacttctttcaagctgctgatcacaagttcacctcttacacggaagttcntccatgcagtacgcttact

SEQ ID NO: 532909 - DNA, 1106 bp, Homo sapiens
  misc_feature (32)..(32): n is a, c, g, or t
  misc_feature (61)..(61): n is a, c, g, or t
  misc_feature (77)..(77): n is a, c, g, or t
  misc_feature (84)..(84): n is a, c, g, or t
  misc_feature (633)..(633): n is a, c, g, or t
agcggatagccgcgcgaggtcagggagctcgncaggctgctggtacctgcgtccgcccggngagcaggacaggctgnttgggtntgtgacctccaggcaggacggccatcctctccagaatgaagatcttcttgccagtgctgctggctgcccttctgggtgtggagcgagaagagcaatctgtactgcctgaagccgaccatctgctccgagcaggacaactactgcgtgactgtgtctgctagtgccggcattgggaatctcgtgacatttggccacagcctgagcaagacctgttccccggcctgccccatcccagaaggcgtcaatgttggtgtggcttccatgggcatcagctgctgccagagctttctgtgcaatttcagtgcggccgatggcgggctgcgggcaagcgtcaccctgctgggtgccgggctgctgctgagcctgctgccggccctgctgcggtttggcccctgaccgcccagaccctgtcccccgatcccccagctcaggaaggaaagcccagccctttctggatcccacagtgtatgggagcccctgactcctcacgtgcctgatctgtgcccttggtcccaggtcaggcccgcgagcgtgtaacgtccgactgancacaggctgtggactctgacacggagtggggccagctgccgcacttctggggtggatgatgtgaccttccttgggggactgcgcgaagggacgagggttaccctggagtcttacggtccaacatcaggaccaagtcccatggacatgctgacagggtccccagggagaccgtgtcagtagggatgtgtgcctggctgtgtacgtgggtgtgcagtgcacgtgagagcacgtggcggcttctgggggccatgtttggggagggaggtgtgccagcagcctggagagcctcagtccctgtagccccctgccctggcacagctgcatgcacttcaagggcagcctttgggggttggggtttctgccacttccgggtttaggccctgccccaaatccagccagtcctgccccagcccacccccacattggagccctcctgttgctttggtgcctcaaataaatacagatgtccccca

SEQ ID NO: 532910 - DNA, 699 bp, Homo sapiens
  misc_feature (10)..(10): n is a, c, g, or t
  misc_feature (66)..(66): n is a, c, g, or t
  misc_feature (273)..(273): n is a, c, g, or t
  misc_feature (609)..(609): n is a, c, g, or t
gcaggcaganaggccggaaagaagcaggttgggagtgtggcggccgcagcttcagcagctccgcgntgaccatggccccgatcaaggtgggagatgccattccctcagtggaggtatttgaaggggaacgggaaagaaggtgaacttggcagactgttcaagggcaagaaaggtgtttttgtttggagtccctggggcatttacacctggctgttctaagacccacctgcctgggtttgtggagcaagcctggagctctgaaggccaagggangcgcaggtggtggcctgtctgagcgttaatgacgtctttgtgattgaagagtggggtcgacccaccaggcagaaggcaaggttcggctcctggctgaccccactggagcctttgggaaggcgacagacttattattggatgattctttggtgtctctctttgggaatcgtcggctgaaaaggttctccatggtgatagacaacggcatagtgaaggcactgaacgtggaccagatgcacaggcctcacctgcagcctggcccccaacatcctctctcaactctgagccctggccagatgtcctctgactctcccatctctcccacccggctctagncaaaaggctcggtacctccttactgggagccacgtaaatggaaccttgaccatatttctgcaataaacagtttaatttgtgtctttaaaa

SEQ ID NO: 532911 - DNA, 302 bp, Homo sapiens
taatctcccatcttagacttatttgtttggctcgtttttaggaaggaatttctcactgtagtgccaaggctgaaatggtaattgtgtttgagcaagttccctgaacataaggcggcgaggggaggaagaggaacgatccaggccatttttgttgatacataatagttgcacatattttttcatgtgatggttcgatatatgcatacaatgtgtaatgatcagatcagggtaactgagatatttgttgcctcaaacattttttctttggtgtgaatgtttaaactcttctagctggtttgaaa

SEQ ID NO: 532912 - DNA, 1189 bp, Homo sapiens
  misc_feature (32)..(32): n is a, c, g, or t
  misc_feature (61)..(61): n is a, c, g, or t
  misc_feature (77)..(77): n is a, c, g, or t
  misc_feature (84)..(84): n is a, c, g, or t
  misc_feature (206)..(206): n is a, c, g, or t
  misc_feature (669)..(669): n is a, c, g, or t
agcggatagccgcgcgaggtcagggagctcgncaggctgctggtacctgcgtccgcccggngagcaggacaggctgnttgggtntgtgacctccaggcaggacggccatcctctccagaatgaagatcttcttgccagtgctgctggctgcccttctgggtgtggagcgagccagctcgctgatgtgcttctcctgcttgaaccangaagagcaatctgtactgcctgaagccgaccatctgctccgagcaggacaactactgcgtgactgtgtctgctagtgccggcattgggaatctcgtgacatttggccacagcctgagcaagacctgttccccggcctgccccatcccagaaggcgtcaatgttggtgtggcttccatgggcatcagctgctgccagagctttctgtgcaatttcagtgcggccgatggcgggctgcgggcaagcgtcaccctgctgggtgccgggctgctgctgagcctgctgccggccctgctgcggtttggcccctgaccgcccagaccctgtcccccgatcccccagctcaggaaggaaagcccagccctttctggatcccacagtgtatgggagcccctgactcctcacgtgcctgatctgtgcccttggtcccaggtcaggcccgcgagcgtgtaacgtccgactgancacaggctgtggactctgacacggagtggggccagctgccgcacttctggggtggatgatgtgaccttccttgggggactgcgcgaagggacgagggttaccctggagtcttacggtccaacatcaggaccaagtcccatggacatgctgacagggtccccagggagaccgtgtcagtagggatgtgtgcctggctgtgtacgtgggtgtgcagtgcacgtgagagcacgtggcggcttctgggggccatgtttggggagggaggtgtgccagcagcctggagagcctcagtccctgtagccccctgccctggcacagctgcatgcacttcaagggcagcctttgggggttggggtttctgccacttccgggtttaggccctgccccaaatccagccagtcctgccccagcccacccccacattggagccctcctgttgctttggtgcctcaaataaatacagatgtcccccaaaaaaaaaaaaacggtacgagggggggtcccgtccccaatttcccct

SEQ ID NO: 532913 - DNA, 1142 bp, Homo sapiens
  misc_feature (32)..(32): n is a, c, g, or t
  misc_feature (61)..(61): n is a, c, g, or t
  misc_feature (77)..(77): n is a, c, g, or t
  misc_feature (84)..(84): n is a, c, g, or t
  misc_feature (206)..(206): n is a, c, g, or t
  misc_feature (672)..(672): n is a, c, g, or t
  misc_feature (681)..(681): n is a, c, g, or t
  misc_feature (684)..(684): n is a, c, g, or t
  misc_feature (691)..(691): n is a, c, g, or t
  misc_feature (693)..(693): n is a, c, g, or t
  misc_feature (699)..(699): n is a, c, g, or t
  misc_feature (710)..(710): n is a, c, g, or t
  misc_feature (729)..(729): n is a, c, g, or t
  misc_feature (736)..(736): n is a, c, g, or t
  misc_feature (745)..(745): n is a, c, g, or t
  misc_feature (765)..(765): n is a, c, g, or t
  misc_feature (784)..(784): n is a, c, g, or t
  misc_feature (802)..(802): n is a, c, g, or t
  misc_feature (819)..(819): n is a, c, g, or t
  misc_feature (908)..(908): n is a, c, g, or t
  misc_feature (922)..(922): n is a, c, g, or t
agcggatagccgcgcgaggtcagggagctcgncaggctgctggtacctgcgtccgcccggngagcaggacaggctgnttgggtntgtgacctccaggcaggacggccatcctctccagaatgaagatcttcttgccagtgctgctggctgcccttctgggtgtggagcgagccagctcgctgatgtgcttctcctgcttgaaccangaagagcaatctgtactgcctgaagccgaccatctgctccgagcaggacaactactgcgtgactgtgtctgctagtgccggcattgggaatctcgtgacatttggccacagcctgagcaagacctgttccccggcctgccccatcccagaaggcgtcaatgttggtgtggcttccatgggcatcagctgctgccagagctttctgtgcaatttcagtgcggccgatggcgggctgcgggcaagcgtcaccctgctgggtgccgggctgctgctgagcctgctgccggccctgctgcggtttggcccctgaccgcccagaccctgtcccccgatcccccagctcaggaaggaaagcccagccctttctggatcccacagtgtatgggagcccctgactcctcacgtgcctgatctgtgcccttggtcccaggtcaggcccaccgcccgtgcacctccacctgccccngcccgggcntgngccccgngnggggcnggggggcgtgnggtctgggggggggggtgnggcctgngtggggggncgggggggggggcggggggncgcggggggggtgaggggnggacgtgggggccgaggnccaggggcagggggacnggggccccgggggggccggggcgggagggagggggggccggggggggggacggggggggggggggggagggggggggaggggggggggngtggggggcagggnggggggggggggggggccagcagcctggagagcctcagtccctgtagccccctgccctggcacagctgcatgcacttcaagggcagcctttgggggttggggtttctgccacttccgggtttaggccctgccccaaatccagccagtcctgccccagcccacccccacattggagccctcctgttgctttggtgcctcaaataaatacagatgtccccca

SEQ ID NO: 532914 - DNA, 180 bp, Homo sapiens
accctaattactgatactctctctctccttttttaaaagcctaggcattcttgaccagtagtagtggaggcaagaaaatgtttataaacacaattctgaggtcagactctggacgcaagcaaattgtggcacctgtcattaggatacattaggatgtattagccctttactgcatacttg

SEQ ID NO: 532915 - DNA, 135 bp, Homo sapiens
gtcgaataaccacaaaatgcccattaacctttctcatgcttatagactgattacggaatataatagcaagtcaatattaatgaaattagatcttcgacttcacttcgggttaaatttggaggcggtaaaagctta

SEQ ID NO: 532916 - DNA, 143 bp, Homo sapiens
cttccttttggcccagttctgtcccgtgaaattctaagaaggcctcgggagctgcgctgatgtatcctctcctcgtttgttagctcatcatcagaggataagcctacacacttcagagggtgacaggtttctacttggagact

SEQ ID NO: 532917 - DNA, 292 bp, Homo sapiens
  misc_feature (145)..(145): n is a, c, g, or t
  misc_feature (175)..(175): n is a, c, g, or t
tgcgaatatggatcttactgcaaaggaactgacagaagaaaaagaaagtgcttttgaatttctttcctctgcctgactagacaatgatgttactaaatgcttcaaagctgaagaatctaaatgtcgtctttgactcaagtaccanaataataataatgctatacttaaattactngtgaaaacaacacatttaaagatacggcttctggtacagttgtgatgacagtatcgtatgctgtagtggcatctaataaatatatcgcagtggatatcgcactgaggtccttagatc

SEQ ID NO: 532918 - DNA, 551 bp, Homo sapiens
  misc_feature (150)..(150): n is a, c, g, or t
  misc_feature (269)..(269): n is a, c, g, or t
  misc_feature (283)..(283): n is a, c, g, or t
  misc_feature (295)..(295): n is a, c, g, or t
  misc_feature (303)..(303): n is a, c, g, or t
  misc_feature (315)..(315): n is a, c, g, or t
  misc_feature (341)..(342): n is a, c, g, or t
  misc_feature (358)..(358): n is a, c, g, or t
  misc_feature (364)..(364): n is a, c, g, or t
  misc_feature (371)..(372): n is a, c, g, or t
  misc_feature (387)..(387): n is a, c, g, or t
  misc_feature (395)..(395): n is a, c, g, or t
  misc_feature (434)..(434): n is a, c, g, or t
ttcattcgtacgcataagacagcatcgtctttaaaccctgcctgccaatccctgacgcaccgtcgacatgcccagggaatgacaggacgcacctgcaagtccaactacttccttaagatcatacaactattggatgattatccgaaccgncttattgcgggttcatccggtggtgggtccaaacagacgcaatatctccaaaaaaacctcccaaggttgttttttttgcccctttcatgaacaccatgatgcccaaggccatacatggnaacatgggaaacancccggccttcgnccattttntgcctcacaacnggagggattttggccttttcttaccnncaaggccaacccaagnctgctntggccanngaccacccccttttntttccacntttagctgtctcggggtccatacagcccttattgttccnatcatccatctcttactctcacccctcctaacaggcatcttttcttcctttccatcattatattattttatcatccttcctatccttccctagtatttcgctctctctttttatgtc

SEQ ID NO: 532919 - DNA, 118 bp, Homo sapiens
aaattggtagccatggcggcttggcccagttggtttcttgtgcccgcgttttggctacggttttttttggcgactttgccttaagcggtttctccttttgggcaaatttcacgagcta

SEQ ID NO: 532920 - DNA, 1123 bp, Homo sapiens
gatctcgccaacataagggggcaaccgttatgggccgggaaactctgcgtgtatccctctgtgcatgcccagggatgacttgggaaccggagcccagagggggcccacccccccggaggggaaaggtgggccccaaggaaactccggccagggttcccgggcgcgttgcccgttcgcggaaaattcaacagggccaaaagaagtagacgcccccccgaggttggggaatggttggaaataaccgcagacacccccctgggacagacattccccgggagaattaggggattggggggtaattaataggtgcctcaggtctaaggggtgaagacgagtgggaatagaaaccccgaagtggcccgggagtccaggccgtggtcaagccctcaaaacccaagggggccccccgggaagcactggcctgcttgaagccctcgggcttcccctgcagaaaaacttggggggacaggagggagctttgttccccttcacgtgtatgaattctttttcccctcttcccctcgctgcctttcgcttcccccttataggctcttgggaagccccttataaaggttaagtgggaacaaagaacacctcgggggaataaaaaagcttctaattggctcgtctggagaagagaaggtttgaaagtctgtggtgtgtggcaataatgcaaaagcaaagtgttgttgtgttgtgtggtggtgcctcaaatttggcaagaaattcttggctaaccacgttaagggtgtgttataagagagcacttctccacactgggcggagaacctggcacatttgttttccacctcgttaaagaggagatgagcaccaccccccctgtacacatgtaaagggagaggaggctatattgaggttaagacacatctttccctaatgggaaattcctcggtttggtttgtgggaaaaggaggggagaatggaataaagtgagttgtttaatctctataatcgtcacaacaccacgctgtttttccacctgaaatttgtgctatttgcaataacacatgtatgccactcttttttttcacctgcacagcagtgtttatcagtagttccaaatgatttatttgctcctggggagtaaaaccttttttattta

SEQ ID NO: 532921 - DNA, 582 bp, Homo sapiens
  misc_feature (248)..(248): n is a, c, g, or t
  misc_feature (289)..(289): n is a, c, g, or t
  misc_feature (374)..(374): n is a, c, g, or t
  misc_feature (383)..(383): n is a, c, g, or t
  misc_feature (390)..(390): n is a, c, g, or t
  misc_feature (393)..(393): n is a, c, g, or t
  misc_feature (398)..(398): n is a, c, g, or t
  misc_feature (400)..(400): n is a, c, g, or t
  misc_feature (410)..(410): n is a, c, g, or t
  misc_feature (417)..(418): n is a, c, g, or t
  misc_feature (430)..(430): n is a, c, g, or t
  misc_feature (450)..(450): n is a, c, g, or t
  misc_feature (462)..(462): n is a, c, g, or t
  misc_feature (465)..(465): n is a, c, g, or t
  misc_feature (479)..(479): n is a, c, g, or t
  misc_feature (513)..(513): n is a, c, g, or t
  misc_feature (538)..(538): n is a, c, g, or t
acctggtgttcctggccttgagcagcatcattggcatctgtgacctgctgaggtagcactgggttgccaacaacctttttggcctggccttctcccttgatggagtagaggtcctgcatctcaacaatgtcagctctgtctccatcctgctgggcggactcttcatctacgatgtcttctgggtattggcaccaatgtgatggtgacagtggccaagtccttcgaggcaccaataaaatggtgtttcnccaggatctgctggagaaaggcctcgaagcaaacaacttgncatgctgggacttggagatgtcgtcattccagggatcttcagtgccttgctgctgcgctgtgacatcagcttgaagaagaatacncacacctanttctacnccnagctntncagcctacancttcggnnctgggcctttcnatcttcatcatgccatcttnaagcatgctcanccngccctcctataccnggtccccgcctgcatcggttttcctgtccgtggnggcgtggcaagggagaagtgacagngatgttcagttatgaggagtcaaatcctaaggatccagcggcag

SEQ ID NO: 532922 - DNA, 1291 bp, Homo sapiens
tcgaacccacgcgtccgggcttggtgcttcctgttcgcagcgtgcgcgcagctgagagaagcatggtataaactgggtccaatcaggtgacaaacgacattgaggcccagaatagctaataaccgagacacctggaacgatggacccagcggtactattcagccaacaaaaacattatctgtagaaacttgtgacacaacgtggtcatttatcaaaaagagctgcccctgtacgcacgaacaagtatcgtcgctgacttcctgatggctccaggagcaggacactcgtcctgctattcctgatccagggcccccatttggcggaactacttgtccctgtagccatataggatgtctggaccgacctcactgtcgttctctcagcaacacttccctgaggcataacaccagccgctgacccgactgctcactactgcgtagcgccgactactacacggactggccttgcacccaggaaactcctggcacggcgagctaatcgaccgtaacgcaccgaacaccctgggaccacgccaccaacagccgcaagcaccccccttcaacgcaccactcacgcccttagccatacttgcctactcactggcgcgcacacaacgggccactcactgcgacagccgacatgtcccagaacagagaacgtggctactgacccgttctccagctaatctaccattcactcctgcctactaatgactgacccacctcactgacacacctccaggcacgagcagacacgcgcagaacctaacacacccgccgcacactcaaagctagctccaacgacacacacacgcggcgcctaatacccgagaaggccaattcccaaaggccacgccctgaactactgaacacagcccagccaacacctggagaaacccgctcaccagtgcaatgctccgcgccccggcgcccccagccctccactggtagaccgccaacccggcgtagccccccaaagacaacctccggaaccctccagcccaccgcccccgcacaaacacacgcacaactacagaccgcgcgcggcacacgcccccaccccaacgccgtatcaccaacctcacgggcaacacgcacaaaaggcgacacccccacgggaccccccccccaaccaagccaccctccgcaccccactcccacacgacagcgctcaagcaccgaacaccgcccagccacaccaccaaccgcaagacaaaagaccccccccgcaaactaccgccaccccctcacccacgccgtcccacacacacccgacccacgacccccacacc

SEQ ID NO: 532923 - DNA, 1115 bp, Homo sapiens
catcgggattgtccgagtttaattccggcgtgcgcagggtaagctatctgttcgagcgttgactggcccaagtaagtcgctctggtgttgcaggatagttaggcgattgttggcgctgatatgagctgtggccgatattatccatggatggacgtagttgccataccaggcctgatgcacattgcgtacactatttgatgcaagtatgcgactcgagactgtccctgaagtagagatatgcacctgtgaactatcagcagctgtggatcaagcctctgacgccattgtctcagatataatcacctggttccattttggagcagggaattcaacaagtcattcgatcgtgggtgactggggtatcccgcagaaccgagggcgtgtacaacaggcaagcttgctgacgactacatcaccagtgctagtggaagtgtccatctagccatggggactgcgaccgacgttcattgaataggacccgcacttatgttggacatctttcgtaaggcagaagcgcattcgactgatccaatgccgtgttgggaaacactagctagccaatttccctttcttttacgacaattttagaaggttgcgggcatagagacttgagtagtggcaaccacaatatttgttctatgccttgacaacaattcccgcctgaatacatttagaccatgccaagttggttactatacctaatttttcatagcctcatggtgtcatgactaacattggaaagagaaagcgaatgctagagagtattcagagcgtgtaggcccctttggtagaggttgaactttgcctgtccgaagcgcacgctgcaaagcaataaaatgcgagcagtccatgtctgttttcgagttagtgtacacctaggtggaggcaagtacagaggagtgatataacactagaagctgtgtcttgcctagagattgtacacgctacgcaagtggtccaaggcgaaatgacagccgtgcgctttcgggagatatccagaacgagagaagtaccggcagtaaagtattgcccaaagcccaaggagtttggtggaagaccccttcggagactacggctgcataagctaccattcgccaggaatgtcttccccgtct

SEQ ID NO: 532924 - DNA, 1571 bp, Homo sapiens
cacaggtgtcgagaacaactacccctaaaaggccaaaaggggaaaggaaatagactcatactctaacatcgtgcgtcatcggcacgacgatcagacatctcgagtggaagatccacacacatactctgggccgagtcctgcactctatcaagaatgccggatggtcatcgcacagagaagacaccgatgggacaagaagtgtgcagcaaggaagagactgtatgtagcatgtggagaacgggcatccatatgcataggttactgaccgtaggagatgcctttgcgcagtgatagaccgtcgacagaggactagcacggcgctacgtagaaccagtcgggctaattacgagccgactttagaactaaatccttcgcgtaatgactgggggaaacagttctatgggacggacccgaaggcacatggtaaccataaatggctcggatcctccactgcccattgtggcattaggctcacacgcacgtagtgacaaaccgatgacaggcactatatgttcagtcccacaagcacacaccaatcaggagtatacacgcaaggggggcacccaatacctcacaaggatgccatcgcaagcattagccaggctgttacgtccgcatgaggaaataagaggctaacgcataaggcctatgcggtaagattaaaggggataaggacgactctagagggaaaagacacagcggtggcgttacattgtcattccaccgaatagggcaaacgtaggtggcgccgcaggccatccgcgcccggggatgggaacggacccacttagacaccaaccttatataccattaggtggggcgtatagacacacaaccaacactatagggcgacgatctcggccttggtgccacatacactcctaggaagcccgttaaccacatcattaggttacccggcgactatgatatatacacagcacgagcaggcgacacagatgggtgatcagctctcccaccacaaccaatgagtaaaggacaaccgaaatacccgccatatataaacccaaaggacgagcgaaatgcgaatacacgggacagcaccggtcacgtacggaaacgacggaacaaaaacaaatatagggagggacgaaaacaggacgcgacaaggcactccgacggacccggagccgatgataccaagcgaaggagtggtacacgacgagcaacacgaaacaaggtacgtgcgaacaagactagacgccgaagatgaccagccacccagggacggcaaaaccaacgacacaaaagcgacacaccatataacaggccatcggacccagccgacaaaacaaagagacctatcgggggcgcaataagaagaaaacagagtaggggaaaggagaccgacaaaacacaaagatgcggcccatagagaacaagaccccccaacaggaaggcacgagagagcaccaatgagccacagactgagacgatgagacaaaacgggagcgacacttggcgaacaaacaagaatacgagcccccacgaaagaggcggaaatcagggacaaaatgctcccaagacaaagtgcgaccgaaccgcgcaccagc

SEQ ID NO: 532925 - DNA, 140 bp, Homo sapiens
ggacagcacgcgcttacaactccgatgaccaaactcatggacaccgatgcttgttgtgaccagaccagcaggagatgaaccttccagaagtgggcagctgtggtggtgccttctggagagagagcagaggattcacatgt

SEQ ID NO: 532926 - DNA, 453 bp, Homo sapiens
  misc_feature (404)..(404): n is a, c, g, or t
  misc_feature (410)..(410): n is a, c, g, or t
tccacattttttgcttgtggaaagactgttttcatatgttctacttggataaagaatttaaatggaattacgtataaattaatataaaatgattacctctggtgttgacaggttgaacttgcactcttaaggaacagccataaccctccgaatgattgcattaatttctgaccgccctcagcccgttggaagcttggtttagaggacttgttgggctcattttggttttattgaaatgccatctaaatatgttagctgtagataggaggtgcttctggtgaactgaaagtgtctgactccgtgaggaacatggtaggttcctcacttatcactgtagatgattctatatggacacaacagtaagaagaatggggcctcgtcctgtcgacttgaatattatcccnatgtantgcatgagaagggtctccctcattccatcagagtaatacactt

SEQ ID NO: 532927 - DNA, 185 bp, Homo sapiens
tcttaaaggagtaaattctttttaactgatacgtgaggacagggtgtggaggaaacatattacttacctcatatctaaatgtgaaatatctgcaactccgtacttgataggattatgatattacaggagctggtatgtgatagcattctttcttattttattaaccccgcacctggtacggcggg

SEQ ID NO: 532928 - DNA, 164 bp, Homo sapiens
tcgcccatataccccctaggctgggaagggtagggggctaagggtagaagacagattggtcaatgggtgtaaaatacagttagaggccgggcgcagtggctcatgcctgtaatcccagcatgggaggctgaggtgggcggatcacgaggtcaggagttcgagac

SEQ ID NO: 532929 - DNA, 689 bp, Homo sapiens
tagtcatcaaatttctcttcagacatcaactgaaataatcatatggtttttatccttccttctattgacatgatgtatcacactagattggtttgcatatgtagaatcacccttttattgcagggataaatcccacttggtcatgttgaatgattgttctaatgtattattgaattcattttgctagtattttgttgaagatttattcatcaataatcaatattaaacagagaaactggtctatagttttcttttttgatgtgtctttgtctggttttggtttcagggtaataccgccttcatagaatgagtctggaagtatttcatcctctatttttcagaatagcttgagtaggattggtattaattcttctttaaatgtttggtggaattcagtagtgaagccagtgggctgcaggcttttaatcactgagagaatttattactacttcagtctcattacttcgtattgatctgtacaggtttttgaattattctgggttcatcttggtaggttgtacatgtctggaatgttctatttttctggatttccacttattggcattattgtctagtaacatatgatcttgattccgatatcgtgaagttctttaatacagatatataaatatcctttgaccggtaggtgcattgtacttcaaaactgtatgctatgtcataaaatgggg

SEQ ID NO: 532930 - DNA, 432 bp, Homo sapiens
  misc_feature (332)..(332): n is a, c, g, or t
  misc_feature (422)..(422): n is a, c, g, or t
  misc_feature (427)..(427): n is a, c, g, or t
  misc_feature (429)..(429): n is a, c, g, or t
  misc_feature (432)..(432): n is a, c, g, or t
ttctaatcatcttcttactcttacttctcctcaatatccttcactacatttcttaattccacctttttattcctctccttcttcttactcctcatacccttcctacattacattatacttactcaccttttatattttcattttttttctctcttttcaacacttctttccataataactttatattacaatttctaaattttcccccttaacctatattacaccaattcttattcaccctttctcaataatacaatataaattcttctttttcttaatcaaataccctttataattaaacttcattttccattactatctttctcttattnttttcttatccgggcaagaggactttcttttttaacataacatccactacattattccttgttgtcttgtataatcaaaaaaataattcntcacntnccn

SEQ ID NO: 532931 - DNA, 652 bp, Homo sapiens
attagatgtattttatattgaagtggttacttattcttgcttctgagatccttggaaaattaaaggtggctgtggattggtgagaaaggtcatactggggatgagctatagcatcaacaacttttgaaatcatttccttaatccttgcagaattatcactgagtactgctgctcatgtgatagtgatacgacttagaggaaaagagggcgaaatggagagcatgatttattgtccaaaataatttttcttttcacttatgtaaattctaaagtaatttataaagctattccaaattatagtatatggtttttacattgaaatatactaaagtagacttaactaaatagagatatgtaccatgtttaaggaataaggagactattgtaaaaatgtcacttcttttcaaattgacctatagattgaagacaatttgaattaaaattctgaaagccttgttttggaagattgggggatcttgataagtttattctgaaatgtgtatgaaaaagtataatgaacaagaataactaaaatacttaagaataagaataaatgtatgtgtatgtacttgatttatgtggagctggcatttcagtggggaaaaagatgaacttcttaaaaaatagtgacgggaataatttgttagccatt

SEQ ID NO: 532932 - DNA, 253 bp, Homo sapiens
taatcgagctcggcacctattagactttcttcagtccaggagcttcgagaccaggttgggctaacatggtgaagcccatctctactaaaaatgcaaaaattggttgggcatggtggcgggtgcctgtggttcctggccgcttgggaggctgaggcaggagaatcctttgaagacgggagttggaggttgcagtgagccgggatggcgccactgtattccagctgtgggagacacagctgagactctagtctgc

SEQ ID NO: 532933 - DNA, 102 bp, Homo sapiens
tatttctgtgccagcagccacttggcccagggggcttatcctggaaacaccatatattttggagagggaacttggctcactgttgtagaggacctgaacaag

SEQ ID NO: 532934 - DNA, 116 bp, Homo sapiens
gcggccgcctactactactactgctcgaattcaagcttctaacgatgtacggggacatgatcccaccactgcactccagcctgggcaacatagcgagaccccatcactgcaaaaaa

SEQ ID NO: 532935 - DNA, 1171 bp, Homo sapiens
gtgaggcattctggcgcggagcggaacggcgcgtcggacgcattacgcgggtcggccgcggacgcgtatgtgcagctctggcttacccccggtctacccctcctagaggcgaggacagagagaagctactatactgccaacggtcacgaaacagaacaccaagggggaaaagaaacgtggttgagacaagcaaagaaaaaaacaaacaaagtacaaccacatcggggtattaggcgactaaacaaaaatattaaaaaagtgggaacaagacacaaaaacagaagaacggtggctaccacgtcacacgaagcccctcaccccaagcaccaacaagcctacagaacactggcatgaaacgaaaccaacaacaaaatacacacacaaacagccacccacgcgagggcgacgaaagcgagcagcaaacacacgaagaagagagcaacaagacaaaaggagcaagaggacacaacagcacagaaagccagagaggacaacaaaacgagcgcaccaccacacagagccatcccaacatcaccccacacgcgagaacggccgcgcaccacacacagaggaacgcgaacaacaagcaacacacacaattacgtggatcaccggacgacctcgcgcgcagcacacgcacaacaacaaaaacgacagcgctggaccacgcacttccggtagacaaacacaccacacaggacgccctcaacaccaggatgggcaaacaaggaacagagactacgcggcagagagcaaacaagacaaacacaacaacagccaataggaacacaggcagcaaaacaactaatgcatcaacgagtagcacacacagagagagccgcacacaccacacgacagaacaaacacagtaggagcacaccccctctcggaacaagaacgcacactcgacaaacaaacaaagtcagcaaaacgatacaacgtagatgacaaaccgacggcgcactacttgctgtgtcgtcctgtctccctgtacaacgaagcaacacgacaagacagaccaacaagaactacaacacacacacgaaccaagtacgtagaaccgaacagaaagaaacaagaactgacagcaaagacaaaacaaagacaagaagcaacaccaataaaccaacacaaacacaccaaaaacaaaagaaacacaagagaaacaaaa

SEQ ID NO: 532936 - DNA, 693 bp, Homo sapiens
  misc_feature (11)..(11): n is a, c, g, or t
  misc_feature (67)..(67): n is a, c, g, or t
  misc_feature (104)..(104): n is a, c, g, or t
  misc_feature (108)..(108): n is a, c, g, or t
  misc_feature (111)..(111): n is a, c, g, or t
  misc_feature (115)..(116): n is a, c, g, or t
  misc_feature (171)..(171): n is a, c, g, or t
  misc_feature (184)..(184): n is a, c, g, or t
  misc_feature (189)..(189): n is a, c, g, or t
  misc_feature (193)..(193): n is a, c, g, or t
  misc_feature (201)..(201): n is a, c, g, or t
  misc_feature (204)..(204): n is a, c, g, or t
  misc_feature (212)..(212): n is a, c, g, or t
  misc_feature (227)..(227): n is a, c, g, or t
  misc_feature (231)..(231): n is a, c, g, or t
  misc_feature (237)..(237): n is a, c, g, or t
  misc_feature (245)..(245): n is a, c, g, or t
  misc_feature (248)..(248): n is a, c, g, or t
  misc_feature (262)..(262): n is a, c, g, or t
  misc_feature (266)..(266): n is a, c, g, or t
  misc_feature (269)..(269): n is a, c, g, or t
  misc_feature (284)..(284): n is a, c, g, or t
  misc_feature (332)..(332): n is a, c, g, or t
  misc_feature (339)..(339): n is a, c, g, or t
  misc_feature (341)..(341): n is a, c, g, or t
  misc_feature (346)..(346): n is a, c, g, or t
  misc_feature (353)..(353): n is a, c, g, or t
  misc_feature (359)..(359): n is a, c, g, or t
  misc_feature (362)..(362): n is a, c, g, or t
  misc_feature (374)..(374): n is a, c, g, or t
  misc_feature (410)..(410): n is a, c, g, or t
  misc_feature (438)..(438): n is a, c, g, or t
  misc_feature (463)..(464): n is a, c, g, or t
  misc_feature (474)..(474): n is a, c, g, or t
  misc_feature (525)..(525): n is a, c, g, or t
  misc_feature (546)..(546): n is a, c, g, or t
  misc_feature (590)..(590): n is a, c, g, or t
  misc_feature (693)..(693): n is a, c, g, or t
acggctcagancgaggcgcacaggctcgcagctccgcggcgcctagcgctccggtccccgccgcgangcgccaccgtccctgtccggcgcctccgcgcgcttcnaaanaanggtnntgggtgggcgctgcggggcgctgctggcgtgtctcctcctagtgcttcccgtctnaaaagaaaaattnttgtnaaanaaaaaagnttnaaaagtantggttaggaagcgtngtgnaaattntttaattnaanaaaaaaaaaagggnaatnttnaaaaaaaataaatanaaaaaatgtgaaataaaaaaaaaacaagggaggtatttgaaaataaancggaaangnattanttttatnaaaaanaantagtttgtcttngctcttttcaaactgggttattcactgctgaacgtnagtaaaataatgcttataatgacctaanaagctgtgtcaatgcaattccagannagtgtagtcntctgccatgcaatgaaaatggatatatgagctgaaaagatggaaaagattnttttacttgcacttgtaaacnaggttggcaaggagaaaagtgtgaatttgacataaatgaatgcnaagatccctcaaatataaatggaggttgcagtcaaatttgtgataatacacctggaagttaccactgttcctgtaaaaatggttttgttatgctttcaaatan

SEQ ID NO: 532937 - DNA, 1626 bp, Homo sapiens
  misc_feature (195)..(195): n is a, c, g, or t
gcaagtgatgaagtattaaatctcatatacctacccacttacctctccttcacccaaacgtccgcataataatcacccgttagtagagcaaaccacggcaggaaccgacacaagtgcaagccgaagacatcatgattcgccttacattctctactatgccccccacatcagatccctagtgtccctatcacgtcncgtcgaggatatatgaatcactatctaattatacacccctcatagtctgcaatcctccacactccaacatacttcctcatctacaacatagcccgcaactgaatttaactccaacaccaataccatagtagactaaactacactatctaatagctctaccataagactataatagcattatgcccatacaactaagctaactagatggcactgcatatctggatacttcttattactaagatacttccctctaaaatgcactccattgtattctagacgcaccacaccatatacgcctgcgcgtcgcagaattcatgctcatacgctcgtacacgctacattattattcagcacaaaacccaacgcgcaaggctatattcgtactaatagactcatacgcccatttcggaaccatttacctccctctaatcgaacgcccggggaccgcaagattgaactataatagggcgtatctctccgtctcctatagggattcttaaaacactggactcatgaggcacttaaactgtacctatagcacaagcaatcggacagcattgccttatacaagaccccatattaatggcacccatataacatatcgtgtttatctataattcgcggagaaaaccctcattctaagacctctacggtgcactattctagagccccaattctaggcacccttatggcggaccgcggaacttgccctctaaatcccaggaaatacacccactttgacctggccatggccccaggcgttaccaatcaagtagctaccctctaaatattttgcggaaatgcaagccggaacccctctaagcctacactatctcataataccatattttaactcccgtctctcccttacataacattctttatatttcaactcctatccagcaaaatttccctacaagtttccgtaacttcggataataattccgctaatgaaacaattcggggctggttccagcccttaaaatccccacaccgcctaaactgtagctttcaacccacgcattcgtaagtaaaaagccatctaaaccctttgcacagaccataggccgtttaacccccccaacaaaaataaaggcgcgggggggggacgaaacaacatctggccgcctgaagagggggccccggacctccccggggtaaaccaagtccgtcctgcccaacaatgggggcctcaaagatagcagggcaaaaaccgcgtaggccccgtgcaggcgattttcacccacacccaaggggggacaaacgcccacccggggaactctgtgaaggaccctcatacggggagaacccaccgtgtgcacaaccaatcccgatagatgcgcatgcgtactcacactaacggctggtggtctcaacacaactatgcgagaacatcagccgtacagctgactccatcgcactactgtcgcg

SEQ ID NO: 532938 - DNA, 274 bp, Homo sapiens
gtctccgtgtgttttgtggtaaggtccatgaaaccagcagcctgtaatgtcttgtgctgctgagcggggtagaggtgcagcgagactggggcttgggtgccatcgtgcccactccgcattttctcaagtcctgtcttcaggagaagagtcattttcttcattcctgctacctctgctggttttaacacgaaccccggggttggcaagggaaccttgacgctaggacttctgagtatcgaccgtgtgcacaatggacctttcgtgcaattgctgc

SEQ ID NO: 532939 - DNA, 107 bp, Homo sapiens
tgctgggagtaaggaggtcttttttaagcagctctaccagtgaggttgcagtgtagtgctgaaaatagttaaggccaggcgcagtggtcatgcttataatcccagca

SEQ ID NO: 532940 - DNA, 331 bp, Homo sapiens
attcgcggccgcgtcgaccaaacttttatttatgtttcaaaaaatttttgtttttagcttttgtgggtacacagtaggtgtatatatttatgggttacaggagctattttgatacaggcatgcagtgcatatactaaccacatctgggtaaatggggtatccattacctcaagcatttgtgctttgtgttatagacaacccagttatgctcttttgttattttaaaatgttcatttaaattatttttgactatagtcaccctgatgtgctgccaaatgctaggtcatattcattctttctatttttttctacccattaacccttcccaccc

SEQ ID NO: 532941 - DNA, 237 bp, Homo sapiens
tcagacagcggacccccagctgcacaggtgggatgagcaaacagtcccgagcgtactccagcaggaggaactctctcatgttggaaccgaaatagaggttgtgtgactggaggagcttgcagtggtccggcagctctgtcaggtggcgcacaaaccaccagttgctcagggcgatgctgcactctttgattacttgatggatgtcaaactcaaaggctagcaacaagatgttgtcca

SEQ ID NO: 532942 - DNA, 186 bp, Homo sapiens
cggtggagcccctgacctgggcctgtacgaccggacggcacccgtgtcaccactccggtgctccaacctgtgtgccagcatgtgcagtgctgtgctgggcatggtcacggtgtgcatggagtgccctgtgcttgtggatgcccagtgaatacgaggtctccagcaagcctcgatgtgcatcagcct

SEQ ID NO: 532943 - DNA, 122 bp, Homo sapiens
tctagaggacctggtgtcatcacccagtatcacctggtacacgcccggatcgtcatgaaacagctggttcatctcctcccttctgacgcccaggacgctccccggctcgtccatccaggatg

SEQ ID NO: 532944 - DNA, 763 bp, Homo sapiens
gacttggacctgaaccttgctcccgagagggagtcctcgcggtacgtcagcccaagattccagaatgactactatcttgacttacccctttaaaaatcttcccactgcatcagatatgggccctcagattttccatagagacctctgagctgttcctcccagctacgagctgccccagtctgtccgagaccaaaacgaagaatgacgttagccaaacccaatataagggaatgtctgtgcgtggtggatggtgttcgcactccatttttgcggtctggcacttcatataaagtacctgtagtgcctacatgatttggtctagagcagcgctatacgggtttgtggcgatcggaccagtgtccctaaggaagtagtccgattaatatcatctttggtacagtcattcaggaagtgaaaagaagcaatgtggctagagaggctgcccttggaagctggcttctctgacaagactcctgctcacactgtcaccagtgggctggtattctcctgccaaccaaggccatgaccaccagggtgttggcttgctgtgcttctgggcagtgtgatgtgattcgtgggccagctggtgttgagttgatcgttccgatgtccctatttcgtcactccgggacctgggaaactgtgcgtgatctcattgggccatctatggggcagcgatgctttatctctattccgattaatttctacccttactcctgcggtccgggttctcccccgacctggctctcaacgagggtacgtt

SEQ ID NO: 532945 - DNA, 359 bp, Homo sapiens
tttggggttgggtgagaaggaaattactattagtttctgttttgtatgtgtggagtattaggttatatactctgtattcgatatccaccccttctttgtgtactttagttttggagtttggaactttactttggtaggaaagcattgtagtatgtggggaagcaagatgttctggaatgaagtatgtagctttatggggggaggggggagggctgcttgaaaaccatccatttgtggaaatgatagtggggaaggtttttatgtgcctttttgtttttgtaaaaaaggaacacccggaaagactgaaagaatacattttatatttggatttttacaaataaagatggctattataatgg

SEQ ID NO: 532946 - DNA, 534 bp, Homo sapiens
  misc_feature (103)..(103): n is a, c, g, or t
ttccggccgatctatttttatttgaaaccaagttctgtgaaagagcacactcaacagtcatatatcttctcttcacggaagggggggagacagggttcttcangtcagtgcagaggcgacgatacatgcattgaatagcagggctcggcatgaatttcctcataagcattcccaatatgagcctggacaatcttcttcagataagcaagtgagatcctctgggggggggtcatcaatatactcaaatgggtctggggggtctggctcttgttcctcctcctcaatttttgggccatgtgctggcacaggtgccaccagctcctcaatgtcttcactggtatccttcagagtgatgatgcctccaatagagagtggggttgaaggctggtatctacagggctccggcatgggtaggaccttaagctgggcaggcataactcgggctgggttatccaataactgggaatttggctcaggggtctttttcttctctggtgtctcctttttctctggctgctcctggagcgggggggg

SEQ ID NO: 532947 - DNA, 383 bp, Homo sapiens
tacatctttggtgttgtggtaggccgcggtgtagctgaggtgagtgggccaggccctgagagctatgttctgtcaggggtgtggcgtggctttggcttcgggccaggactggagaggtgtaatgctggccatgtccttggggaagaggtctttccaagagctctttaacacagagtccatgttctgtgccacagccttatcacctccacgtgttgctctggggaggcctggaaccacatttttcgtcgtctgtgtccagagggtcccatggccctcagggtgaggtgcatgggtctggccggtggaccagctccgattccaggaggccctcgggactgctcccagactcccctgcagtctgcagccctacccataagcccctg

SEQ ID NO: 532948 - DNA, 819 bp, Homo sapiens
ctacatcatcgctggtggtctgtgtggcttcggcctggtgttggctgcagtggctgatacatgcgtgggtgtgcagaagctcgtgttgacttctcgctccgggatccggacaggctaccaggccaatgcagtgtccgccgtgtgtgatgtgcagccatgtggctgtacacgtgtgcatgtgtgtccaccaagcaacactcagctcacatgtgagtgtgtgtgccctgtgtgtgcctcatttgcctgagtgcggcgcatgcttgtgtgccctgtgtgtgcgtgctgtcttcatacctgtgcctgtggtcttgagaggatggctttgcttggatgaaccaagaccccatgagttcttccaaggactgtctgcaaggcccaagtacaagctggcacccctgaaccttggacagggtagaccctgagaggctgttgcccttgacgcttggacctaccttttgttggtctatctccatctgatgatgcttgctgtggctgttggcaactgctgtggacatgacgcaacatacgtgcctttgccaaattcctgctcatgtgagcgtatcatgtgaggaaactgcctgtgcacgacaggcctccacagtgccttgtgccgtgccatgtggggctgccaatctggcgacgttggtgcatttatggtgcgagaccgatgagcaaccaacgacacgaatagtcagattggcacggctggcccagctgcattggctgttcctgacctggagagtgcttggaacctctttccttgacatcagacccacaacatgtgtcctagaggcaggcttatgtgacttgagctgacga

SEQ ID NO: 532949 - DNA, 306 bp, Homo sapiens
  misc_feature (24)..(24): n is a, c, g, or t
  misc_feature (95)..(95): n is a, c, g, or t
tgctgcatgtgcacgtgcagattntgtgcccacagtatctcagctatcggtcttgctctcgtgccagtgacctgctcagcctgcgtgtgacctgnggctggcctcctgtacctcctttgaggttggacagtgtttggtctgtcaactggaaggagctggagggactccacaggagggaggggtctgccctcctggttccagtgtgcttgcttgtcctggctttcgtggtgtgtgcctgcccagcctcatggtgggggcgggggctctcagtgacagtctgcagggagtttagcaacacccaggttc

SEQ ID NO: 532950 - DNA, 112 bp, Homo sapiens
gaaaagacacgggatcaaataaccattgattaaattaagtatgtgcaatgcatgtatgcaaagagggtagaatgggtataaagtgttaagtaaaaagggacctgtataatta

SEQ ID NO: 532951 - DNA, 263 bp, Homo sapiens
gaaacgggcttggagctggccccataagggctggcggcttcctccgacgccgcccctccccccagctttttgactgcagtggggcggggggcccccacccttggagatttttccggaggggagaggattttttaaggggccagagaatcccttttttaccccttaacttgagctgctggaggggccctgctggccaacggagacctatttttggacaaagaacccctgacctggggggtaataaaaatgacctgggcccctga

SEQ ID NO: 532952 - DNA, 368 bp, Homo sapiens
cactggaggaggccttgctgttaggaggaactgtccagaaagagcagatggagactagggaattgcaacggttgacttttggcagaaatgccgatcgaagtatagagagattttcacatagtcctaatacgtacgaatagcttttctttgacttgcaaaagtggaagcgataattggagtgaaagaaatgtatgtgaacaagtgactaatgaagacaaatcagttggttggccagctgttagagaccaaaagcgaggagtattttggcagttcattgtaatgtagccttagcccatgattttacaaataaagaaaagtactgagagacagatagtaaaataaaacaaaccagcagttcagatagaaaa

SEQ ID NO: 532953 - DNA, 213 bp, Homo sapiens
agtaccatatttacaccactgctcttcagtctggacaacacagtgagaacccccatctcaaaaaaaaacgcaaccatgtctatggggagtttagaaagctcgcatgcatgccctagataacatgcatactcagaaacttcctgagaggactaagctttcaccttgagctagtttataagtgcaatgcaagtctgcctaagggctgtaggagta

SEQ ID NO: 532954 - DNA, 300 bp, Homo sapiens
accagatctggagatgaggggcgatctcggtcactgaactccgactcccgggttcacgccattcccctgcctcagcctcccgagtaactggaactacaggcgcccgccaccacgcccggctaattttttgtattatttagtagagacggggtttcacctgtgtgttagccaggctggtctcgatctcctgacctcgtgatccgcccgcctcggcctcccaaagtgctgggattacaggcctgagccaccgcgcccggccagctctttcattttcaataaaacaagaaaaccattggtcca

SEQ ID NO: 532955 - DNA, 196 bp, Homo sapiens
ccaaggattagtcgtcttcttcggtgacactcccgagacccaaccctgcacgccagctcagtgattactcggagctacagagggtgaaacaggagcttctgggagaagtgaagaaggaattgcagaaagtgaaagaggaaatcattgaagccttcgtccagagagctgaggaagcggggttctccctgtaccacag

SEQ ID NO: 532956 - DNA, 852 bp, Homo sapiens
gcaagcagatcgccgcgaaagcagtacaagggcactcgtggactgcattgtccgatccccaaggatcagggcgtgctgtccttctggaggggcaaccttgcaaaagtcattcgctacttcccctatcaagccctcaattcgccttcaaggataagtacaagcagatcttcctggggggctggtggacaagcaccacggcagttcttggaggtacttggcgggcaacctggcctccgaaggtgcggcggacggatctcccctctgttcgtgtcaccctgcgtgtaatttcgacaagaaacccggccttgagcagcgggcaggtgagccaaagtaagtgcacaagtaagcgcgatgtgcaggatgccgtgtgacaactgtcttgggtgaaacattcaccaaggtccggaaggagcattccggggagcatgataccaacgggcattccaggaggtctcccgtcgcagcgacaatcatcacatctaccgagcagcacgcactacatcccgagaggtgacaccgacacaggagcacaagggcccaatgctcacccggaccccaaacgagaccaaaaggccacaacccgggcggctgacgcctggagaacagacccggcaaacaaccggttgacaggactccgaggacaccgaccgtcggaaagaacaccaacgcccttacggaacacgcgagtggcgccgccacccactatgaacaatcgccacaccacaggcgagccaaagcgcagcagagacacaccatgacacgcgcagcacccagacaactgacagacgagaaccacccccaccacaacgacagggcgacaccgccactccccaagcgcgctgcggaccccaa

SEQ ID NO: 532957 - DNA, 1022 bp, Homo sapiens
  misc_feature (123)..(123): n is a, c, g, or t
  misc_feature (133)..(133): n is a, c, g, or t
  misc_feature (173)..(173): n is a, c, g, or t
  misc_feature (198)..(198): n is a, c, g, or t
  misc_feature (257)..(257): n is a, c, g, or t
  misc_feature (262)..(262): n is a, c, g, or t
  misc_feature (502)..(502): n is a, c, g, or t
  misc_feature (507)..(508): n is a, c, g, or t
  misc_feature (512)..(512): n is a, c, g, or t
  misc_feature (521)..(521): n is a, c, g, or t
  misc_feature (633)..(633): n is a, c, g, or t
  misc_feature (653)..(653): n is a, c, g, or t
  misc_feature (655)..(655): n is a, c, g, or t
  misc_feature (658)..(658): n is a, c, g, or t
  misc_feature (669)..(669): n is a, c, g, or t
  misc_feature (676)..(676): n is a, c, g, or t
  misc_feature (684)..(684): n is a, c, g, or t
  misc_feature (689)..(689): n is a, c, g, or t
  misc_feature (696)..(696): n is a, c, g, or t
  misc_feature (700)..(700): n is a, c, g, or t
  misc_feature (702)..(702): n is a, c, g, or t
  misc_feature (706)..(707): n is a, c, g, or t
  misc_feature (710)..(710): n is a, c, g, or t
  misc_feature (719)..(719): n is a, c, g, or t
gcaggatggagaggagacgcatcacctccgctgctcgccgctcctacgtctcctcaggggagatgatggtggggggcctggctcctggccgccgatctgtggtcctggcaccctgacctctcncctgggctcngaatgccaccctccacatcccgaccctgggtggatttctnccctggcatggtggcactcaatgcntggcttcaagtgagaccctgggccagtgagcgggcagagatgatggagctcaatgaccngcttntgccagctacatcgagaaggttcgcttcctggaacagcaaaacaaggctgctggctgctgagctgaaccagctgcgggccaaggagcccacacaagctggcagacgtctaccaggcatgagctgcgagagctgcggctgcggcatcgatcaaactcaccggcaacagcgcccggctggaggttgagagggacaatctggcacaggacctggacactgtgaggcagaagctccaggatganaccannctgnggctggaanccgagaacaacctggctgcctatagacaggaagcagatgcagccaccctggcccgctggatctggagaggacgatcgagtcgctggaggaggagatccggttcttgaggaangatccagaggaggaggacgngnacnccaggagcagntggccgnaagcaggncaagntggagcntgangnggcnnagncagaacccnccgaggccctggaagagaacgagagcagaagaggcactggcgcgcagaacaagcatgaggcgaaaaggggacgagccaaggagacgaacctgcagaacgaggctgccgaacacggcacgagccgaccagaacccagaccccaggctacggcgcaagaacaatgaccgggaccgagacaccaggcaacagccccggaagacaccaaagaaggaggcaagaggcgcaccgagcagacagggagagcagacacaacaaggccgcaacacaccgaagagaactaaggaacaggagccgaggacgaaa

SEQ ID NO: 532958 - DNA, 240 bp, Homo sapiens
  misc_feature (239)..(239): n is a, c, g, or t
tgcagggaaggtcattgagccagaagtggaggctgctgtgagtctatacaccactgcactccagcctgggcaatagagcaagacccccttctccgaaaaaagacagagagagagagaaagagaaacctgaaggagatccgagaacactcaccgtgtatacctgagggaagagaaatccctgaacgaaggaagacgcagtgcaaacggcctgaggctggattgtgctcggggggcggaang

SEQ ID NO: 532959 - DNA, 735 bp, Homo sapiens
catggtggctcacacttgtaaccccaacacttgggaagctgaggtaggaggatgacttgaggtaaggagttcgaaaccagcctgagcaacatagcaagaccctgtttctacaaactaacaaacaaacaaaaatgaggtgtggtaaggccaggcgtcgtggctcacgcctgtaatcccagcacgttgggaggctgaggcgggtggatcacgaggtcaggagatcaagaccatcctaacaacatggtgaaaccacgtctctactaaaaatacaaaaaaacaagccgggcgtggtggcgggcgcctgtagaccgagcccttagggaggccgacgcaggagaatggcgtgaactcaggaggcggagcttgcagtgagccgagaccgggccactgcactctagcccgggccgacagagcgagactccgtctcaaaaaaaaaaaaacacaacgacgcacaaaaacaaacaatattttggggcgccgactgagccgccgcgagaagagtttctacaaagcacatctgtgtgggagcgcccggcgacccagagagggatacggacaacacgcgggccagaacgggtcgtcgcagaggagacccgtgacaaacgaccagggctgggggtccacccaattatagaagcgccggggggaaccacgaggcgtgtagtaccaacccacaagggaggcccgaggagccaagccgggctatcaagacggagccaagcgagccagaataat

SEQ ID NO: 532960 - DNA, 413 bp, Homo sapiens
  misc_feature (413)..(413): n is a, c, g, or t
gtggtagagaccgttattattagactcaggcatgcacgccggagtggatcgggggctttcgtgatcagaaggaaccggcccgtccatctgagaggcagattgttttcatgctacagaaaattaaccatgcgtggtggtgcttgcatgagccatgtactactcatagcggtgagtgaggagcatgacgtaaaccctggtagttggtactgaacgtgggaatatttagcttgaatcagcacaagaagtgttgtctgtgggtctacctataataggtgatctagctaaaaacaatattactgaaaaagatcgggaaagcagagaatgtggagccgtttcatatagaactaatttcgtgagacataggttctaaatcttgcttagaggcatagttgctacatgccttggagtgaccn

SEQ ID NO: 532961 - DNA, 412 bp, Homo sapiens
  misc_feature (41)..(41): n is a, c, g, or t
  misc_feature (56)..(56): n is a, c, g, or t
  misc_feature (88)..(88): n is a, c, g, or t
  misc_feature (103)..(103): n is a, c, g, or t
  misc_feature (130)..(130): n is a, c, g, or t
  misc_feature (143)..(143): n is a, c, g, or t
  misc_feature (160)..(160): n is a, c, g, or t
  misc_feature (201)..(201): n is a, c, g, or t
  misc_feature (213)..(213): n is a, c, g, or t
  misc_feature (402)..(402): n is a, c, g, or t
tggcccggggagaatgtcaaagccaaaattcaagacaaggngggtatcccccctgnccagcagggtttgatatttgccggcaaacagntggaggatggccgcnctttttcagactacaacatccagaaanagtcccccctgcncctggtgttgggcctgngaggtggcattattgagccttttttccgccaggttgcccanaaaaacaactgngacaaaatgatttgccgcaagtggtatggttgccttcaccctcggggtgtcaactgccgcaaaaaaaagtgtggtcaccccaacaacctgggtcccaaaaaaaaggtcaaataaggttgttttttccttgaagggcagcctcctgcccaggccccgtggccctggagcctcaataaagtgtccctttcnttggctggga

SEQ ID NO: 532962 - DNA, 367 bp, Homo sapiens
accattggttgtcgctgaaagtatttctaagtctttggccaagaagtcagtttcagctaagttagacggcgcttatgtgggtatgcatgatgtcattcctgcatccggtgattttcaattaattacaacggctgatgatgaagcgttggatttgttgcgtcattctgcctcacacttattggcacaagcttaaagcgtttgccaaagtttgctaacatgcactttggcgtggggccatttattgaaaatagtttctactatgatacagataacggtgccggtaaccaagtgacgggtgaagatttcgctgaaatcgagccatgatgcaaagattcccaaggagatttcccaattgtgtcacgcgagt

SEQ ID NO: 532963 - DNA, 182 bp, Homo sapiens
ctaagcgcattattacggcgaacgcaatattcgctcgctttgggctgagccggggggcgggttatggtacactcaccgtcctaatcaacatttgaatatttcttataccatcggagttgcggggccatggctcaactttatttttattactctgcgatgaatgccggcaagtccaccgcgct

SEQ ID NO: 532964 - DNA, 366 bp, Homo sapiens
cctctggagcttcctgttgttcaaactttttccttcctgacatttgtttttacttacaggggttttgctggggacggtagccttaccccaattaactgtgcatattaaatgggagaggagatgcccaaacgcccgatgaaagcaatccagtttcttcttttcccctttttcctatgggcggggaatttgattccaaagttttttttctttaaccaaaaaggaaagaccacggtttgtgtgccctttccgacaaacctgggtttttgggggcctgccttccctccctcctcccccccgggccgggctgtacagagccctgtttcggggggttaggaatggcctgggattgtccattaaccgatgctg

SEQ ID NO: 532965 - DNA, 948 bp, Homo sapiens
tagaaacttcgggtaacttagatgatctggaatacaagttacatgattatgggctacgagaggagttcctcttcccaagagactgcctggcgataggagcatctgctcacttggcttaacttcaagaggaacagatacaggagcaggacttgctctaattaaagaaatattatggaacgaaagatcctgctgccaggctcatgtctgttccagcagcagaacacagtgaccataacagactagggggaaagacccatgaaaaagatgcttttgaacatattgtaacacagtttgcatcagtgcctgtatctgtggctcgagcgatgagctatgacatttataatgcgtgtgatgaaagatatggggtgaagatctaagacattaaatagtatcaagaagtacacaggcaacactaataatcagacctgattctggaaacgcctcttgacactgtgttaaaggttgggagattgtagggtaagaagttatcctgttactgagaacgtcaaagggtaacaagtaggttgccaccttatctgtagagttattcaaggggatggagtaggatattaatacttacaagagatcgtagaagggatgaaagaaagaatgtggagtattgagaatagtgcttcggtatctggtggaggttcgctacagaaagtgacaacgagatctctgaatggttcccttcaagtgtagctatgtgtaactaatgggcctggggattgacccgtcttcaagggacccagttggcgatcccaagaaggggtccaaaagggccgctacctgtccatgagccccggaactcggtccccgccgcagcaacaggaccgtggagaagggggaaactcccagttcacaggggcggacaacggccggaacaaaaaccgaattacagaaaccacgcaaagggcggggagacaaaacacgcgggatagcacagct

SEQ ID NO: 532966 - DNA, 993 bp, Homo sapiens
  misc_feature (301)..(301): n is a, c, g, or t
  misc_feature (419)..(419): n is a, c, g, or t
  misc_feature (442)..(442): n is a, c, g, or t
  misc_feature (674)..(674): n is a, c, g, or t
  misc_feature (751)..(751): n is a, c, g, or t
  misc_feature (767)..(767): n is a, c, g, or t
  misc_feature (773)..(773): n is a, c, g, or t
  misc_feature (777)..(777): n is a, c, g, or t
  misc_feature (781)..(781): n is a, c, g, or t
  misc_feature (791)..(791): n is a, c, g, or t
  misc_feature (794)..(794): n is a, c, g, or t
  misc_feature (802)..(802): n is a, c, g, or t
  misc_feature (809)..(809): n is a, c, g, or t
  misc_feature (880)..(880): n is a, c, g, or t
  misc_feature (948)..(948): n is a, c, g, or t
  misc_feature (953)..(953): n is a, c, g, or t
  misc_feature (955)..(955): n is a, c, g, or t
  misc_feature (957)..(957): n is a, c, g, or t
  misc_feature (970)..(970): n is a, c, g, or t
  misc_feature (972)..(973): n is a, c, g, or t
  misc_feature (984)..(987): n is a, c, g, or t
cgccttctgtgtccgggtggacatgtctctggcaattctagaagaggtaataatgtgggatcctagggtgtcccggccgtgcctcccattggggatgtggccacccagtactttgctgacagggacatgttctgtgctggccgagtacctgaggaggatctgaagaggacaatgatggcctgtggaggctcaatccagaccagtgtgaatgctctgtcagcagatgtgcttggtcgatgccagttgtttgaagagacccagattggaagcgagaggtacaatcttttgactgctgccccangccaagacatgcaccttcattctccgtggcggcaccgagcagtttatggaggagacagagcggtccctgcatgatgccatcatgatcgtcaggagggccatcaagaatgattcagtgntagctggtggcggggccattaanatggaactctccaagtacctgcgggattactcaaggactattccaggaaaacagcagctgttgattggggcttatgccaaggccttggagattatcccacgccagctgtgtgacaatgctggctttgatgccacaaacattctcaacaagctgcgggctcggcatgcccaggggggtacatggtatggagtagacatcaacaacgaggacattgctgacaactttgaagctnttcgtgtgggagccagctatggtgcggatcaatgcgctgacagcagcctctgaggctgcagtgcctgatcgtgtctngtagatgaaaccatcnaagaancccnccgnctcgactgtnggnatgctccncacagcnagcaggccggggcctgtggtctgtggccgcccccactgagaggcaccccacccatcacatggctggctggntgctgggtgcacttaccctccttggcttggttacttcattttacaaggaaaggggtagtaattgcccnctctntncntactggaggctantnnaataaaaggtnnnncttcca

SEQ ID NO: 532967 - DNA, 1062 bp, Homo sapiens
tgcttccctcaaatcccgtactccttgacttattcccccaatagaacgcgtgctcccgcggaaggagcgccctggcggagaagactcgaacggtctcccacagccgggtcgttgggggaaagtgcatgaacgaactcttgactgacagaaacggaggggtgtgtccaaagttttgaggacggccgagcggacgcttccaaaacccgtccatcacagtgcctcgcccgcgttcgcgctcaggctagcaacaagatcactcggtcaaacatgtttaccactcttcttccagtgtcctgagtatgcagaaaagggagtagtcatcagagccaactcattcgaccgtcgcaccattgaagccgtggtacagtccaggtgatgagggaggctgaggcgaccgcataggatagggccgagcgtcgctcccgttcatgcaatccatgcaggttgccataggtgggtcaaggcgtgtgacagaacttgattggcgctcacatgtgaatgcacggggatgcaatgggatcgatccaagctcgtgcgacgtctcgacggtcaaacccttgcgaactgcgccacaatgctcagagccctaagcgcacgccaactgaagacctgcgggctgaatgatcagaggcgagtgacatatggcggatgacatcccaagagggcgcctgctaggaaccacgcacttcgcttggcgaatggactcccaggaacagcgtggaggtcacataccaggacaaccatggcttgcaccgtgtaccaggggggagcacactgacgctggaacgcggatcggatccggtcggctcaccatagggcgaagccatcccgtgaatccggcccacagcccagtggacgccaccgaagccacagttgacaacggggaaacgacgatggtcagacaccgatagaaatgacgcgtaagccaaaaactccgttcatctagggaggaggctggggaactaggcagcgagggggcgcccgtagcccaacggccgttgggcccatccgtacgccaggaaaagaggcgaaaccgtcccccagagggagggacacaccact

SEQ ID NO: 532968 - DNA, 197 bp, Homo sapiens
ggcccaccgatcaccagcctgtgtgacagagtgagagcccatctccataagggtctgggggaacagatagggatgaaaactgaagttctggtcctgaatgagatggcatgcagcccaccccaccgacacgtccccacactaagttacaacaacaaagcccttgcacatcaaagtaactacacaacaactgttcacca

SEQ ID NO: 532969 - DNA, 464 bp, Homo sapiens
  misc_feature (35)..(35): n is a, c, g, or t
  misc_feature (49)..(49): n is a, c, g, or t
  misc_feature (67)..(67): n is a, c, g, or t
  misc_feature (118)..(118): n is a, c, g, or t
  misc_feature (385)..(385): n is a, c, g, or t
  misc_feature (405)..(405): n is a, c, g, or t
  misc_feature (415)..(415): n is a, c, g, or t
  misc_feature (430)..(430): n is a, c, g, or t
  misc_feature (441)..(441): n is a, c, g, or t
ggtgcgctcgaggttggccgtggtccgggaagctngaggggccgggcgnaagtgctgcgctcctctntttcttttttggaacaaggacttgctctgtcacccaggctggagtgtaatnatgtgatcatggctcactgcagcctccaactcctgggctcaagcaatcttccttcctcaacatccccagtacctaggactacagacacagcctcactctgtcctccagtctggagtatagtggcacactgcattcttcacctcctgggctcaagtgatcctcctgcctcagtctcctgagcggctgggactgcaggcgcccaccaccatgcccgactaacttttttcgtatttttttagagatggggtttcaacatgttgcccaggntggtctggaactcctggggntcaagcagtncaactttcccttgancttccaaagtntttggggatttacaggcgtgaca

SEQ ID NO: 532970 - DNA, 455 bp, Homo sapiens
gaaaacccgacaaaatcatgggattctgagtaagaccatcaggagcacaagccatacacaatggagctgctttaatctcctacaggttctttgcccatcataactgaacaacatggaaagaccagaacatgaccatctattcacggggtcagataaaaggataacgcctcttatatgagactctcgatagctatatactccaaacagggccatgttttcttttctggagcagctctgggaggctaatttacaggcagaaccattgtggacaatgaaatacagttgataaaataaattttgtttttcaacattggcagctggtaaaggaaggtttacctctcagcctcacactattttcttgggtgctcacagacacagaacaagacaattatacctcttccatgaagatggcttctttccttacgaaaactgtgtagatctcaagaattataagg

SEQ ID NO: 532971 - DNA, 880 bp, Homo sapiens
ttgtggtccccccgccttttggaggcccattttgcccactagtgttctgcgtgcaatgcggggcctctcgccgttggcccctcttccgccgtttctgccggcccggctagtaaccttcgccccgcggtgcctgttgttacccctcctcaaggttcatcggggtgtcacgggttaacacccgcccggagttccgcacagttgcgccgccaatacaggggccgccatgtcttccgcgcccccggtatgggtgccaatcagtcactactggtcatgccccacgggtgtcgagatccaccacgcaatgggggcgcccctgccgtgggtttcacccctgtggacctcagggcggccccccatctccacacatggtgtggcccgcggaccccccgggcaaccttctggaatcctccacggagcgccgcaaaaccaatcccccgcggttcccgtccagccctcacctcgtgcaacgggccgtgaagaggggagccgcccccccagcgacagacctcctcttccgcccccggagagcccccgtgccccccacaaagggggacaccttctgccgcaagaagccggaagtaggcgccaccccaccgctggccggcccgcagcctgaaccccggccccggagacttaacaagacaagaaagatgatccgggtctctccccggcggaaaaaaccgtagaaactactctaaccactgcgccagtggtccccgtcatggcctcgggacccggacagcccccgcgttgctacggcaactcccaggcccaaacaagaccaccaccaggacgcccggccgaaccccaaggacgtcgtggcaacaagaaaacaacacgcccccccggggaatggaccccttgccccaccaaaaagaca

SEQ ID NO: 532972 - DNA, 956 bp, Homo sapiens
  misc_feature (443)..(443): n is a, c, g, or t
  misc_feature (447)..(447): n is a, c, g, or t
  misc_feature (450)..(450): n is a, c, g, or t
tcagctcggtaccctatatgctttggagcaggtagtgttaggtcctcatactcatactcggttttattttttcaaaactgtttggctcctccatgtcctttgcatttccatagacaattgagagcccgggcgtcagtacaggccaaggctgctggaatttatgctgagactgcactaaatctgctggccattatcgcattgagccttctgaccctgtgtctgtaggtggcccagctgtctttgagtttgatattgagtttctctcagcagagccttgtagcttttagtatgtcgatcttacactgtgtttcgttaaatgtattcctaagcacatcatacttttcatgtattatcaacagtattgttttcaaatttcatcttccagttgtttgttggaaataatgcggaaatacttgatttttttgtgcattgaccttgttaantgtntgnattctactcactttttggactattaggcttgtctgcacatgtggtcacgtcatgtgtgagtaaagacagtttttcttctcgcgttctgagccgtgcagctttgttttctggaaggtcgggcataatgcttgttctcttcccggcactgggggaagaggtgtccttaccctgtctaatgttagcttcaggccttttgtaaatgctccctgggttgtcagaattcacttccttggctgcaggatgaggcctctgcttccttgctggctggcaaccgggggtgctctgagctcctagaggcagctctcttcttgaaggccagcaggagaatgtcggggctttgccacgctgccttcctcacattctgtgggccagaagcaagtcacgctcaaggggatgggttgatacaagggagactcttggggctgccttagaattctacatgtgtgtgggccgactccctctcctcacgggcacctgccttccccactccgagccacggccacgct

SEQ ID NO: 532973 - DNA, 838 bp, Homo sapiens
  misc_feature (61)..(61): n is a, c, g, or t
  misc_feature (237)..(237): n is a, c, g, or t
  misc_feature (315)..(315): n is a, c, g, or t
  misc_feature (344)..(344): n is a, c, g, or t
ggagagagagaactagttcgagtttattttggtttttttttaggaacctcaaggtaatttnaatgacctcagaaccaggtgacaagggcagacgtgaccaggggcgtggtggggggattcccagaagcaaccttcgagggcgctccgtgggtgcttaccacctgtggaaacgtgggtgagggtgggtgggaaaactccgtgggtggaccctagtgtggaagcctttccagataattntctgtgaaagccgtgaggcgcctcgagggtgagttaggggcgaacatcgtggtgtggcgcgggtgtggtgtgagaggntcatgtggcagaagagaggagaggaaagncgcggagagagagtgtggagacccgctggccagcgagagagaagcgagcgtctcgcgagagagagaatatccctcgcgagagtctctttctaacaacaaacctctttttgggtgcaccaagacgacgcgaactcataagaaatcacgaacacaacgcgtgaggagaggaaagagtgtgtagacatacaagagatttagacagagagcgcgagccgggtagaaatgaagaaccccccgcggtgccggccgaggtggaacaacagccacgagcggtacagacgaagaactcgtgggcggctccgctgcaggcgccgcggaggcgcacacccggagcggagaaccagtaggaggagcaggagagacggaggtggcgcggattcactcatacgcagaagcacacaccgaagctgatgagaagtgaggagccacacagaacgggcggcgacaccaagatggggcaagaacaaccctaccgacaccacagccgacctccg

SEQ ID NO: 532974 - DNA, 162 bp, Homo sapiens
actatgtagctacgagtcgctctcacgagttagcgagcaatgagtacacttaggtagagtacgtagctttaagggctgctttcagttagcgataggtaataggcagtgcactagtgggcctacggggttggagacccaacaaaaggacaaggttacaaatga

SEQ ID NO: 532975 - DNA, 219 bp, Homo sapiens
aaaaacatttatggtttttttcagactgtattatatagctcttcagctttattacatcatgcaaagccaagggtaatattttgaaatattctcccaggcagggattagtaaatacttggctggatttctgggttttggtagaaaggtcatttccttggttaaaatgcatctattatatcaaataaattgctacaggtatctcctaagtagataccttcc

SEQ ID NO: 532976 - DNA, 388 bp, Homo sapiens
  misc_feature (52)..(52): n is a, c, g, or t
ggaaagggacaggccgggggagctttgtaaattagttatgaaactgcctttngaaaattatgactgagacagtgaaagagatctaacgtaaccgactccatcttggttctaaacttttaagttgtccttgctccttcctggacgtatgctgaactaactttgggaggaacttagtttatagtttaaaataaagacgataacagcctttacccaaaacaaaccaccttcttgcctgggggactaggactgcctttgtagggaccaaaaaatgagccacaagattattaaattatggtttagggtgttatgtagctgggagactacaagagtctggacccctcccttcaacttgctcctaagatccagtgcttgaggatatttttcccag

SEQ ID NO: 532977 - DNA, 320 bp, Homo sapiens
ggtttgaatgaaatttaatttttgttagaaccagaagcaccaaagagatcatctaactctgtgtccaataaaatttgtggatctaacccactaatttcttatttcattttaaaaataactttattaaggtataattcacataccataaaattttgtcttttaaactgtagaattcattagtttttagtatactcacaaagttgtgcaggcaggcgtggtggttcacgcccgtattggtagcacctttggaggccggggcaggaggatctcttgagcccaggagtttgagaccagcttgggcaacatagaccctatctctt

SEQ ID NO: 532978 - DNA, 775 bp, Homo sapiens
taaaacaaacaggggctttatttcatcatcagaaaccgggtgctagtttaaaaaacaaacagaagccctgacgagcctgtggagtgctgcagctcggagtcctgaaggagtaagtaattctggaggaccggcctgatcttcctgttaggggccggcccccacccagaggttctcccggactggcggggggtgggggtcaggcagtgggcaggggcctgacctaggctcccactctgcctggtgcccacagccgtgggcacaggggctcagctacgcagccttgagcgtctgtgccgggtaactcagccttctgcctggaggaataaggggagcaataaagagcccgtgaccacgtggtgaagcagggcctgggccccgggccagccagtacactgaagcggccaccaggggccccggggcccgggcacagagcacctaggttgcgcagtgtaccctgtgaccgtgcccttctgccctggatgagccataggccaggcgaccagggtggacaggcagggtaccacaagtggggggggcaaaggagtaagagcatgagccccaggcccagacagggtgcagaaaaacgtccccagccgatgaggaggaaggggggtcaccagcatgaaggagggcccgttcagggagaaattaccccgcccagggtgaaccccggcgcggaaatagggccctgaatggtggccatggttgaggctgatgaggaaaaacttcttctcctgtggtaggatactgaaagctgataaagcgttggtgtgta

SEQ ID NO: 532979 - DNA, 772 bp, Homo sapiens
gtttctgaggatagttgaaactggtcacaagccgctgagggtaatgtgagcaacgtactactggtggaagaaggactgtgtaactttaacgaacagcttgaacatggtgggacatccttatcagagaaaacagttcttctgctggtgactccatttctggcagcagcctggagccttcatccctaagtcaacaccaggagagcttctcccaaactccccgttcctgcgtagtccgctttctcttgctgccacattctaaaggcttgatattttccaaatggatcctgttgggaaagaataaaattagcttgagcaacctggctaagatagaggggctctgggagactttgaagaccagtcctgtttgcagggaagccccacttgaaggaagaagtctaagagtgaagtaggtgtgacttgaactagattgcatgcttcctcctttgctcttaggaagaccagctttgcagtgacagcttgagtgggttctctgcagccctcagattatttttcctctggctccttggatgtagtcagttagcatcattagtacatctttggagggtggggcaggagtatatgagcatcctctctcacatggaacgctttcataaacttcagggatcccgtgttgccatggaggctgccaaatgtccatatgtgggtgtcagcagggacaacagatccttatgcgagcagaggattctgccgggacgtgggaagtgtccgatagccgcctgaaacttgagggtcagtggtgaatcgagttctc

SEQ ID NO: 532980 - DNA, 997 bp, Homo sapiens
  misc_feature (228)..(228): n is a, c, g, or t
cggcagctggcaaagtgcatgctattgagatcttcgaatgctgcggagctggaggcggaggcagcgtggggaggtccgagcgagtgtgaccaggggcgccagtcgatcgtctctctcctctctcctgccgcctccgtgtcctcgaaaataactttttcagtcttaaagaaagaaagacaagaagtagatcggtccgccgcgctcacagcacctctcttcctctctagncctttccgcccggtgtaggaagcccggggttggctgatccgccggtcggggccgcgccggcgtagccacagactgacaactcggtccgtcacggcgacacctttttccgccacattgacatgtcccagtgtcatagaacctcgagtgccgtcgaaactcctgtggttgggccaagaatctcgcaacagcgagaagctttgttcaattccgaagtcaggactcaagtttccgtcacggactgcgcagaggagggttgggcgatggtagcctggggggcgcccaagccttgtcagaaacggtattcatggctggatgccctgggcgagtgtatccgttcctggtggcgccatcatgtgtgacttccccttgagtccacatggagttagcctcgggaagcggggctcgtgtgccagtgggcttccgagagttcgcgcggaatggaaagtttgtcccaatgctaccctcactcatcccgattcgagttgtcacctccttgaattcgtgagtagcccgttgactggggcacgccggagggggataggcgcgacgcggggcagagcaaaggtctaaccgctgacctcgcaatgcccatggcctcccaaggggcgcgagaaagtcgaacaccgtggagcacttgtcttgtgcggggtgggatcccaccaggtgaagtgccaccaatgatgcccgtgacaaggatggaacgccgcaagagcaggataggggggacgaacccatgaagtccgccatgtaactagaacgtcacatccca

SEQ ID NO: 532981 - DNA, 102 bp, Homo sapiens
ccacgctcgcggccaggatgaccgccagcaggctccctgcgagccatttccagcccgataggactaacgccctggtgttggcctctgtcgcgctcaaaagct

SEQ ID NO: 532982 - DNA, 339 bp, Homo sapiens
caatacaaaacacgccaggacacgatactaccttctattgaccatataccacatggacaatctacatacaaccatacaaagtacaaacataaacacgacagattggtacaggatacagataaaaactacggactggatagaacacatgtactaactaaagataagcccatgatatacctgagacgctcatcacagcacagctactaatgaaaaaatacctaagacacagaggactaccacttataggccatacttactatcctttgtagagcagcttctgtatagagagagtacagtaagaagctacggagagtagaggagcaagaaaacagtaccaag

SEQ ID NO: 532983 - DNA, 409 bp, Homo sapiens
  misc_feature (269)..(269): n is a, c, g, or t
cacaaagatagaaggttggagaaaacctgagctaatagccaccccatgtgggcatacaaaatgaggcagccgtgaagcccagcatttgtgttgctatggcttacatgaaaaccatttacaagattggtgcagtagctcatgtcaataatctcagcattttgggaggctgaagtgggaggattcctgaggccaggagtttgagaccagcctgagcaacatagcaagaccctgtctccaccaaaaaataaaaaataaaaaaaatagcccanctggtgctgatgcctgtagtagtcccagctgtgcaggagactgaggtaaaaggattatttgagcccaggagttccaggctgcggtgagctataatcatgacactgcacttcagcctgggtgacagagtgagatcctgtct

SEQ ID NO: 532984 - DNA, 370 bp, Homo sapiens
  misc_feature (130)..(130): n is a, c, g, or t
  misc_feature (257)..(257): n is a, c, g, or t
ttccaacctcgaaaaaaagggtgaatatttgtggcagctgctgcaagtaagccctgaagcgctaaagttcatgtgtaaggatgccttctgcagtaacctgtccgtggagaacgctgcagaaattctcatnctggccgactccaacagtgcagatcagttgaaactcaggcagtggatttcatcaactatcatgcttcggatgtcttggagacctctgggtggaagtcaatggtggtgtcacatcctcacttggtggntgaggcgtaccgcactctcgcttcagcacagtctccttttctgcgacctctacgcccacctctgaagcaatcctaagatcctgcttgttgtaagactccgtttaatttccaga

SEQ ID NO: 532985 - DNA, 85 bp, Homo sapiens
  misc_feature (7)..(7): n is a, c, g, or t
taccggntccggaattcccgggatgcggcttccgcggaggggccggctgcgcgcggcaatccggcaatggcggggcccggggggc

SEQ ID NO: 532986 - DNA, 388 bp, Homo sapiens
  misc_feature (67)..(67): n is a, c, g, or t
aatttttttttgggtttttgggggaaaaacgggccaaaaaaaaatttttttcccccccttgtttaanggaggggtaaaagatcctctttccaaagggggcccccccccaaagccaaaaggaaaaaggggagggtcagccggggcaaaaaaaatttaaacaaacaggccttttggggtttccccccccaattaataaggattggggaaaacccccttgggccaggcaaattttttcaagggggttcaacccttggtgacccaaaggataaaaaggggcaattttcccggggttttgggttttcattttaaagggttatgtgggaaaaggggggttcaaatttcatggaaaggaaggatcaaaaaaattgggaggccttttttcctttta

SEQ ID NO: 532987 - DNA, 946 bp, Homo sapiens
agcgggcttcgtagtctccctagtagatcccaagctagtaggctgggattctgccaaatgggcagcggcctccttgtcttctcgcccgtagcttgtagttagaccgaggggagaatcctggtgagcccaggtcccatcgccctcgtcagtttcaggaaaagccctgtgtagatgattcaggctaggcgggagaggaggagttacagggctccgtgttactgcccagaagctcatggcattctaaatattccagtgttcgagtcactaagtatacctctctgtcctagaaggctactggagctactgagactgtagtgggaaagaggcataagcatgtgaacttaacgtgtaaatgatattgaactctataaggaaatggaagctattaattcgcggtctacttgagtacttaccatagtgatgactgaaacctggaggctcatgcgagtcataccttggccaactgggcaagggcacaactcttcacagacacgctaagttaatatctaagggagaggcaacatgggccgagccttatctggtccaactctcggcccgcgctggcgccttgcaggaccccccaataggacacggtctcctcagctatgttcaaccataaagtttcggcgcacgacagccgcagcctccccccgaccgcactccgcccgccgaactcgcacaaggtcccatgaacacgccgggcaacctctcgacgcgaacgggcaagcacctgcggaccaagaccccattaagggcaacacggctcggcacccctcagcagaaactaaccccaccacatagccagctacaagacgggtcctcgcctcacaccacacgcaggggtcaaacaaggggacaaacccagttcccctcaattacaactacggggccctgcctacagcgtcggaacgcaagcaagcagccgcacatggggacaacgaacgca

SEQ ID NO: 532988 - DNA, 287 bp, Homo sapiens
taatcacgcatgggagacaggctctcactctgtcacccaggctggagtgcggtggcgcagtcttgcaagctgtgccctccccagtgcccacctggtgtgatcctcccacctcggcctcccaagtagctgggactataggcatgtgccactacatttggctgtttatattattaatcaattaattttttgagacagagtctcactttgtcacccaggttcaagtgattctcctgcctctgcctcccaagtagctgggattccaggcatgcaccacaatgcctggctaa

SEQ ID NO: 532989 - DNA, 248 bp, Homo sapiens
ctaagggatccttattatagaatttgtatatagcattgtgtattaatgtagtgtgtgtctcatattggggttcaggtatatcaagcacatgctgacaaaactgaataaacacaaagagagcaatacaattatagtaggatatttcaatactccactttctgtaatataacaagagagaatattctgaaggaaacagatgactagaaggcatgctataacaccaattatttttaataaggatcccctaa

SEQ ID NO: 532990 - DNA, 94 bp, Homo sapiens
ttttggaagtacatggaattgttgtaacaaagtatattgaatggaaatgtttttcatgtattttggaattttccattaaataatttgcttttta

SEQ ID NO: 532991 - DNA, 162 bp, Homo sapiens
aggagtagaggaggcaggtgaataaagatagagctgtgggagtaactaagtgtctgtacgtggatatgcatgcatacatacagacactaaaggcaaggtctctagtatccagcgtgattccccagtgaccattttctcccacatcaggaattgccaagtatg

SEQ ID NO: 532992 - DNA, 288 bp, Homo sapiens
aggatccgtatatgctgtctcactttttcttcaaactatgtgaactcgaactataatagatttggataagaagtgatacaccttttattggttttggtgggagacccctgatctcggggaaaaaaatattggtctcggaagaagggaaaaccagtgttctacgccctggcaccataggcctggctgatacttttcttttatcctctggttaattcttggtaatgggtgtttcctggtctggttttatgactattctgtattctaagatttctctgagacagcatataa

SEQ ID NO: 532993 - DNA, 841 bp, Homo sapiens
gctgcggaacgagaagtgccatgactactacaccacggagttcctgtacaagcctgtactcatcgagcagggcaaggggcgatcttctgactgcaggtacctacactgtccatgcggcgcacccttgcagccatggggtggacgcatccaaacccgcctttgaccagtgaactatgtggaccaagcgtggtgggtgaatggccatgcatgtggtttgtcagtgagaagctgcgcgaggttgacctgcgaagggacgggtgttcatccaattgccccagactcggccttgcgtgatcgggctgaataagaacggcggatggctcgttctagcccctgtcactgaggctcaatgaaagacactgatttcgatgcaccgcgatgccacgggagcagtggtggctgagcctgcggctcatgctgaagatgctggcacaataccgcatcagtatggccgcctacgtgtcaggggagctggagcacgtgacccgccggaccctgagcatggacaagggcttctgaggccagccatgcccacgcccctccccagcccccacccatgccagcgcagcgccagggctcagatggggcctgggctgttgtgtctggagcctgcaggcaggtgggggctgcgtacctgctcagcccatccctgcctctatgcctgggcacctgccaggcctccctccggctggtgtcttgagaccagcctgccaggccctccagacaggaggacagagtagcctggggcattcaacttcctgaccaggggacgtggcagctgtacggcgtatggaggctagtgcccctggcttaaggagacacatgaggcctcacgtatcca

SEQ ID NO: 532994 - DNA, 795 bp, Homo sapiens
atggcacatgcaacgcaggtaggtctacaagacgctacttcccctatcatagaagagcttatcacctttcatgatcacgccctcataatcatttccttatctgttcctagtcctgtatgcccttttcctaaacactcaacaaaaaattaaataatactaacatctcagacgctcaggaaatagaaaccgtctgaattatcctgcccgcatcatcctagtccctcatcgcctcccatcctacgcatcctttacataacagacgaggtcaacgatccctcccttaccatcaaattcaattgtggccaccaattggtactgaacctacgagttacaccgatacggggactaatcttcaattcctacatatttccccaattattcctagaaccagggacctgggaatccttgacgttgaccaatcgggtagtactcccgatgtgaagccccattcgtataataattacatcacaagacgtctgtgcactcatggagcttgtccccaaattaggcttaaaaaacaagatgcaatttcccggacgtctaaaacaaaccaaactttcaacggtacacgaccggggtatactacggtcaatgtctgagatctgtggagcaaaccacagtttcatgcccaatcggtcctagaattaattcccctaaaatcttggaataggccgtattaacctatagaccctttaccctctagagtaaaaaaacaacacaaaaaaaaaaatgtgggggccgcccgaaagtttccaccaacttgtgggcggccaaagtaggcgtgtcaggccaaga

SEQ ID NO: 532995 - DNA, 548 bp, Homo sapiens
  misc_feature (179)..(179): n is a, c, g, or t
  misc_feature (209)..(209): n is a, c, g, or t
  misc_feature (212)..(212): n is a, c, g, or t
  misc_feature (363)..(363): n is a, c, g, or t
  misc_feature (371)..(372): n is a, c, g, or t
  misc_feature (377)..(378): n is a, c, g, or t
ggcgcggtcgagtcatcgcagggcctcaccgcttcgttctcccgtccctccccgcgccttggctacaggactagccaagtgaggcgggaggcgactcggacctttccctgcatttcgtttcggccagtgccggggctacccgccctggggcctgggatccttggggcccgtgagccacntcttagcggccggggctaccgcggccgccntgnccctcatgaggcatagctgaccaagctgctggcacctcgggagcaactccccaacccgcagtgagagcccggagccggctgcaacttgttcgctgccctctgacctgacccgggctgcagcgggggaggaggagacggcggcggcgattcntcccggcnngcagnncagtttggcgacgaaggagagttggaagccgggagggggagccgcggcgcgttggccgtgcgcgcgcccgtcccccgaggagatggaggaggaggcgatcgcagcctcccgggggaagagacggaggatatggactttctgtctgggctggaactggcggatctcctgga

SEQ ID NO: 532996 - DNA, 260 bp, Homo sapiens
agctgtaccctcagcggatgataatctcaagacacctgcggagtgcctgctctatccccttccaccctcagcgggtgataatctcaagacagctccggagtgtctgctcactcgcgttccaccctcagctccacgctcagcggatgataatctgcaagacacctcctgagtgtgtctgctcactccccgtccaccaacagcggatgataatctcaagaaactaaggaagaataaataagtaatataaaaataaggtgaaa

SEQ ID NO: 532997 - DNA, 882 bp, Homo sapiens
  misc_feature (125)..(125): n is a, c, g, or t
  misc_feature (135)..(135): n is a, c, g, or t
  misc_feature (158)..(158): n is a, c, g, or t
  misc_feature (162)..(162): n is a, c, g, or t
  misc_feature (218)..(218): n is a, c, g, or t
caaaatacacaaattagctgggtgtggtgacacacacatatagtcccagctaattagggggctgaggtgggaagatcacttgagctccaggaggtggaggctgcagtgagccaagttggtgtcantgtactctanctgggtggcaagtgagacctgtntcantcaatcaatcaatcaatcaatcaatatctcatgctgtaattgtcttctgatgtttncatccacccagccccacctctgcagccttaattactggagtaggtccatgatttcagtgtagggttaatgtattctgcagatcatctttgatttgacctgcttttttgcttcctttttatctctgaacaaaggagatcatcattctctttaatctgccttctgtgtaaatctctaccagactggaagctccctgaaagcagaaactgtctgcttccccagaacttagcactgtgctttcatgtatgtgggataaatttttactttgttagtgcaactttgtttgtacacgttatccttgatattacatacatttgttgatgggggcaatttatatttgttgtgagtaaaatacttttttgttggattaagaagaactatactcttcccagcactttgggaggccaaggaggacggattacctgaggttagtagcttgagaccagcctgaccaacatggagaaaccccatctctattaaaactacaaaaaaattagctgtgcgttgtggcacatgcctgtaatcccagctagtcaggaggctgaggcaggagaaccgcttgaacccctgaggcagaggttgcggttgagccgagatcgcgccattgcactccagcctgggcaacaagagttaaactccatttcaaaaaaacaaaaacaaaaacaa

SEQ ID NO: 532998 - DNA, 284 bp, Homo sapiens
ggttctcgtgagactcagtaggagcttcttccatttacttttgtggtctttgacagtctttgcttattggtacgagtgacgactgcttctggcacctcttgtgtgttccctaccccagacatttctctaagaagccttgtttcctttgagtgggaaacaaagtagatttgattccagatcttttgggatcttactagtcttaccagtctagccagattcttactagactgatgttctgtctgccccattggtccgccacagaggcacctgcttttgatcgaatc

SEQ ID NO: 532999 - DNA, 309 bp, Homo sapiens
gaatgggttagtaagtactgtagtatatggtgaagtaagagatctgaaaagagcatggaaccagtctacacatgctaatgtatcctatccctaagaaaaatagtagtatacatgtacagtaagtcatatagtcttcacttcaccctcccccagttgtaaatctccttagctgtaacatattctgttaaataccacaacactggtaaataatatacccaggtagccatattacaaaaattgtgtagcatatatacttccatagcataaataaaaattaaacaatgtgtacgtatagctaaaggccaaggg

SEQ ID NO: 533000 - DNA, 206 bp, Homo sapiens
tactagcactgcgccggcccaaatgagaaattatacctaacattatgtcagtttccaatttttaaaatccaccttagtcttttattttctttgtaagagtcactgttagcatttatcgagcttagtgaataacaatgagtaacaacttaacagtggtattgaaaacaatgtatgatatacacaaatacagactgtctcactcaggg

SEQ ID NO: 533001 - DNA, 171 bp, Homo sapiens
catatattcttctagcttctagactacatttggtgtcttagccagcttgggctgccaaaacaaacacaaacagtctaggtgccttacacaacagacaatttattttcttcacagttctgacaggctagggaagtccaacgatcagaggtggtggatatcgagctcgggcta

SEQ ID NO: 533002 - DNA, 150 bp, Homo sapiens
gcaactttgagctgcacgttgcacaaggcgaccactttatcaagttcttcgctccgtggtgtggtcactgcaaaggcctgggcttccaccttggagcagacttggctcttgggctcgtgaacaattccgaactctttaaggtatggcaca

SEQ ID NO: 533003 - DNA, 252 bp, Homo sapiens
tttcggtcaccctcctggttttgccctgtcccattccacccccctgctccccgaaaaatttaagggtgtttttttcccccccttcatatttcaaacccatctttccctttttcctcctttccttcccaaatccaaaaaaccttgggggggttgtgccagcctgccccctgggtttgccccctgggtcttttttttttctttttttagttcctgtattttaaacattagtaaaaataaatgttttttccccca

SEQ ID NO: 533004 - DNA, 137 bp, Homo sapiens
gtgattagaggatcccattcaggcaggacgatggggactcaacagcctggcgagtgccttggaggagatgggcaagagtgagatgctggtggctgcaggtgtggtggcggtggtggtcagcactggggggataggtg

SEQ ID NO: 533005 - DNA, 1017 bp, Homo sapiens
  misc_feature (88)..(88): n is a, c, g, or t
  misc_feature (145)..(145): n is a, c, g, or t
  misc_feature (541)..(541): n is a, c, g, or t
ctgcaattacctagatagcgaacatctgaatgcagtcttgaggttggattgagccagatgctatcgacttagatgactagacatgttnaagcataccctgaaatgtagaactggatgcacaatcgtaactgtgcactgtgacatnacgtgtccatcgacactgattgttcgcacagtatctactcgcaccacttagttgtcatcaaagacatcattatctttcctatagtcccgtctcaggtacatagcgttactaaattatcccatctttgtaataaccttgcacttcttcggagtcatactgtaatcgcagtgagtattaacatcagcgcggatatgggtataacgaaaccgagattgcgcgattcatatcatcaggatcccatgtcctgtacgcgttctacctctcatctcctgaaattaacaggcttgcgaacatgagcaacgtacactcattctctgacggtctcaagagccgaccttgtaagcaacgtagaccagtatgccttgaagatacgcgtcgtggtaacaccagggagantcctaatattcacaaggaagactcactattccatgaaaagcgacttttcccgcatagagtcccgtatggaatagtgtcccaaacatcgtcaagacgtgcctcactaaaatacgactacacataatggtctcgcagtaattatcactgttcattccacctgtgaataaacacagacccggtatggctcggaaactattttacggcgtgcactacagacgcaaaatttcccatttgtcaaggcagaattgaacctatacaggccacatttccatgcaggaaatctccccgtgttaacctgtctaatacgctcatcttactgaccatcagccggcagtgttacgtgttcacctcagtgtaatgctcacaataacggcgcggggtatacataggcacgaagagcccaacaccccaacacaccgacccacacgctttgacccaagccagactgtccaacaccaacgcctctccctcccttg

SEQ ID NO: 533006 - DNA, 861 bp, Homo sapiens
ggcccactttggggggccccaggctctttttgaggagggtggtaaagaggaaatgcttttttatttttgggggtttcaccaactggggacccacgggcgccgtgttgcgccccctgttgtgtgtatagaaaggttccctttttgtttgtcggcgaggcccccttgtgggtggatgctgtttgaagacgccacactgttttagggggagttgtagtgcgccccgctagatatggggggacgccagctgcgttctgtttgtttgataaaataaataaatactctacgtggagatagcccccccctcttaaataacacttgcgtctagacagaagaacaaccaccaacgaagcatgtgtgttttttccataaaaagtactcaccaccagaaaaagtgcttgctaagagatatgataatatttttttgtccaccactcttctgttttgtatgtaggcacactgttatatatacacgcgtgattttatcatctagaggaacacttcttcttcgtcgtttattttataatatgacaccaacaagtcgtataatatagcgtcttctttcgtagcactacattcgcacccttcacagccttcgttgtagattgctgctagatagatagaataagttcatctttttttcgtatgttattagtataaatattattatgggttttttcaaaatcactataaaagaaaaagacagccaccagagtattgccccccgccccccccatattctccagcgggtagggcttctcttcctgcggggcccaaaaccccttttttgggccccctttttttttttccgggggaaaaaaaatttttttttttttgggtttcataaaccggacccccggcgga

SEQ ID NO: 533007 - DNA, 519 bp, Homo sapiens
  misc_feature (375)..(375): n is a, c, g, or t
  misc_feature (378)..(378): n is a, c, g, or t
ttcctctcctcccacctcagcctaccaaagtgctgggattgcaggcatgagccaccgcgcctggccagtttttgatgatttctgcagtaaacatctccatgtggagaaggagcaagctgggaccacagatgtgcaccatcacacctgcctaatttaaatttttaaaaaaaaattttttttaaagagatgcgatcttgctatgttgcccaggcgggatctgaacctactgggctcaagtcagctttttgcctcagcctcccaaggtgctgggattagaggcgtgagccaccacccccagtcttcagatgattttgaatatttctgcagtagaaatctcctttttcagaaacagccaggggctgtgaaaaggagggnagntggacaagggaggaacagatacctgaggatgtgggacgtcctggggccatgtgggtgacagaggaaaatcagcaggcttcagccctgaacttcacctcccagagccgggtgggaggacagaaaacagggccggccgggcac

SEQ ID NO: 533008 - DNA, 709 bp, Homo sapiens
  misc_feature (309)..(309): n is a, c, g, or t
  misc_feature (314)..(314): n is a, c, g, or t
  misc_feature (316)..(316): n is a, c, g, or t
  misc_feature (318)..(319): n is a, c, g, or t
  misc_feature (321)..(321): n is a, c, g, or t
  misc_feature (323)..(323): n is a, c, g, or t
  misc_feature (326)..(326): n is a, c, g, or t
tccctgcgccgacaatgtaacggggctaagttataaaccgaagctgtggaatccttatggattggtaggagagcgttctgtaggctgttgaagaagaagggtaaccaactttggaggtatcagaagtgagaatgcaggaataagtagcgagaaagggggcgagaatccccctcgccggaagaccaaggttttcagggtaaagcttgtcttccctgagtaagccgggacctaagcccaggctataatgcgtaggcgaatggaaaacagattaatatttctgtgccagtcatttattgtgatggagggacncgaangntnngngnacngacgatcggttgtgtccgtagaagtatgtagggtgacttagtaggtaaatccattaagttatatctgaggtatgatatacagtcgtaagatgaatgtacaaatcccacgctgccaagaaaaacttctaacgttaatatatgactgcccgtactgtaaaccgacacaggtggtcaggatgagaaatctaaggcggacaggctaactctcgttaaggaactctgcaaaataacctcgtaacttcgggagaagaggagcccttgtgtgtgagtatacacgcgatacaaagcgcacgagggtcgcagtgaagaggctcaagcaactgtttaacaaaaacacaggtctatgctaagctgtaaggcactgtttggggtaccgagctaga

SEQ ID NO: 533009 - DNA, 137 bp, Homo sapiens
tcagcaatgacgtggagcgcatggacggcgcctgataagacaacgccttgttcttcaagccacactggagatagaaattccaccacaagatggtggacaaccgtggtcttcatggtgactcggtcctataccgtggg

SEQ ID NO: 533010 - DNA, 504 bp, Homo sapiens
catagctgtggacgcccacatttcgctgagaggttacagtctcgcctacaggtgagccgcggtagtacagagagcttgtgccgggccggagctccacgtcacactagtgcatatgggtaggtgtagggcaggctgtatcgacacttggacgagagcttggcagtattctgtaggtacggccagtcgatccatgtgcccagatagttcattgaccctctccggactcttctctggaatccgcgggtatgatctgtggctctagcgtgcaagcttgaattgtggtttacccagctctcagaagttagaataagtacttcgtgagggcttccctcggctgggcttgtaggctctggttcacgatgtcaggattctccttgtaacgactgcactcatagtattcagtgccatgagtcttccaatctcctagacacatccagcagaagtcgtgtttacatttggagcattgcatgtgattgcagcctccattcttctcaatgcagatgt

SEQ ID NO: 533011 - DNA, 125 bp, Homo sapiens
aaaaacattttggggaaaaaaaaacagtgaaaattaacaatacaattagtctgggaacggtggttcacacctataatcccagtactttgggaggctgaggtaggcagattttttagcccagaaat

SEQ ID NO: 533012 - DNA, 433 bp, Homo sapiens
ccaggtagactaacctaaatctgccgctcagaactccaaaccgaggctctcgttttccacgaaacccacagtgcttgcttcccgggtggagagtgacacgaccattaatgttatgaaatggaagacggtctccacgatattcctggtggttgtcctctatctgatcatcggagccaccgtgttcaaagcattggagcagcctcatgagatttcacagaggaccaccattgtgatccagaagcaaacattcatatcccaacattcctgtgtcaattcgacggagctggatgaactcattcagcaaatagtggcagcaataaatgcagggattataccgttaggtctacctggattaactagaaataactttgcaaggagagccaaagctaagacccccgaaaccagacgagctacctgggttaggtctacctgg

SEQ ID NO: 533013 - DNA, 236 bp, Homo sapiens
acagtatattctatctagaatatgcagcatgccatcataactcagctcaggttctaggggtttttgagacaaactacatacgtctgtgctgtaggagtattatgttctggataccagttctttggccaatatatatagtgcatatttcttctagcctgttattgttgtcttttgatgagtttctattttatccattttttcttttatgggtaattccttatagactcctcggtcta

SEQ ID NO: 533014 - DNA, 110 bp, Homo sapiens
agaggatttcccgatcccgtctgatagtcgctatagtgatgccagcagctaggactgggagagataggagaagtaggactgctgtgattaggactatcaaaaggaacagg

SEQ ID NO: 533015 - DNA, 485 bp, Homo sapiens
ccgggaattacttgccccatccaaaaagacaagacctatagctaccttaataacctaccagtgaaaagcgaatatccctctataaaactggtggtggagtggcaattccaggatgacaaaacccaaagtctcttctgctgggaaatcccagtacagatcgtttctcatctctaagtgcctcattgagttcggggcatctggccaatgagtctgctgagactcttgacagcacctccagctctgtgcttcacaacagtgacttgctctccaatggatccagtgattcgttaaaggaggtgctctgtagcagaaatagctccgggggctggtctcagggttgtctcatgtctctttttctgtcttaggggttcattaaatcagcacttggttagcagatgtttaattttttttttacaacattacttgtggcctctttctcactggaaatttatcttgataaataaaaactcgtttcttgaaaaaaa

SEQ ID NO: 533016 - DNA, 399 bp, Homo sapiens
aataactctcatgagatctgatggcttttataaaggggcattcccctgcacacaccctctcttgcctcctgccatacgagatgtgtcttgctcctccctgtcttccaccatgattgtgagtgaggcctccccagccacatggaactgtgtcaattggacctctttcctttgtaaattgcccagtcttgggtatgtctttattaggcagtgtgagaacagactaatacaagtaggatagggtatcttttaacttgtttccagtggactcttgctttactttcaggtgggatgatggacaggaatgggaccccttgtttcacggaacttgtggggaaaagggaatggcaggagcaggaacaagtgggccttttaccccaacaactggaggcaatggggaac

SEQ ID NO: 533017 - DNA, 844 bp, Homo sapiens
ttcctcatccgcctccttgctcgccgcagccgcctccgccgcgcgcctcctccgccgccgcggactccggcagcttcatcgcacagagtccctgaactctcgctttctttttaatcccctgcatcggatcaccgggtgccccaccatgtcagacgcagccgtagacaccagctccgaaatcaccaccaaggacttacaggagaagaaggaagttgtggaagaggcagaaaatggcagagacgcccctgctaacgggaatgctactgaggcacacatggggagcacggaggctgacaatgcaggtagacgaagaagacgcaagccaggtgggcgaggacgagccaggcacgcacgcaccaacggtgatggtcgaggccagaggatggccgatgaagatgaggaacgctgagctcagctacgggcaagcgggcagctgaagatgatgacggatgatgatgtcgataccaagaagcacgaagaccgacgaggatgactagacagcaaaaaacaaacaacacaacaccaccacaaaacctccggcgcgccgccataaatatctccccccgggggggaccacaccaacctcaccagcgtcacccgcggagatcagcgggaacacaacgaggcgcgtccccacaataccagagcccggcgatactaaaagccagacagcggcgtcggccaaaccgctagaccacaggcaccgcgacgcggaatcaccgcgtcgaccggcgatcaatcggcgaacggccacatcacctctgcgcggggaaccacaagcggcaacgcatctccccgggacgctgacgacccgagcgaaaacacaaatgacagggcaccggga

SEQ ID NO: 533018 - DNA, 359 bp, Homo sapiens
  misc_feature (116)..(116): n is a, c, g, or t
ggcatgtgctccccctaagggtttgctcctccctgggcctgaaagttccttttcagcctgagagggggcccttcgatttcaggcatgactcagcccgggtgatgcctttgcagggntgagtcaggatttggggccggcttttttgggtctgtccccttttccccggtgctgccctacaaaactgtggcccggaaggggccgggataaaggatgccccaggtctttggacggggggagggggtagggggtttgatattgtttatataataataatttttttttagggggccgcttttggatgtatgttgaaccgggtcccggtttttttagcttgatataaaaccgaattccaaagggga

SEQ ID NO: 533019 - DNA, 1473 bp, Homo sapiens
taggacgactggcggcgacagcaaatacctacgggaccaggtcccgggtagacacccggtcgatggggcacccggacccggcattgccgcccagcggcggtgaactgctcgggctgcgagggcagagactgcactgccaggacgccggagtgcccaggactacctgccccgagagaagttcctccgacacggaggaggcagacggcgggctggcacggaccgtgtgccagcagctgcatggcatgctgtcgcaccaccggcgcgctcatacgcctgcaggtgagccgcgagcaggtacctggagctggatgagacgcacgcgattgacggacggaaccgagaaccctcacctggatgactctacagtggatggacacatgcatggtacactgacccgaacgaccctgacatgaacacgtactttgacaccgacgactgtgtgtggaccacacgaagcaagacatgactcgtagactgggaaacacacagtggaacttcacatgaacacccaaggacatgctccgtggacataccggacaggcaggcctgacaggagatgcagaccatgtggagacggacctgtgcccggcgaccgaggcatccgtgctgggccccatgggccacacaaggggccaacagaagaccaccggttcaagggacggagcccacaagggaccggggcagaatcacgaatccggacggaaactggtcccagcaacaagtggatcaagggcaccgttgcggcttgactcacgcatgccaacagacccgggcatcatgggaggatggaaagaagtttgactcatcatggcccgttcaggaggcatcccttggacgcataccggtggaggaccgttcttacttaggatgggacagccacccgaacgcacgggcagcaaattcccacgttcctcttttacaagaacagctcccttgagaggtccagaatctacgtggcagttgacaaggggatccagaatggccatcggaaacagagagcacccagattcttaccatttgggcacaagatactacaatttaaacccttcctggaacagtttcctacttgtggcaaaccaagatccttacagactgggttcaacaccgggcccctcccagagcactgccagaaaccggcaactccgacccagggcgtaacgcacgcacctactgcaggcggcgcacgggcaccagagctcggtaagagtgcccacacaaggaaagggaactgccggcagcggcgagtaggcacagacacccgcggaactaggaagacacagagaggaagacagcacaagagggatgaagcgaaccacggagagatgcactggcacaaccaatagggaaacacaaccacaacgaaaagacaggagacgatggaacgcagggattcacgcgacgagacgtcgtgcagcaaggcacggaccacaccaccggataccagcagcaaggcaggagaggcacaccgccgac

SEQ ID NO: 533020 - DNA, 115 bp, Homo sapiens
agatggagtccctgagaccttgagatgttaaataccttgcctattattttcaagtggtagagctaggatctaaattcagacagttggacagcagctgtaaacacaacattatacg

SEQ ID NO: 533021 - DNA, 594 bp, Homo sapiens
taaggttttttaagttcattgagatgggtctttgagcttttttcctgggtttttttggccttttttctttttaattcaggggaaatttttaagctaactaaatttggggggtttttgctttttttttttttagtttttttggtaaaattatggatttcatgtgattttaaaggggggctcaggtacccttttcagcttttgggagactgtattacattttactggccgctgtttactacattatgaccctgggaaatgttaggctttctttttacactctgaatttgatgcgcagatatgggccttcggtcttcttatgtccatttttacatgcgcttggggtattcaatttctacttttgccctgttctctatgtttgttaaggttttcttaaaccttaaaatcttcttagttttcttatggtcgattctataaaatttctacatatttgtttttttgtttatttcttttatttttctcagttgatttgctcgttttatcttattaatttatatgtcttagttttggctttgtttttttctatatttttgtgctattcgattctctttttcttggtcttttagatactttata

SEQ ID NO: 533022 - DNA, 330 bp, Homo sapiens
tgacatatggacactaggcgtcaggaagacagaagaagctggacagaaagagatcaagatttaactggttatgctgtagaccatggcagatcgtaacagaagacaaagcccttaaaagaaatgaaactatcctcattaaaggcctgatggctcacaccatccaggagatctcctctgctaccaactcccagcagctgattcagcggtccttcatgaacaataggcaactgaacaagaaaatgagtttatattgttcaaaagaaagaagaatgcctcttttttcccttgaacaagggaggtggggactaacaaaagattctttgcttgaaa

SEQ ID NO: 533023 - DNA, 111 bp, Homo sapiens
tccaccatcacatctgtgcattctcttgagtgcatgtatagcaaattgtgtgcatagttactcagtttttatgaactgttgtatcctgttaatgcatatgctctgtgactc

SEQ ID NO: 533024 - DNA, 378 bp, Homo sapiens
  misc_feature (4)..(4): n is a, c, g, or t
  misc_feature (13)..(13): n is a, c, g, or t
  misc_feature (27)..(27): n is a, c, g, or t
  misc_feature (31)..(31): n is a, c, g, or t
  misc_feature (36)..(36): n is a, c, g, or t
  misc_feature (44)..(44): n is a, c, g, or t
  misc_feature (53)..(53): n is a, c, g, or t
  misc_feature (72)..(72): n is a, c, g, or t
  misc_feature (83)..(83): n is a, c, g, or t
  misc_feature (111)..(111): n is a, c, g, or t
  misc_feature (119)..(119): n is a, c, g, or t
  misc_feature (121)..(121): n is a, c, g, or t
  misc_feature (123)..(123): n is a, c, g, or t
  misc_feature (131)..(131): n is a, c, g, or t
  misc_feature (143)..(143): n is a, c, g, or t
  misc_feature (190)..(190): n is a, c, g, or t
  misc_feature (208)..(208): n is a, c, g, or t
  misc_feature (248)..(248): n is a, c, g, or t
  misc_feature (271)..(271): n is a, c, g, or t
  misc_feature (305)..(305): n is a, c, g, or t
  misc_feature (315)..(315): n is a, c, g, or t
  misc_feature (353)..(353): n is a, c, g, or t
taanaaagggaanactttattcaaaanccancaaanaaatgganagcttgggnctgtaaaaaagcatttatnttttagagcanaggtcagtaattgtatatgagagcatanactgctanananaaattaantgatcagaccanaacttttcaatgtttaaaaaagaataagcttccctgtaaaagcagcncctttgtgacgttttaantttagtattcctctccttcttcctcaccctctccttcaanagaatccacaccaacctcctcanaatccttctcaaggggagccatgttctcacgggnctttgaaaantcaccttcctccatcccctccccaacgtaccagtgaanaaagggacgtttgggataaattagg

SEQ ID NO: 533025 - DNA, 1060 bp, Homo sapiens
  misc_feature (550)..(550): n is a, c, g, or t
tggcccaccgtggttaatttggggggggcgtccaaaaattgggtttttaatttcctttggaaaggggtttccccgggggaaattcgttgtggctggtggctgaggacaactgtttattcccccaactgctgttgataacggttgctcacaaagtgccgctgtctcaataattgcctcacccccttctttggagtacgttcttacacaagcggagacaattacattcccttgtcacccacacaatactactatacaccttctacattatttctatatacaatctaacatactggcgctcattcaaaatattagtgcgtctcgaagtgggcgtcgctttatatttcgtccctctatcaatctctgtgaataaacactatcctatcttttctcgtcgcgcaagaataattacgaagaggaacgttcatccctcacaatataatttgttctcgaatagaattattcagagcagacacacaaacagaagagcggctgccccaggcgtgctacgtggcgttgtgtttcacacccaccgctcgtgttgtataaacancgcctcgcacaaaccaactgtgttgtgtgaggagcagcgccccgccgaaagagtgatggctggctgagcacaacccataatgtggagtagagtgtgttgacagcgacgatctattgagagacccaccctcgcgctcgtgtgcgcacaccaattgtgtgagcagaagaaacctctcctctctgtttctactactactagaaaattatacaaaacaaaatatacctcgcggtgcgagctagtgtgttgcgctgcaaagcgtgcgctcgcccgtgttgtaaacatcactctacagggaatctcacttctggagggaagaacgccgctgttcgagcgcgacaaacaactgtgtgttcttgagaacccccccagtgcatgtgtgttgggtgaccgttttgcatgcaagtacgaccgccacggatagagattacaacacacccgaagtgtgagcctctcctcacagccttgttgtgtgactaaaccaaacggactacagaacgaactccctaaaag

SEQ ID NO: 533026 - DNA, 150 bp, Homo sapiens
agaggtgattatgtatagcataaaggaggaaaaacaagttagcagtcaggatgggcggaaggtgtacataaccacagaggtgggtagcatggatttaccgtgattttagttcaagcagcttcatacgatctagagcttcaaacaatggca

SEQ ID NO: 533027 - DNA, 686 bp, Homo sapiens
cattatggccggcgaagtggagttagtagaattagaagtgttttctgaagatgggactgacttgctgcaatctgacgattaaacttgacctattgacaagttgcttctttttgtttgtttgttttgagatggagtctgtgttgcccaggctggagtgcagtggtgcagtcttggctcatttcaacctccacctactgggttcgggcaattctcctgcctcagcctcccgagtgcctgtaatctcagctactcgggaggctgaggcatgagaatcgctggaacctgggtggcctaggttgtagtgtgccgagatcatgccactgtaattccagactgggctgcataacgagactctgtttcaaaataaaatggaaagtgctttcttgagatggaatctaatgctggtggagatgctgtgaacaattgtaatgatcgcataggatttagactattatatcaacttaggtgataaagccagcaccatggtttgagaggtctgctccaattttgaatgaagttttcctgtgggtcatcaattgcggcaaaccttactactattttttggacatctttgtcccggtgcagaggcttacgccttgtatttctagcacttttgtgaagcttaagtggttttgtatgtgccctgtaagcatatgttgcggttcgcactatgtgcccctgcctct

SEQ ID NO: 533028 - DNA, 123 bp, Homo sapiens
actcatgggacccctatcgaaacccttacacattatggaaacagggcatttaaatcattactctaataaaggagaaggagttgtgatttgcaaaaaattatagaaattatagggtcgctgacc

SEQ ID NO: 533029 - DNA, 227 bp, Homo sapiens
gcgtgacgcgtgggtcgtgtttgaggaagtcgctgccgcgctggccctgcgttaagattccctgcattttaattgttttcaggcgggtgtcatagccccgggtttggccgacctagtaccaggattcgcattgcctagcatactatacgatcactatagggacacttgtacaaaagctgttaccgtcttgttccctcgagatctcttaggccctataattttatcac

SEQ ID NO: 533030 - DNA, 763 bp, Homo sapiens
  misc_feature (743)..(743): n is a, c, g, or t
atgacccttattgggtagcatacctcttgcttcaagtggactaccgggtcccggcttgcacatgtggtcttcactgtagcctttatactcctttcggagccggcaatttgttatcgactctgtcctcacgggaatgttccttgatgacccaatgatatttggaccaagaactaattgggtgagactttcgacgaatgccgctgggattgcccttcatctcccaagatcctgtgtgtattgcgtatacgatgtgcttcactgagttctcttatatagtatatgctgacatgactgtgtgtacaactacctgcctatgactgctggatactcatgacaatgaatacgccagttaaaacctgacgatccagattgtctgtgactcaatatggattatgaacccgttggaccatgcagggtctgcctgacagccacgcaaccctctctgaagtggatagtggactgatcatgctccttctgacatcagaccttcaaggacgggacaacgattgcaaagtgtgcagctgtatcctgctcaacgcctaaatggctgatggggacggctgctgctttcaaggggcccagtgcttgtaatataacctctccaggaagaggcacattgcccacctattggaaagggaggaatatgccttctcctcggtagttccacagagttttaggaaaatctgttaggaactgggtagatgtcaaactgcctagcgcagtcatactgatctttagccatntaacgccgtggtcacaccaa

SEQ ID NO: 533031 - DNA, 355 bp, Homo sapiens
  misc_feature (110)..(110): n is a, c, g, or t
  misc_feature (127)..(127): n is a, c, g, or t
ccttgggatggagtttaggttccccccccccccccccccaccacgggcccaaaaatttaggggaacccattccggggccggaaccaattcctttttttttgtggcaggantggcaaccatggtgggntacccctttctcaacggcattttttccatccaacgggcaacgcctttttgggccccaggcccccggaccctgggcatggtttaggaggattaaaaagaattatttttcctccccctccccaaactggttttttttctttcatgcattccaaaggcccccgtgcctccttgttttttgttcaaccggacccggggtttttcccccccaaattaaacccctcccccttta

SEQ ID NO: 533032 - DNA, 1677 bp, Homo sapiens
  misc_feature (647)..(648): n is a, c, g, or t
caggaaggtgggaagaattcatctggaattactacccaatcaatggaatgctgatcaagcaccacagctgtaacttctgaggcgatctaccaagaaggctgtgatatgagagagacttgtccgccgtggccatgtatcagccagcgtctcccgcgtgctggacgacgaatctgactggtggtctctgcactaggttcttgcatccaatgagaagactcttgtctccgtatcagaacgtctggacctgagtgtggaggacctgtgtccatccagacacaggctcgggccgtgatgataagtgtgtaaggaagaaagatcacctacaaacagctgagtgtgaccactggacatcagagacgcgattgagctctatttggttttgccatgggttgagccaccatatgtaacgaaaaacatctcaatgcattgtagatatctataacttcctcgtatgggctatcgtcgtattaaaatagttgatgttgcaccgatatgaagatcttagtagaaatgcatcagtatctccttaatattatgtataggacgctcattgtgtttctcctcgtacattttctctctagtatacaagcatacacacggtaaccccacatgttctcgtggtcttcgttaacgatttagacacacannttcattcccttacaatagaggatacacatagagaagagaaatgaacccaagggaccatacattggcattgattggagtaatagcaagattaagagcatatatagggagaccacccagttcgaacttaattacatacttaaagaaagttagaagcgaaactacttgaggacttaccctaggataatccccaatgaaggagattccaagaaggccccgagatttgacagaagaagcaagtgcctagtaaagattccactatttacggaagccttattaaaggacttgtcgttccttggcgccaaaaggacacccttcggaacatataaaggacacccaatgccaaaatactccaaggcgaaacattcgctagggaccccacgattatcataggattataccaattaagggaaaattcctatgtgtgttgcggcgtcatacaggtcttaacgacgtcggttatcacacaaaataggagcccccactttagtgtagccccatactttatcccaaatgtgtcaagacgcacgagtgaatccagcccttcaccgtataggcaaaacgagacacccggataagagagcataacgactgggagagcacgtagacaaatggcgggcagaacacagcagacaaagaacacataaccacaacgagtgacccccaaataaggaccacgacccaaacaacggtatggatagcaacatggtcagcaccaccaacagagggttaggataactacaacgacaggtaagagagacgcacactcaatgcaagaacagataaggcgtgagtaggcgaggagttgtgaacttagaaccaccaccaggacgctaagaagcatataagaccaacacagtcgacacgacgaaagaaaaaaaccagagtgacgaagagagcaacgaaagagaaaggaagggatgaaatcgacccacgcgtcgacactcaacaaagaagtagcacaagacaacgcagagaagcgaggaattgtagaggtggataagccaaggaagtagacagtacaacatcaac

SEQ ID NO: 533033 - DNA, 638 bp, Homo sapiens
  misc_feature (24)..(24): n is a, c, g, or t
  misc_feature (63)..(63): n is a, c, g, or t
  misc_feature (138)..(138): n is a, c, g, or t
  misc_feature (160)..(160): n is a, c, g, or t
  misc_feature (171)..(171): n is a, c, g, or t
  misc_feature (215)..(215): n is a, c, g, or t
  misc_feature (273)..(273): n is a, c, g, or t
  misc_feature (288)..(289): n is a, c, g, or t
  misc_feature (300)..(300): n is a, c, g, or t
  misc_feature (309)..(309): n is a, c, g, or t
  misc_feature (311)..(311): n is a, c, g, or t
  misc_feature (314)..(314): n is a, c, g, or t
  misc_feature (354)..(354): n is a, c, g, or t
  misc_feature (366)..(366): n is a, c, g, or t
  misc_feature (388)..(388): n is a, c, g, or t
  misc_feature (394)..(394): n is a, c, g, or t
  misc_feature (406)..(406): n is a, c, g, or t
  misc_feature (409)..(409): n is a, c, g, or t
  misc_feature (427)..(427): n is a, c, g, or t
  misc_feature (456)..(457): n is a, c, g, or t
  misc_feature (459)..(459): n is a, c, g, or t
  misc_feature (463)..(463): n is a, c, g, or t
  misc_feature (466)..(467): n is a, c, g, or t
  misc_feature (480)..(480): n is a, c, g, or t
  misc_feature (490)..(490): n is a, c, g, or t
  misc_feature (500)..(500): n is a, c, g, or t
  misc_feature (535)..(535): n is a, c, g, or t
  misc_feature (544)..(545): n is a, c, g, or t
  misc_feature (557)..(557): n is a, c, g, or t
  misc_feature (607)..(607): n is a, c, g, or t
tgacatgaaaagggctgccaggcnatgtgttcctccccccacttcacagccagcacataatcncccctctccttgacgacgtatgtaacgttgtattgctggttgcctacatgcttcatggagacctcctcgcagggngtggtgggcccatggaccccgntcagcagcatnttggagccagctttgctgcagtccaccaggaaggaactcttctngcccacaaaggcctttgagagccctgcccccttagaggtcaccttgctggcgtccgcngatgccttgggaatnncgctatagccngtctctgtngncgncctggtcactgactccccccggctggctgccgtctcgttngctgccccaggnctacctagacgctggcctgtcnccttcnccttcgccgggnctncccccccctgtggttggnccccccgtatttgatgctgctcacggctnntncccnggnnccacgggggtgtncatgattttnttcccttcangtgtttcctggcaatccattttaaccttggatggnccttcgatnntcgccgcgcctnctctccctggaacctgctcggggtggtgttaataaggaattccgactggntacctgtggtgcccccttcgagtcccgtgcc

SEQ ID NO: 533034 - DNA, 810 bp, Homo sapiens
tgcagcctataaaggccagcatcttgtgggccatccagtacatcccacctgagctggatcaagttagcaaaatggatttcctgactggaatctcaccaccgcaacaagcacacccttttaagacctactttatgaggcacttgtggattgtaagaagagtgatgctgcttcagaaagtcatggtggaattgctcgggaagcttacacagaggacaatgcttcccaggctgcgagttgagtgcccacaggtgtagttgtacggagcaattgaaagatccgaaatgcatttcttttagaccaccttcgttactattaaaacccagtcaagtttattggaaggcgagattaatcatgatcttctaaccaatattgtgagtgctaaattggcatcatatgtcaagttttatcagaataataaagacttctatctgattcacactggccttgtgtaccatgcaacgagaatatggcatcaatatagagagctaacgttactatttatgggaactggcagtagaaaataaacgaaatttctgtttgaccccaatgcagcaagaacttcagattggagctgatgatgttgaagcatttgttattgacgccgtaagaactaaaatggtgtactgcaaaattgatcagacccgagatgaaaagtagtgtgtcagtcatagcccacatcggagcgtttggaacaacagcagtggcaacaatctgtatgacacagcttgaatgccctggaaacaaaatctgaaccaagtgataaacagcctgtcgagtctttctagataccttaactcttagggttatact

SEQ ID NO: 533035 - DNA, 315 bp, Homo sapiens
tgactctagaggtatccccttgtccaagcgtagtacccatgcatttaggataaagggatactcaactggtacaacacaaatgctgcaaaatagtgttgaaacatatctccttgtgcatacacacaagtttctttctttttttttttttttggaaaaacaaattttggctctgtcacccgggctggagtgtacgggtgcaatctcggctcactgcaacgttctgcctccggggttcaagcaattctccgtgcctcagttccccaagtagctgaactgcaggcgtgcaccaccacaccgtggctaattttggtattt

SEQ ID NO: 533036 - DNA, 146 bp, Homo sapiens
tataaaggaaggctgaggggagagaggaggctaggggcctggacgaagaggctaggacctgaagagactccagcgagtctcgggaagcccagggggactttgtcacccattttggggcactttccccagggctccaatggctcagc

SEQ ID NO: 533037 - DNA, 674 bp, Homo sapiens
cttattaagaaaggttaatgattcattgaagctcagcatgaggacagtggatgcttacgcagatgagtgaatggtcatatgagagtagttctgatactaactagaaagtagaatttcagtacaatacaatagttggtctcctaacactaaatactaacctgaaatgagtaggagcacttgttatagagcgggtcaaagacttttaacagagttgatgtgctaattgtgcgtcctgttcagagaagtgaatagtatataattgagggctacttttgaatcagctggcttttcatgtatactttggcgataagtggtattatttgtgtggtgccacttagattcaacgtctaaagaatttggataagatggtggtgataacagacttggtctagtgagaggatgacgactgcatccttaataatagtcaggcaatttcctacaattgaggtttcccttaatggcatgaaatttgttagttggtggaaaggaaggaggggtaactatgcgggccgctttttaattcaacttccctggatgggaggtatatactggtacacgattaaaatgctcccgaagaaaaccactaaagttttaaaaaaggaaaattcttttgggatggataaacaaatctatttaagttgatttggtttttttggtcggtttctttagaaaat

SEQ ID NO: 533038 - DNA, 111 bp, Homo sapiens
  misc_feature (56)..(56): n is a, c, g, or t
aaatgttcctttggccaaaagctgaagggagtttctgagaaaatagttaaccattnctgtcaggtgtcatccctgttccaaaggtaagcccctttagaattttgttcttga

SEQ ID NO: 533039 - DNA, 386 bp, Homo sapiens
  misc_feature (11)..(11): n is a, c, g, or t
  misc_feature (114)..(114): n is a, c, g, or t
cacgcagatanatacacacacacacacaacatcacgcacactcaagaaaatggagacacctttggatttattgaaactcaatctcgatgagagggtgtacatcaagctgcgcgnggccaggacgctggtgggcacactgcaagcgttcgactcacactgcaacatcgtgctgagtgatgcagtagagaccatataccaattaaacaacgaggagttgagtgagtccgaaagacgatgtgaaatggtgttcatcagaggagacacagtgactctaatcagcacgccctctgaagatgacgatggcgcagtggagatataagcaaagaggaggagaaaacaaagggaaacagtacgtatttttttattttacttttagtatattaaaa

SEQ ID NO: 533040 - DNA, 741 bp, Homo sapiens
ggcgtgctgtgggtgagttgcttggatggttggtcagcgcgcgtgggctagaacggctagcaaaccgagcgatcatgtcgcatcaaatcaaactttactatttcggaacaaatacgtacgacgaggagtttgaagtgaatcagacatgtaccatgctgcccataggagcgatacgccatagtctggatccctagaaatcgccatctgatgtccgtgaatctgaatgtgaggaagtcttgagctgtctacagcagagctcagggtatgggtccatcatatgatccatgaatccatgaatcctcacattcttgctgttccggtgctcattagccaagaaactcaatgaaatgaagctggtcaagctacttttcagcctccagctttacagcagctgtccttacttcctaacatctttctgataacatttattatgtttgccttcttgtgtctcactttgatatttcacacgatgttcaataccactgtttgaatgtgctggtaaactgcttgcgttcttgagtagagccaccaccacataggccagccagatgagtgctctgtgggacccacaagctaagcctgagtgtgaaccccagaaagccacggatgttgctcctgtactcccagaaacacacttgcggcgatggagggaaggctctgagtttgagaccatgggctgttaccgggatcctgtttaacttgcctgttttgggttttccttgcccgggtgtggatagtgtg

SEQ ID NO: 533041 - DNA, 376 bp, Homo sapiens
  misc_feature (15)..(15): n is a, c, g, or t
  misc_feature (93)..(93): n is a, c, g, or t
  misc_feature (99)..(100): n is a, c, g, or t
  misc_feature (110)..(110): n is a, c, g, or t
  misc_feature (127)..(127): n is a, c, g, or t
  misc_feature (135)..(135): n is a, c, g, or t
  misc_feature (151)..(151): n is a, c, g, or t
  misc_feature (161)..(161): n is a, c, g, or t
  misc_feature (179)..(179): n is a, c, g, or t
  misc_feature (189)..(189): n is a, c, g, or t
  misc_feature (195)..(195): n is a, c, g, or t
  misc_feature (199)..(199): n is a, c, g, or t
  misc_feature (204)..(204): n is a, c, g, or t
  misc_feature (243)..(243): n is a, c, g, or t
  misc_feature (274)..(274): n is a, c, g, or t
  misc_feature (278)..(278): n is a, c, g, or t
  misc_feature (301)..(301): n is a, c, g, or t
  misc_feature (307)..(307): n is a, c, g, or t
  misc_feature (315)..(315): n is a, c, g, or t
  misc_feature (341)..(341): n is a, c, g, or t
  misc_feature (344)..(344): n is a, c, g, or t
  misc_feature (356)..(356): n is a, c, g, or t
  misc_feature (359)..(359): n is a, c, g, or t
taaagtggatggacntgatggaattcagttgtctcaccctgatagccggggtgttgatattcactttacccgcactcgagacacaggcgaccntgaagnngttctcggtntgtagagtccacgtganagtccccncagcctccccggatanctgtgtgccngtgcgctactgctgtgcncgttttcccnacttgngcgntcacnaaatgcagctgatctctctctctgtgcactcgtgatccntgttgaacaatacatgttggttctttttccncgcnatgtaagaacatgatatactgtncgttgnaaaaaaanttaccgtatttatataccggaatgtnccnacttcggggatnacnggatattaaatgggggg

SEQ ID NO: 533042 - DNA, 577 bp, Homo sapiens
aaaatgtttattccgctgtgcaatgtatttgtgttttaagctaagtattattacaaaaaagtcaaaaagatttaaaaaattaaagtttataaagtaaaaaacgtataataagcgaaggttaatttatgattgaagaaagacacaaagtttaataaatttagtgtaagctaagtatccagtgtttataaagtctacagtagtatacaataatgttttaggcccttacattcactcaccactcatcactgactcactcagagcaacttccagtcctgcaagctccattcacggtaattgccctatacgggtgtatcagtttttacctttcatactgtatttttacctcaccttttctatacttagatcacaaatattttccatgatgttacaaccgcctacagtattcagtacagtaacatgctttgcaggtttgtagcctaggagcagtaggctcaggtgtataggaggctatactttctaggtttgtatacatgcactccaccatgttcattccatgacaaaaccccctaataatgcacttctcaagaaggtattccctgtccgttaacttgatgcc

SEQ ID NO: 533043 - DNA, 778 bp, Homo sapiens
agccttctgggttttatctgactgggcagaactaacttatgtggtcaccctagttacaagggagtctgagacagcatttttaactagaattttatcagtaagggagcaacgggtcaatggcagtttgccagttgttaatgtgtaccctcagctcatattttccacccacatattcattgcacacttcgttcgagcatcgcaataacatgcctcaggcatcaaggggattaaagaaaaatccacaacatccacaatcttaatgttggatacaaagttgggcaacatggaaactttgagcaatcatcacatgtctcttcatgtggcatcatttcattttcattgaacgtccactttttttgaatcagtacttacaacaactttcagcatgtatcttagtagatagtaaaagtctactcaacctgccagtaatatcttttctaaaagtttacgtcctattaaatcaaatagctggttagaaaactctatcaccagtcacagactgctattcaacatggccgtactctacttttataattttacttccttctaattcctgtcatccagagtggctgaagcaggactcccgggtgccacgagtactttcctgagtatagcaaaaacaacactcaggccgccatcggctccagaccaagttcgaatcacatccaattttggaagccgcggtgctataagaccacggtggagccaaaacgccctcaaactaacgaccagaagttcgagtccaggttagggcaccggccctcgccccccgccggtc

SEQ ID NO: 533044 - DNA, 618 bp, Homo sapiens
  misc_feature (179)..(179): n is a, c, g, or t
  misc_feature (218)..(218): n is a, c, g, or t
  misc_feature (237)..(237): n is a, c, g, or t
  misc_feature (270)..(270): n is a, c, g, or t
  misc_feature (327)..(327): n is a, c, g, or t
  misc_feature (334)..(334): n is a, c, g, or t
  misc_feature (474)..(474): n is a, c, g, or t
  misc_feature (482)..(482): n is a, c, g, or t
  misc_feature (485)..(485): n is a, c, g, or t
  misc_feature (492)..(492): n is a, c, g, or t
  misc_feature (510)..(512): n is a, c, g, or t
  misc_feature (519)..(519): n is a, c, g, or t
  misc_feature (540)..(540): n is a, c, g, or t
  misc_feature (543)..(543): n is a, c, g, or t
  misc_feature (546)..(546): n is a, c, g, or t
  misc_feature (549)..(549): n is a, c, g, or t
gagggagccgcgggcgagggatcgcaggatgagcgatcggggcccgggcagccggcagcggacgcgccccccgagcccaccggcccgcgccccgcgccccccacggccccgcggtcccggtcccggccgcatcacccacgtcccccgagccccacgggccatgcccggccggccctaancgcgggccggggggcgtacccttgcgcccgggccccgcnctggcgccccccgggccgncgcccggcgcgggggccatggcgttcaccttcnccgcgttctgctacatgctcaccctggtgctgtgcgcctccctcatcttctttgtcntctggcncatcatagcctttgatgagctgcggaccgacttcaagaaccccatcgaccaggggaaccctgcgcgggcacgcgagcgtttaaaaaacatcgaacgcatctgctgcctcctgaggaagctggtggtcccagaatactccntccacggnctnttctgtntgatgtttctgtgtgcannngagtggntgaccctggcctcaacatccnctnctnttntaccacctctggaggtacttccaccgtcctgcatatggttctgaggtgctgtgtgatgcggggtccatc

SEQ ID NO: 533045 - DNA, 378 bp, Homo sapiens
cgtcgacatgaaagtggggaacaggaggatagatgaaactgagggaatggatggagtattacttagctgttaaaaaaaatgctatcatgaaattcataggcagatggaaggaactacaaataaatcatcctgagtgaggtagtccagattcagaaagataaatttgatatgtagtcacttacatgtgtatattatccaagaagtaaaagataaccaagctacaatctacctagagtatagagaagtggactagacagtatgcactgatctccatgagagtgggaaatagaatccatcttataggttagctaggataggtggatgggaacaggaggatcaagtggggaacaggaggatagatgaaactgaggtcgacgc

SEQ ID NO: 533046 - DNA, 986 bp, Homo sapiens
tctccctggcctttctccccatcttgcctcctccagcgtcgtcagggaatgatgccctgggcaaaaaccttagcgtcaggcattcaccatgtccccctatccgcacgcaacggagaatccctctggttccactcgacatgcctagcgcccctccacagagggttgcccctcctcagggattggtatctattcctgcagcgttgtgactacatgaggttgtttctccccgtctggtgttgactctcaacgctatctataacactccttcgacaatgtggtgtcgtgattcggagcgacacggggatcacgactttgaggacctgcacgctggcggcactggggtcttgccacgtaagtactaagatgacagtgtttctccccaggacactctgcctacctaagtatcccatggcgctgttgcatggcgtcattacttctgagccccagccccaatctcatgacgaagactctgttgcacgccctccacacgcactaggtgaacagcaggatgcccaagttggagggcttcaggtcatctagtgagctggtgaacttgccaagtgaacattggcgaggtgggcacgggcctgtagattcacgggatagcgctgttgatcccctctctgtaggctccaaacccgttgggtcaccttgctgcaaacccatgaagcatggccctcagcatgcactgacccctgtcctaggtcatgaaggacactctgcagggtgaagcacttagggagaggcctcggcatgtcattccatgtccccagcgctggggtgcctgctgtccgtcccgctttcatgttactgttcggcagcttcgtgcatgagcctgcccagttggaggagactagggcacccctgcctcatgcctcccgcctcctgccaacctgtctcagtacctcccctccccgccacctgaaacagtgtgcccctgcacaaggccggagacccacagccctaaatcgcgaagtgcccttaaa

SEQ ID NO: 533047 - DNA, 117 bp, Homo sapiens
cacaggcttgctttgaattctctgacccctcatcctgaaactatggagacagccttcagctcctttcccttcttttagacctctgagtcttgctgaggtcctctaacagtctgatct

SEQ ID NO: 533048 - DNA, 394 bp, Homo sapiens
attttagaattggaagaggtcttggaaaatgttatctaattctcactcttcacctcactaaaattttgaaaactttaagtgatttcctaaagggacacagctaattagaggcagagttctaacagaaaacccaagtctcttgattcatttccagtgctttaaccaatatattatgttgctatgtaggatagtttaaattctaattttccatggttagttttaaaatacaatcatttttaaaatatactagtaaaacagtttttgctttctaaaaataaccagctctaaaagggatcttttcaagcattatcattattttaataactggtttttaaaactatcaatctgtattagtaaaattttcactcagaaaatttgactacaacaaaaataa

SEQ ID NO: 533049 - DNA, 1415 bp, Homo sapiens
cagccgctgcgggagcaccaccgtagcccgtaatgatctaccagccattgggatttcttccgggcacagactctgtaaggaaacctctgatgtaccaataccatggcgtgtgttacacatcgaagagcttcaggcagtcagtcagtgctgcttctgaggatgtctacagacgctggtacttcgacacggccagctcttcgggcaagtagagtacaatccattgcgactctatgcaccttgacaccgcgtccgtcacgtcgggagggataggacttgaagtcgagcatgtcgtaggatgcctgatcctgacacccccttgaggggtagaggacatgggctgccttttccttcgaccgaatgtagactttaagggctcgtcgccgtgacccgtcgtgtgctacatagggtagcgaaacaccaacgaaataatctgggggggtgtccccatagggcacttttcgcgtccccccagcactcgcacgtctcaaagctcgctgcttcgtcggcggagaatcgcgcacacaaacacggttagcgcccctgaatcaaggcaccaagctgcggtcatcgccctctacttgtttccaatgatcgtcgaaagtgtgcaaggcatcgcgggtcgcgactctggggcactagccctgccggggcagctctattgttgccttgaagaggcacttccctcgtgcctgcgattcaaaccatacctctgaggctctggtgactggggcatagtgcgcctcgaggtgacgggtcgcttattgcccttccggaggggcttggcatgctcgcgggtggcccttcgtttaccaagcgtttcgccggtccacgcttcttgtgcttgcttatcccccgtgctgaagcgtgcccggtgcattcggtgtggcgtttggcgccaggggggtcttgctcctgtggaccgttgcgacgaaaggccaacagggggggtgacatggtaggaccgcaattcccgtattccccttttgtgcgacggacaatggccttgcctcggggtggttgttcgtctccctggccattcgccaccgtagggcgttgtggggcgcattggccgacgttcccgttcctccccacagcggcgcctttggaggcctttgctttgcgctctctttgcccggcgattagccattagcctgttcccccccggggttcttgcgcattccccaggggatggttcgtgcctggggcgattggggtccaatttggcaaggtgtagtacaagcacagcccggtaagcggggcttctcttttctacctttttggggggcgccctttgcacatagcgcttctgtgagtggtaccccagtgcgtgccgtcacagccggcatattgggagcgcctcccactgttgctctcatccctttcccggagatccctctggccactacctctctccg

SEQ ID NO: 533050 - DNA, 642 bp, Homo sapiens
  misc_feature (419)..(419): n is a, c, g, or t
gggcagaacaggcagttgagagtctatagggctcagctaatctgaatcttggtgggaagaagtggattctcgggtgctagcaaatgggtgcagaagcctgagacgtaaaagagacgggattttggtccgtggtggaagcgaatgctcgacaagggccacagggcccacgataagtgtagacactttatgggggtataggaatgtcactgtggtaagatgcatgagcactttgaggagaccagttgtcagcataatcggaatgacacttaaagtggttagtgttctcaacgcatgagagaggaagtgtgtgtaagagtagaggtaagcaagatattctataaaggactggtgggttgggagttgggaatcaggtgtgtactggaggccaggagataagaggagtcgttggttcaaacggnatctggttcaagaataaagagggtactggtgcatgtcgtccgtagaggtaacgcattgcagctatgcattagttccatcctcctatgtgtgtaatttcttggctttcttgtcaggatctcctacgaaccaagtggctctcggactcacgctctggggccctaattacatgactctctggagagctcgcgcgggcagcgatgcgtttagcagggtgagatggac

SEQ ID NO: 533051 - DNA, 272 bp, Homo sapiens
cctggtaactcccttgctcattagggatataatcaggttcaggcagtggggaggaaactcatacaaaattgattgtaagactgtgtgatagggctgggcgcagtggcccacaactgttaattccagcactttgagaagccgaggtgtgggtggatcacctgaagtcagaagtttgagatcagcctggccaacatggcgaatctccgtctctacaaaaattagctgggtgtggtggtgggtgcctgtaatcccagctactcgagaggctgagg

SEQ ID NO: 533052 - DNA, 298 bp, Homo sapiens
gagactctcggtctcaagtgtatcctcctgtctcgagctctcaaagtgttgggattacaggttttagcctctgcactgggccaggactacgctttcttacaacctgttttcgcattctagatgttccagggggctcccctgtagaaacggcaagtctctgcaggtcatcagaggctgcatttcagagcgctggttctcggtgtgtatcggtggctccatcgtggtctcactgtccagcttccagcagatgtggattaccaagctggagtacgacgagtcgggcccctccatcgtccac

SEQ ID NO: 533053 - DNA, 1931 bp, Homo sapiens
gccccaacacaaagagtgccaactgtataataggctctatatgtgcctggaagttgtcttatgatgcgcgtgattacttggacacaagacaggaagagctagaacatagagtagagtcgtacacttacccatggtatgtgacggaagaagcgtcgcgtagcaagtaggtgggcaatagagcatctaaggacagtgcacacgagcgcacaaagaataacgtgcaagcgcacgtcatatagtgtaaaatgtacaccctgtcattctagtgcaggctggacataagaggtaagacgatgcccattctcgtacttagtcaaaggtcggcgtctagtagagacgctgacacgtaccatggctaagtctcacatacaggatattcagaccctaaatactcgcgttgctagcgcgggactaaacacgaagggcgtcatcttcgacgtcatcgttctatgagaagacataaggaccacaaactaaaaggttaacccagtatcgccaaagcgaaggaaccacaccatggctataagggaagaagaccgtacatgacaaccgcaaggactcttgcatatagtggcccgcagcgagagcccggaatgcacaaggacatgagtctagccctgggagtcgaatagacgggggagggacatcgtagcaattccatagcacgggaccaagcttatggaaagcgccgacctcattggattagcgcctattgccgcgcatttgcccagacgtaacggtttttaatagccacaccctggtaacgagacctaagcccttatgggtgtgttagccgcaagggaagacgccaacacgagcacaagagggatctttcccaggaccatgggcggatggtcgcttgacaatttgtggtcacaccaaaccggaacagcggagttgggggaattatccgcgtcgacttccgggcactggcccttgggcatattgtgagatcaatttccccttgttggtccacttatagcccccccaatggacttagatctcctgcatataacacaaccaagtttgatgatcgtggaggctaccccgccatatcgttaaacagtttgccccagcttctcaccttttcaagcagcgcgctgctacaacatacgctggccaagcgtggactcatagggcgtagaacgcacgagctcacattaacgtggatgccccaaaccggcagtgtgggtcacagcgtaccacatcagccttgtggaaccaacccgccaagtgtctgtggatcccgtccccacgattttcagaaccacccacgcgtgattgtaaaacccctcccggtgcactaagacaactcaaaacaaaggggcggctcattctgtggcgcacctataccaagcccactgcgctgtgtgcgacaacgcctatttcacgacgaactccgaaatctagcgccatggaccgcaggcatttacgcaacctggaaggaaatccctgcgcggggactccacctttgccccgtatgtgtgcccacacgtgcatccgcattggtgggagttccccttacagcgattacatgaggtcgggcttcgcataatcatcgtcggacgccaaacgtctttccgaattacaatgcggcacaagcgggcttaaatgaaaagtctgtgcccacgtttacaacctggggccttaaccaatgtttcacctggtcggagcatttcactcgcgacccacttcacgagatcacactgcagacattaatcttagcccatgagccatcagtgaacacactccgatcatgacatccacacatcctgagcgccactcacgtgcgcacagcgatggtcgccaccacacatatcaactcaccgcaacacaatgctacctcgaggttcccacaacgacaccgcgctcgttataacacacacgagtgcaccagcagacccatcatgacaagcacgacccatgttcct

SEQ ID NO: 533054 - DNA, 205 bp, Homo sapiens
aatatgggatatttaattagtcacacgtcataaaaacagacatggccgggcatggtggcccatgagtgtaatcctagcactctgggagaccaaggcaggaggatcgacttgagcccaggagttcgagaccctggcaacatagtgagaccctgtctctacaaaaaaattataaaattaggtgtggtggtgcgtgtttgtagttcca

SEQ ID NO: 533055 - DNA, 950 bp, Homo sapiens
gatctccatcttagtcgattcgcggaacgggggtcatcgggtgtctgcgccggagcctctcgaagggtgccggaaggactacatctagggtcgtatcacgggactcgtgctcgtgcgtggtaacctgtactccagttgaaccaagatacagtagtcatcgaagggagttgagctccgtggaggctaggtatatcctctcgcgaggaaggtaggtataggacccagtagagatatggcatgctggatctcggcgacattgctggggcagcccttggtgtgggcgaatcccagcctgagagctgcctcggctggtatgtgtccttagcctacgttgagattgactgcggatgcctcgcacgaatgctttcgtatagaagatgcgtctgattctattggtgagtacaattctatgtactaacacgtctacactcgaggaacaatcggtgtatgccacatgctagttgaaggcatgcatttattctgaattgcatggaattgttgctagtacgtaaagtagtagaagtaatgggctacaatctgggtacaattggtggtattattgaactagggaatacgaggaagacgttattaaacttgattgacgggaggatcgggttaatatggagggtgctagttgaaaaatgcggttacattcgatcatgttcaacatacttatggaagggaatacagtgtgaaactttttgctagtgaaacgattggttggattatcatagggcagggttgaataagttacgtaattggggaatggtaatggatcatatagcaagctcgtgtgggtttagctttggttagggtttaaacggggaggtatgggagacctggacaacaatggtcattgtggacaggggtcaattcagaagggtagaggaaggtgatttgtgcccctggggtgtgcaccgacgaagatactcaattctggagccaccagg

SEQ ID NO: 533056 - DNA, 485 bp, Homo sapiens
ggcctatttacaccttgtctaggcaggaaccaatgtagcatctgacatcgtatggaggagagtctcacgtgtcgtccctacagtgtataggaccaagctgtgccctgaacaccttgggaccaggttgtcaggatctcctgaggaggtagtcacaggcgcacgtcctcgagataggcagggtagactttctaacaaatctgagagctgtctcggctattcagggttcacacatgtaatgtaggatgtcatggttgataagagggatgtaattctactctgctattagagatgtgctgtcaattatccttcaactttctcaacaaactatactatgttgatgaggtacaacatcagtatatctaggtcgtgaatagtgtagcgattttaagaggcctagtggacaacttgttcaactacctatctttagctaatttaaccactgtacagaccaatgggtcattagagacggtgcatagcagtgttcc

SEQ ID NO: 533057 - DNA, 635 bp, Homo sapiens
  misc_feature (6)..(6): n is a, c, g, or t
  misc_feature (111)..(111): n is a, c, g, or t
  misc_feature (113)..(113): n is a, c, g, or t
  misc_feature (126)..(126): n is a, c, g, or t
  misc_feature (128)..(128): n is a, c, g, or t
  misc_feature (137)..(138): n is a, c, g, or t
  misc_feature (175)..(175): n is a, c, g, or t
  misc_feature (203)..(204): n is a, c, g, or t
  misc_feature (216)..(217): n is a, c, g, or t
  misc_feature (238)..(238): n is a, c, g, or t
  misc_feature (264)..(264): n is a, c, g, or t
  misc_feature (267)..(267): n is a, c, g, or t
  misc_feature (284)..(284): n is a, c, g, or t
  misc_feature (299)..(299): n is a, c, g, or t
  misc_feature (340)..(341): n is a, c, g, or t
  misc_feature (351)..(351): n is a, c, g, or t
  misc_feature (366)..(366): n is a, c, g, or t
  misc_feature (428)..(428): n is a, c, g, or t
  misc_feature (453)..(453): n is a, c, g, or t
  misc_feature (461)..(461): n is a, c, g, or t
  misc_feature (565)..(565): n is a, c, g, or t
  misc_feature (582)..(582): n is a, c, g, or t
actaanaacaaaaggtagcggaacaagcaccccatcgaaaaggctccttccggtttgatcctgaaggccaccatcctctgcctcctggcctgggctggccttgctgcagtnancgggtgtacaaanancccttccanntcgtcatccaaaataaaaataccttttaacagctggnaaaagccaatgccgggaaacccaaaaannccaccttcatanntgctccaattcaagccaaaanatcccctttggataaaaaagccctanaanaccaactggtgctaatngctgcaaaaattganaaagaaaaaaaattgagggccgcaatggtcgggattcttgnnaaattcttgngcttccgtatatatngcatgcacagtgagctatggggcgttgtccattgggccaccgtcctctccccaacggctttntttggcacccttgcctctctctatnttggagcnttggaacacacaatgataagctacaggcaatcctgggtgttccttggaaggacaagaactgcacctcccggctggatgcgcacaaggtcctgtctgccctgcangctgtacagggcctgcnagtggcccagggcagggctgatagccaggcccagctgctgctgtccacggtgg

SEQ ID NO: 533058 - DNA, 465 bp, Homo sapiens
gaacatgatgtggcccatgcacaccccactgctgctgctgactgccttgatggtggccgtggccgggagtgcctcggcccaatctaggaccttggcaggtggcatccatgccacagacctcaatgacaagagtgtgcagcgtgccctggactttgccatcagcgagtacaacaaggtcattaataaggatgagtactacagccgccctctgcaggtgatggctgcctaccagcagatcgtgggtggggtgaactactacttcaatgtgaagttcggtcgaaccacatgcaccaagtcccagcccaacttggacaactgtcccttcaatgaccagccaaaactgaaagaggaagagttctgctctttccagatcaatgaagttccctgggaggataaaatttccattctgaactacaagtgccggaaagtctaggggtctgtgcaaggcctgtcacactgaccacc

SEQ ID NO: 533059 - DNA, 862 bp, Homo sapiens
gtgctctttttacttgttttgttttggctttgtttctttgttggtttttctgtttcttgtgtccttttatctctttttttgttttttgttgttcagtgtgtttcgttttttttggtgttgtgttctttcgtctctggtgtcttttgtcttcctttctctcttccttcgttttctgttcccctctgtggctcttgtgtttcacttgtgtttactgtctctgttattcctcttcttttctttgtgtgtgttattgtctatggttgtctcttttttgttgtctcttgtgttggttctttttcctttcctttttctttcgtttgtttattcccttgttttttatttgtgttttttttagtcatacctcttgcttctcgcctactccttttctctaccctactgcctgctgctactcgttatcctttgtatgcctctgtctgctgctgtatgcagccttctgcgttgcgtatttctggatctccttccctcctttctcgtccttaatcatgtatatgtttggccttagtcaatgtctatgcccgtcacataactagcctgatggcaccagaggtcctctactagggaagctagctgggagcttggaaacctggtctcttgtatttctaatacctggtttcttacaggtggttgtctggggtgggtggagtggcgacaggatagtagtctgaaggactatgctaaatgtaggaagtaagtcagggcgggctttgagaatgtgggtacccatatccttactaggcaaaaagtcatggctatggtgatccttttgggacacaacagcttaacgagatgaggatggacgaaaaggacggacaagcttttcatctgcggcgcttataagtcc

SEQ ID NO: 533060 - DNA, 910 bp, Homo sapiens
  misc_feature (10)..(10): n is a, c, g, or t
  misc_feature (79)..(79): n is a, c, g, or t
  misc_feature (122)..(122): n is a, c, g, or t
  misc_feature (169)..(169): n is a, c, g, or t
  misc_feature (229)..(229): n is a, c, g, or t
  misc_feature (236)..(236): n is a, c, g, or t
  misc_feature (271)..(271): n is a, c, g, or t
  misc_feature (278)..(278): n is a, c, g, or t
  misc_feature (286)..(286): n is a, c, g, or t
  misc_feature (305)..(305): n is a, c, g, or t
  misc_feature (368)..(368): n is a, c, g, or t
  misc_feature (371)..(371): n is a, c, g, or t
  misc_feature (699)..(699): n is a, c, g, or t
  misc_feature (708)..(708): n is a, c, g, or t
  misc_feature (720)..(720): n is a, c, g, or t
  misc_feature (722)..(722): n is a, c, g, or t
  misc_feature (725)..(725): n is a, c, g, or t
  misc_feature (754)..(754): n is a, c, g, or t
  misc_feature (757)..(757): n is a, c, g, or t
  misc_feature (790)..(790): n is a, c, g, or t
  misc_feature (818)..(818): n is a, c, g, or t
  misc_feature (843)..(843): n is a, c, g, or t
  misc_feature (883)..(883): n is a, c, g, or t
gatgcctagngaaatcatcaccctacatttgggccagttcggcaatcagattgggttcgagttctgtaaacagctgtgngccgagcatgtgtatcatccccgagggcatcgtggaggagttngccaccgagggcactgaccgcaaggacgtctttttctaccaggcagncgatgagcactacatcccccgggccgtgctgctggacttggaaccccgggtgatccactncatcctnaactccccctatgccaagctctacaacccagagancatcttnctgtcggnacatgtagtaggagctgtnaacaactgggccagcggattctcccagggagaaaagatccattaggtcatttttgacatcatngancgggaggcatatgtgtagtgacagtctagagggctttgtgctgtttcactccattgctggggggacaggctctggactgggttcctacctcttagtactggctgaatttctggtatcttaagaagctggtgtagttatactcagtgtttcccaaccaggtcgatgattagcgatgtggtggtcctagccttacaattcactcctcatactcaagaggctgacgcagaatgcagactgtgtggtggtgctggacaacacagccctgaaccgttttgccacagacctcctgcacatccagaacccatccttctcccagatcaaccagctngtgtctacnatcatgtcagcnancancaccaccctgcgctaccctggctacatgnacnatgacctcatcggcctcatcgcctcgctcattnccaccccacggctccacttcctcatgancggctacacccctctcactacggancagtcagtggccagcgtgaggaataccacggtccttgatntcatgaggcggtgctgcagccaataac

SEQ ID NO: 533061 - DNA, 1070 bp, Homo sapiens
  misc_feature (136)..(136): n is a, c, g, or t
  misc_feature (310)..(310): n is a, c, g, or t
  misc_feature (313)..(313): n is a, c, g, or t
  misc_feature (315)..(315): n is a, c, g, or t
  misc_feature (363)..(363): n is a, c, g, or t
  misc_feature (365)..(365): n is a, c, g, or t
  misc_feature (386)..(386): n is a, c, g, or t
  misc_feature (817)..(817): n is a, c, g, or t
ccccagtgggtttttttaaagtagattttaacaaaaacggggaaataatgcattctgtggaaacagtcccaccgcctcctccattggaacggtatctccctgccatcagttgtctgtcgccttctccgcgcttcantaaccccggcattttagtggtttcacctgaggcaaaagggaggggacaaagggccctgccacgtcccgatgcctcctgctctctggaggtactgagacagggtgctgatgggaaggaggggagcctttggggggccacccgggcctggacctatgcagggaggccacgtcccanccnanctcttgtttctgggtccctgctcccctttgggggtgtgtgtgtgtgtntnaattttctttatggaaaaatngacaaaaaaaaattagacgagagaggtattaaactggcaataaatgtggccccatggtggccccgggcttcaagaaaacaaataaaaaacaaaaaaaaaacaaaacattttggtgggccaggcatatggcgcctagggagaacggttcttatagagagacaatttgggtgggggcgccggagggcccacaagataaagacactgggaacacttgggctccaaacaggggaggtcccaaaagggcgacaccccgggggcacagagaaacaagagcggcgggggaaattatcacaacccaaataaaacaaaagagcgcgcggggcgggagacacaccccgggccgcgtgtctagcagacacaatattcccagagaaggtggaagcccagagaggggaccaaacaagacgcggggagaccacacaacaccacgngggagaggacaccaaaagcggagaagtccccggagaaattacaacgaaaatattaaaggccccgcacggcgcgggggtgggagaacccacacaagcgggagacgacagacgaggtatacgccaaccagcgcatcagacaaaagatgacacgatgacgacgtgcgggctaacgacactgatggagacgacgagcccacccagaatacgaagagcagacacgacacacagctcggcatcggacagagcatacagc

SEQ ID NO: 533062 - DNA, 351 bp, Homo sapiens
cctaagagtttcaccaattcctattttgagtgcgtctatcaatagtagttaccacatttgccgaaaggcctcatcaacacctatggatacaatcacatgccttatcttcttagatggattcatatggtgtagtatttaataggctttctaattgaaccagttgcaatcttaaattccacttggtcatggtttattattttctcaatgtggttttgtattatttgctaatatttaacataactaatttgaatcaatataattaacactgtaatttttcattttggtggtcttttatcacattttgcttttaacttttatttatgagatggagttttgctcgttgcccaggct

SEQ ID NO: 533063 - DNA, 594 bp, Homo sapiens
aaatgacccgcaaattccgtcctctctcgcagcgaaaacgcccccgcgggcgccgaccccgccgccacccactccactaggccacaacgtcagaaccgcacctcgcccgcggtccgcggaagccgataaataacacgatccgggaacccgaaccagataccgaaccgggagtcctcccagcgtctaccgacgagtataccattcactatgtgccggccgacacctccgcagaggacccctaaacagacagcctaattaacctcccgaagtccgagcacctcacagcgctattcaaacagtccggtgcaactacggctacagtcgcccttcgcgcgaaaccgccacttgtctataaccttatataatacatgagttggaagtacaaagcgcaaagttcggggcgttcaacgagcgagtcaatctataccaaccgtgccgtgtctatcgtttgtcccttagctgggaaattcgctgcgttagtcgtaccaacgaactggttaatgtgaattttccgtggttgtttgggttgctgattaacctctacgcccgatagtccactactgaaccctcgttacctacttgtccaccactatc

SEQ ID NO: 533064 - DNA, 905 bp, Homo sapiens
tacctgggcgttttctcggtgccccaatctcgtggtacactattttgggtattccccaacaatcacccgggtttctctcaccattactggggcttgtcaccaccccgatataacccgctggccccccgagacataggtcaagcctccgatgtgttcccacacgagtgtcgaatttgcaccgcgttttacacacacgagtccacagcttcctccgacagttccaccgaggagcaggtgccccccatatgtacacgtggtttctggataaagccccgcgttctacaccctatggcgcccacaaatggtcctgaaaaaaacagggcatctctaatacttttgtcccaccaaaagaaatgttaatttttttttaaaaaagtaataattactcgcccaatatcttaaggcgttacctctaaaaacaccaccactccacacgcatcaatctcgcgccccccaaaccaattttgtatttgttggtcaaagacaccacccccctcaacgttggccgtccctctggtggacccatcctttattgcgagagcacaaacaaaaactcacctctgacaattcttctgtgcaaaacatctgtttttagaacccacccccacgtattcggggtcctatggaagcgacagatttcctcaataattccattgaaggcaccccctcttttcaattggtttgtcgtctgtaggctgctcccccccgggtgtgttcgcggccatgttcccacccccgagtcttacgctctgcccagaactctggtgggaccaaaatttcgtacccacccgcaggtcgctgtttccccccgcgctaaatgcggctggcactaacaactgatgtttcggtgaaatatttcgggcttttggaaagaaaacatttaaccaaattcgcccaacaaaaca

SEQ ID NO: 533065 - DNA, 176 bp, Homo sapiens
  misc_feature (38)..(38): n is a, c, g, or t
  misc_feature (54)..(54): n is a, c, g, or t
  misc_feature (74)..(75): n is a, c, g, or t
  misc_feature (84)..(84): n is a, c, g, or t
ccccctccgccggggccgccactatctggggttgttgnggaggatctccagccngcaggggcaggaggtgatgnnctgccgggngtagcaggcccccacccttggcgaagctgatgcggacgctgttggggtcgtagggccgtcggcggcgtcgggctcgggcgcgtgctgcaggc

SEQ ID NO: 533066 - DNA, 168 bp, Homo sapiens
gggcagcaggcgcaccagccctccgaaatagcagaacgacgcccgcgagttcgtgcgacctgtacgtcccgcggaaaatgctccgctagcaaatcgcatcatccgtgcccaaggaccacgcatccatccagatgaaccgtggcccaggttgacaaggtcacaggcaag

SEQ ID NO: 533067 - DNA, 213 bp, Homo sapiens
aactattacagcatacactattacagcataaactattacagcataaactattacagcataaactattacagcataaactatttgattaagtgcaacatgattttttttttttttttttaatatttgacattaaaatttttattttgtgaaacaatgcaagcgatttaaaatccccacatcctatttgattaagtgcaacatgaatagtttatg

SEQ ID NO: 533068 - DNA, 468 bp, Homo sapiens
  misc_feature (2)..(2): n is a, c, g, or t
cntgaggtgtgttctcaagtcatatattataattcatttcactcaaagtatatgattaaagctcattcaaagccctaagagttgggaatgaaggaagaattgtaggatgttctgctgtgccacaagacttaatttataccatttattagtcttaccaagtacattgaaaggaaaaagttgttgggggccaggcacgatggcttacatctgtgatcccagcactttgggaggctgagtggggcggatcacttgaggtcaggaattcgagaccagcctggccaacatggtgaaaccccgccttattaaaaatacaaaaaattagccagctgcagtgacatgaacctataatcccagctattcaggaggctgaggcaggaggatcgcttgaacccaggaggtggaggttgcattgagctgagatcatgccattgcactccagcctgggcgatagagcgagactctggctca

SEQ ID NO: 533069 - DNA, 118 bp, Homo sapiens
gagtagatggtccatggacaaagaaggaagagtaagggcctccttcctcccctgcctgcagctcgcttccacctggcacgtgcctgctgcttccgtgagagcccggacctctcacctc

SEQ ID NO: 533070 - DNA, 766 bp, Homo sapiens
  misc_feature (562)..(562): n is a, c, g, or t
  misc_feature (569)..(571): n is a, c, g, or t
  misc_feature (578)..(578): n is a, c, g, or t
  misc_feature (592)..(592): n is a, c, g, or t
  misc_feature (622)..(622): n is a, c, g, or t
  misc_feature (627)..(627): n is a, c, g, or t
  misc_feature (635)..(635): n is a, c, g, or t
  misc_feature (639)..(639): n is a, c, g, or t
  misc_feature (642)..(642): n is a, c, g, or t
  misc_feature (648)..(648): n is a, c, g, or t
  misc_feature (664)..(664): n is a, c, g, or t
  misc_feature (675)..(675): n is a, c, g, or t
tcgttattattaaaaagggaaaaaaacatgggttctggaattgaaaaaaaagaatatgacccccattcttgcgtcttagtttgggttctttttggaactgtctcaaaccttagtggggaaagtgcccttacccccagtttcttttcccaaaggttccgcctgctggatacgtctcctgtctcaaagtcaaaaggtttggagcaggtttcctgtttccatctggggttttagtaaccaattcaataatgcggctagaaacccctcctttcaagccaccagtttcctaattggtgtccctgctgcagtgggggatgaaaacacattccctttctcccacaacctcttgatgttgcgtcacccttcagcaggaacaggaagatccgaggctcccggctttgtaggttttgcgctttttgttccctcaattgcactggtatactgctccagtctgctgtcaatcttggagactattgctgcttgatgggtcgatttgacaccactgcttttctgcacagacttattcaaaaattctgctcgctcttctatcttgagagatgaaccnttaggannnaaacacntgaatggtttcttntcatctgacaagccatcttctggcatcttntggcntttctcancagnttntgctcntcgcctttcaatctcntccttagcctnctcttctcttcctcctctctgagttttcgatcggcttcgtcttgcttccttctctgatcctcgtgccgaattcctgcagcacgggggatcc

SEQ ID NO: 533071 - DNA, 935 bp, Homo sapiens
ttccggacaaggcaatgctcaaccaagaaccagtggcaatgaatatcgggatcccgtgacaatgacgcacaacttttgagccgtaggggcaaccaactgcaagtgcgcaaaggttgtaccgtgttacaagtgtgccctatagttgtcgtacacgaactaaaagttatcctttggtggtagaatgaattcaaaaagaagcgttttaaaaagttcacacacggcctaaggaattgtctagtttctcgacccaggttttttggcgtactttctggccactccattctggtgtgccaacatttgggccacaaatccaccaaaccgctctttggtgaactgtgtgtgccgtccgccacttttgggttttgtccgtggaagacccttgaggccgcttaaagaagtccgtcctatctttgggggaaacccaacataatttgttagggggttttctttccctgaggcgccccccgcgccggcccctgttatgtgaagaaaatataatgggaattatagcacgcaaaataaatccacgctcacactgtgctgcgaaacaatatgtgtgaaagtaaataatttggggtgtagatttattaaacccccgtcacggcgccaaaaatgtttttaaaaaaataattaaattctataatagtttaactccacccctttaatgaatgttcgccaacacaatggccaactgaatttgtggagattttaaattgcaccaatgtgtcacttttatatcactactcacttggaaaaccacccttgaccaccacacccacccacttcgaatataggaattgtgggtaattatagcttgttaacccccggtaattaattctgctatattgttaattttcccccctttatttggaaaaagccccccttttaatttttttttcccccaaaaaaacccacccttgggttccgaaaaaaaa

SEQ ID NO: 533072 - DNA, 250 bp, Homo sapiens
tagaggatccctcccgactagcgcgacaggaggactggtcaggaggagacttagggcaggaggacgggtcagtgaggagttagggcaggaggactggtcagtggaggagttaggggaggaggactggtcagggaggagttaggggaggaggactggtcagggaggagttaggggaggaggacgggtcagggaggagtgagggcttgtcgggctagtcggggaggtcgggggctgacgggctagtcggggg

SEQ ID NO: 533073 - DNA, 199 bp, Homo sapiens
gactctaaggatcagcccacagagagaggatagcacatgaagagtgcggaaaacaaagatccaaagacctgctgacgagactgaagctgactaattggtctgagactgacttctccccatccctttcttaaatatccaaagactgtactggccggtgtcattttatttttttcccctcctgacaaatattttagaagca

SEQ ID NO: 533074 - DNA, 360 bp, Homo sapiens
ttcctctaccgcgccatctttttttttctctctgtctgtcccgtgggaatttagtcacttcagaggctttttttccccacaatttggaacttcctttggatttgatcaagtcatatagagttgatcaaatccagtgggaaaaagaccgaaaaaacaacaaaaacagaaacaaacaacaacaaaacagttaagcaaaacaaatgatcacacagtttatatgattactgagtgctctgatggtaaggagaaattaagaccagctggttgttaatctttagccaaagcaaaccacagttcagttacttacctatgggtgggtctcaggctgataattgctctataccatcctagaagcgggtt

SEQ ID NO: 533075 - DNA, 413 bp, Homo sapiens
  misc_feature (14)..(14): n is a, c, g, or t
  misc_feature (53)..(53): n is a, c, g, or t
  misc_feature (125)..(125): n is a, c, g, or t
  misc_feature (214)..(214): n is a, c, g, or t
  misc_feature (250)..(250): n is a, c, g, or t
  misc_feature (264)..(264): n is a, c, g, or t
  misc_feature (296)..(296): n is a, c, g, or t
  misc_feature (344)..(344): n is a, c, g, or t
  misc_feature (390)..(390): n is a, c, g, or t
  misc_feature (395)..(396): n is a, c, g, or t
tgcgtgaacggggncgacgccccaccccctgtggaagtggattaagatccaancccaagggcaagggcattctgggaaatgccatcaagtggaactttcccaagttccttattgacaaaaacggntgggtggttaagcgcttcggacccatggaggagcccctggttataaaaaaggacctgcccccctatttttagctccccaagtgtgtggncccgcccgagcccctgcccacgcccttggagccttnccccggcacttatnacggcctgcctgcaaacctgttggtggggcanacccgaaaattcagggtgcccccccccggaggaaggttccatggcctnttggggttgggttggggcccccccccctgggtaccttgtgggaatnaacanncaaattagcctgttgga

SEQ ID NO: 533076 - DNA, 260 bp, Homo sapiens
agtaattattaaaagactttaccatggtgggtaaatacttgggctcagacttatctgtattttctttctttctttttttttttaaaaaaacttttaggttcagggctacaagtacagggtggttacatagataaactggtgtcacaagggttggtggcacagattatttcatcacccaggtatggagcctagtacccattagttatttttccggatcctctccaccttccaccctccaaaaggccccagggtggagagag

SEQ ID NO: 533077 - DNA, 1417 bp, Homo sapiens
catggaaacaagactaccgaaagtggtctgaatttcatgaagaccaagtggaccataactcttacgtaagaccacccatgtccataatgaaacggtgtagagactatgatgaaagagggttattgtgtatgagaggagtacatgtgtccttttgactctactggtaagtgatccagtagcttgtagagaggatgtgaagtcttcctggttgatgctgcgctttccgcgagctacatgccgtcctgttgttgataggaccagcctcctccatggagcgtcctcgccctaactccagcgcaggttctttgcaccgtgctagcctggtgattgcgtcaatggcacgcctcgagtgtcgcaccggtgcgaagcggtcgctagttcgtccaatccccgacgttcatcccactacgctgattcaaccagcatagattattttgcgttaatctcttctctgggtattattgatcaaggtagacgaacgctaatcttgccgagctttccactgtccctgtgtggacggagtcgccatttcgtgggtcacttgggacatgacttccctgtcaccagatagcagtcttgcttgatcccaaggatgcgtgttcacgaagtcacatgtctcagggtggtcccactctggtgcatgtgtcccttctatccgacggatctcatctctgtctcccctaggcatctcttaaccccggtctcctcggtatgtaaatactgtggcaaacgtataatttatggaggatcacatttaaccggcggaggcaattaacaattgttgtagcaaacctattgaccctggggccataaccggaactcaccgatgaaagggccctcccaagggcaggtaaggacaggagagccagcggattttgccccaggaaacccaatagtggttaaattccggaagcggacaacagaaggttgcccgattggcccaaccacacaagggtgcggccctaggaccgtgtggcacgtacgtcgaacggtgaaacctgttccaaggggtggcacttacttggagaaatacaagggcgagccacacgaggaagctgggatacatggaatgtccccaactttaaataggccacggtgaaatgaaggggaccttaggacaagggggaagctcccaagtaatttcgaccgtaatacagtcaaccggatcgggaggtcaatggatgacagcccctgggcgaggtttccactaccgacagcaactgggacgtttggatatggaaataagggccgcagatgttattaaacaatatacacaacaaacagcgacgcgagggcttaccagcaaaatgaagcgggtccaccctcgtgtggccacagatgatatacaacaccaccggggacttgagccctatgaacaaaaggatagccaaccggacaaatcgaaacagccatctca

SEQ ID NO: 533078 - DNA, 242 bp, Homo sapiens
cattggtcgagagaaattagttgtggctatgaaaatgattgaggatactactataagagatcaggttcgtcctttcgatgttgtgtatgtgttatcatctgtctggaggttagtttgattagtcattgctgggtggtgactagccggtcgcttgatgagatatttggaggtggggatcaatagagggggaaatagaatgatcagtactgcggcgggtaggcctaatttctctcggaccaatg

SEQ ID NO: 533079 - DNA, 602 bp, Homo sapiens
tgggcgtcccaccacgcatagcatggaatggcaggaagggacaaaagcctgttccatgagaccctgggaggaccccagtgcaggtagagcccgcctgcctccaccctttccaacgagccatcttggtaactgggaacaaacacaccccaccccgtttttccttaaaagaggccttaatccccgagcccccgctgccagggcacgagtggaggagggggcaccagctgtgccaagccctggccccactgcgtgtgtccatcacgaatgtgactcccatgaacatgccagcacgggaacaggagtgcttgctgcagagaatgcagccccagagcagccggcgctccttaggctgtgtgcagcatggtaggggttaaactgggctgagctgttcccaggtacaactgaggctcggcggaggggcaacggacaggcttggcctctccttcactgtccacagggccttgggttcccctgagctgtccagaccccaccatctcccggagcccatggaggtggccattgccagaagcctgtgggtatcctttctagcttgggggattaaccaaacaaaattctccactccttttacctcttgagtagac

SEQ ID NO: 533080 - DNA, 177 bp, Homo sapiens
gagtaaggcacatgccacacaccaaacttgtatgtgtgtgtgtgcagagatggggggtgtgtgtgtgtgtgtgtgtgtgtgtgtgcgcgtgtgtgtgtgtaccacattttctttaacctgtcattgatgggcatttagattgattccgtgactttgctattgataatagtgcccagt

SEQ ID NO: 533081 - DNA, 358 bp, Homo sapiens
tcatataccacacaacatagataacagacattccataagtcttataaagatgtaaaatcgaaagtattagccattaattcaaactacccctatcattaaatcacgttcaatagggaggagggagataaaccacagagaaaaatccaagagactagtacgaaggcttaaagaacagattgcttgtagagtgagctttagtaggatggaatgttatatccatttggacttctcagatttgattcctccttggctttacccacatgaaactgagccagctttcctacacatcactgtaacccatgtttacgacatcaactcaccacacgtatttcgctaacttgtctggcccagcctcagt

SEQ ID NO: 533082 - DNA, 1012 bp, Homo sapiens
ggtagccgcccgcggagaatcgaagccggccgggcccccgaagctccctcctcgcgtccctcggtgtccctccgcgggccggggcaatgcgagtggcccggaaggaccgcggcgtagggcgggctggctcgctgtttgtgcaggccgccggaggccgggccgcccggacaaggggccgggagggaaggttggcaaaaaacccgggttggggagaagccggccggaagggtcaataaacgaccccgggaagagacctgaagggggggcgtcacccaaggagaagctgctttgtgggggtcacacattttgtgttaacaacctccggggcccacgagaagaaaaggggcgggacaaaaaacaggcctgtgggagggcggacatccaatgaaaggcacaacgtccgacgtggggacccccaggatggggattacccctccaaggtggcaaggtgacacgcccacgagtacgagggcacactaccaaattgtctcttaagaagacatttgcgccgtgttgccaaagaagagccaaaaacccacgtgtttggtctggcacacttttgtctcacaacaccgtgtggcagccactacggtgcacctgtggcgatgactttataccctttcacaattgttttatagcaacggggtgagcaaatgcgcacttgtggatgacaccaccccgtgggtcttcgtgtacgtgtgttgcccacacgagacgagggctctttgagaggaaggtctcatccatttagaagggacacgagcgacaagcgctgtgttgggacaacagaggcttcaacacgggtatcgacggctccccggctgtgagttcctggacacactcactggggtgagaaccactccgtaaccagaggttgattattatcagcgggaattggtacttccagcagtcttgtgaagacactgtccaacacagcgggcacgcgcctgcgtagttggggccgacactgttgggcgtgacacacgggggcgaccccacacgcccatgacga

SEQ ID NO: 533083 - DNA, 183 bp, Homo sapiens
acgcgcacgctggccaaacacaatagcaggtgtgctagttgacaagaatcctgggttactaggtgtcttagcagaagcgtgattgcatccaaagcaaatgagcaccgaaggttatgttatcttctaaagctgtataatacgagcacatgctctcgtgaagtcagattgaccaagtatagggaa

SEQ ID NO: 533084 - DNA, 330 bp, Homo sapiens
cggatcgaaaagattcagaaaaaactggatggttgcatctgtactgaacacgtatggacttttttttgcttgtcactgttccctaagcaatacagtataatagtaatttacatagcatttacgttgcattaggtattataagtaatctcgagattatttaaagcatgtgggagatagagccaggcatggggcctgtagtcccagctacttgggaggctgaggtgggacaatcacttgagcccgggagttcaaggctgtagtgcaccatgattgtgtctgtgaatagccactgcacttcaggttgggcaatgaggagactctgcctcttta

SEQ ID NO: 533085 - DNA, 363 bp, Homo sapiens
tcattaacatagaatatctttccatttttgtgtgttacttttttatttctttttcagattaatcacttttggcatataaaaatacgtactaatatctgtatattgatgttgtatcccatgatttactgaatttattagttctcatcattttttatttgctgcagtctttattttttccaaatataagattatatatgcatataaggataatttgactccttcctttccaatttggacgctcattatttctttatcttgtctgattgctctagctagaacttccagtactatgctgaataacagcagtgaaactgggcatccttgtcatgttctcaatcttagagaaaaggttttcagtttttc

SEQ ID NO: 533086 - DNA, 167 bp, Homo sapiens
gttttcaaatctttcaaccgccgcagccccactcgttttgtgcttttgcgcctttcctccctcccgcggctttggaggccggttccggcccggaaacccggaacctcaagaaggcgggtcacctcttattttccttggaggcccttagagttgcccggaagagaaga

SEQ ID NO: 533087 - DNA, 235 bp, Homo sapiens
ataatttatggatagactgtagcatacaaagcaaagcgaaagaaaaagaaacaaaataagtctcatgaaacaaaatgtttggctataagccaaaataacctaaattttatttcttaattagataatatacacaatatatctgcactcagttatatataagattaagagtgttcatgcactgttcccactggaacatatcaaaactgattttatttcaggtcatcaattgtcacat

SEQ ID NO: 533088 - DNA, 1533 bp, Homo sapiens
  misc_feature (115)..(115): n is a, c, g, or t
  misc_feature (128)..(128): n is a, c, g, or t
  misc_feature (149)..(149): n is a, c, g, or t
  misc_feature (307)..(307): n is a, c, g, or t
  misc_feature (317)..(317): n is a, c, g, or t
  misc_feature (340)..(340): n is a, c, g, or t
  misc_feature (1533)..(1533): n is a, c, g, or t
ggcttgtgctgcagccggtgtctcgagatagatccctgatcaagttccgagccgatatttgtggcgagtactacaaccgacggcaacgattcgacactgaggtcaggtgggcaanacatgagactctnatgccaatgccacgtgcgcantctgaagggatgtgagagccagtagagaatatgtctcgatgataggaggtctggagggaaagactgaggacaatgggaccctctaatcaagtagggccggggagcaactttcacatgagcgagtgcagagctgtgaaccggtgtgcagtctgcgctantctactcgcnaaggaatcactcactgccctagntgcgaaagaattccgcaaggaacctaggctatcgttagatactggtacacgtaatgcgattggtaatagacgggcatagggaacaactagcagaccagtgattccataagacacacatggagtcatgggagcgaaccaaatgtctacgcgctgtgaacgagccgtggtgagtccgatgcatgtaggtagagcagtctcggggtgctcagtaggagagtgtctgacaggtcaagcgtttcttgtcgcgaccgtaaacggtggtcccgaaggcgcagcagacatgcaagtatctaggtgtggtcagcacgttggtgctggtacgcagtacggagttgtagttccgtacaggatagtataatccaaagtccttggtgagtgcccttatgtgctggtctaacattaaatagagtctagataatacatatagaaggacaaattgtataacgcgcaggggcgagccacatataccatgcgagagcgcaggacataaggcgtaacgtaaaccgcaagatggccacgctaggggatcaaggagcccgagaattcccgtgggcccgggaaattggttgtagcaaccaaatggcggtgggaggccctcagggggcggaaacaccgccacataagggtggacacacccgagaattggagaaaacggtcgaaacacgcgccagtgggatagggcaagggtctatgagaatccccgcaggcagaacacagttagaaaggctccttgggagctttgggatcccttaaccagaccaaattcggtgcacacctgaaccaaagcgccttgggcgccttgggcctcctcccaggagtggtctctacccaaacactgggggggggaaatggggaacagtggccccctgggttgggccccaagtggggacaacgggggggtccacaaaccccgggattgtggcgggccaccccttgtggctccagggcaacgggtccaacggggaggataaaactcgtgcgaatgcccccgacgagcgtgacgaaagactctccggggcaaagggggcaaggcaaagtgcgcgcacgaagctacccgaacgctggggtgacagcaaaacccccgcagaggtcttgaaggatactcaccaaacagacgaacgccgtgtcgaccacaagcgggaataaccagaccacacaatggtcggcagctcgggcagagacggtggctcagn

SEQ ID NO: 533089 - DNA, 472 bp, Homo sapiens
agagtagcactttaccagcaaccgaggttagcaaccactgatgccatacaggaagtgtccatatgtaatggactgtttcttccatgcactcaatctacccagaggagttgataaactcagtgaggactgcagtagtccctatactacacaactgtaccggccaagcctggtccccttcttgttgggcactagtgtatgggcggagaaaatccagcttgtacttgcttgatgacgcagaggtcaatgtttgcttccggagcccaaggtcgtagaagctgccagctgcgatggctaacgcacaccagatacttggcttcctcctccatgtctggcctaaacttatcttcaaatacagacattagctgccacggagccagaacccatggtgacataaggcaacttatcagttgatccatgcggatagatgctgtagaggtagagggccaaatacatctactcaccctacaactag

SEQ ID NO: 533090 - DNA, 106 bp, Homo sapiens
acgacagacgcaaacatattttagggaggcaagtcaaccttttaagacaaatcatgaccaggggataagaattggcattgacccgaattatatgtccaggaattgt

SEQ ID NO: 533091 - DNA, 894 bp, Homo sapiens
tctttttttgagcaagaagattaagagaacgagacaggagatcacgaacatacctgctccgccctgttgccctatttacatatagctctgcccaaatgcgtccccccgaggcttacccgccggttctcaggcgcccggtcttgaccgccaattttttctggaaaaaggcgtagccccctcttaaatcgccaagggtcaaaaaactgtgtcgcgcaattttacggatccttaagcccacatctacgccaattttggaccctttaagcgttccttaggaaagcaaaaattagcggttttatcacaccacccggctgtcaatcataaaccttctctccccggggaacacagtcgtgtaaaccgttgtgggagaatggcctccggcccccgtttatccccccacattagggccgccaactttttagatttaaaaggaacgggtcattttcagcgtttaagccattggcgttttacaaagtggtagggggtcgaaaatcatttatgccgcggccttctcttttaaagagaggattatacaccagaggtagcttcctataaaccccttgacactcccaagccccgggcaggattggcgcaccttaaacccgtgcatgccgcattgctatctcgccgaggtcatcaggggaaagacatctattggggcgggggacgggtgaacccaccttggggagagaagattaacagatttgcgaagtggcgatactcggcgagaagcagagcagaatatcggggagaggtacgatagaaagagaattagaggaatcattgcggagagttagaagagcttaataccaccgctcttcttgcaaggataaaacagatagacaacatttcaacccgcaattggcccaaaaaaaaacccaaccaaaaacaaaa

SEQ ID NO: 533092 - DNA, 368 bp, Homo sapiens
  misc_feature (8)..(8): n is a, c, g, or t
  misc_feature (33)..(33): n is a, c, g, or t
  misc_feature (81)..(81): n is a, c, g, or t
  misc_feature (137)..(137): n is a, c, g, or t
aaatccantattttagagtataccctgcctccngcctataaagaaaaagttaaacctgtaaaaccagcccctcagatgggnccctttagccaggtattccctagaagaagagattatccatagaagatgacctgccnctgtgtgtgttattgccccctgaataccctccccgtgggatgagataaggaggtgaaagacagtgactttgatgatcctgacactgtgtaggtctaggctgatgtatgtgattgtgtcttagattttaacaaaaaagtttaaaaactaaaataaataattttgaaaatggaaaaaacttatagattataaggatacaaggatataaataaaataatttgtagagctgtgta

SEQ ID NO: 533093 - DNA, 851 bp, Homo sapiens
aattcggcacgcggaggaagcagaggaggcgggtgtggagattgaagctgggaaagagaaagtttctgccgtgtgagccaatggtgaacccctgccccctgccctccaggaaagcatcccttttgcagtcgtgggatcatgcgaggtggtgagggatggcgggaaccggccggtgaggggacgccgctactcctgggggaccgtggaggtggagaacccacatcactgcgatttcctgaacctgcgacggatgctggtgcagacacacctgcaggacctgaaagaggtgacgcacgatctgctctacgagggctaccgggcccgctgcctacagagcctggcccggcctggggctcgcgatcgagccagccgcagtaagctttcccgccagagcgccacagagatcccgctgcccatgctgcctctggcggacaccgagaagctgatccgcgagaaagacgaagagctgcgccgcatgcaagagatgctggagaagatgcaggcccaaatgcagcagagccaggcccagggcgagcagtcagacgccctctgaggccacgccccgcccggccttacctcggctccgccttcagtcggcctcttgtccaatccccgcgccccacactgcccagcgccccccgggacctccgcgggtgccgccctcgcgcgggctagggggaggttctcccagcctgagtccgtagccccgccccggcgctggtcccgcccacccagacaccgcccacttcccggcccggggcctgcacaatctccgaccgcatcactgtcttccggagtcccccttcttctcccagactctgtcttcaataaaaactgagcttcccgcggca

SEQ ID NO: 533094 - DNA, 163 bp, Homo sapiens
agacttgcggcacgacaccgcagtcacctgtgcaggttacacctccgccagctgctctcacgcgccgcacgagatcttgtgtggaggtcccgcctctagatgcagcaggtactgtggtggtggcatacgcctgtcatgcagcacctgacacagcttgcagagc

SEQ ID NO: 533095 - DNA, 494 bp, Homo sapiens
aacgatggtcctcagctactcaggaggcaggcatgagtatcgcttgaacctgggactcagaggttgcagtgagccaagattgtggcactgcactccagcctgggtgacacagcgagactctgtctcaaaaaaaaaaaaaaaaagctttttggggggggcccaggggttcacgcctataatcccagcatttggggaggccgaggggggtgcattacctgaggtcaggagttcgagaccagccgggccaacatggtgatacccggtgtctactaaaaatacgaaaattagccagggatgggggtgggtgcctgtagtccaagctactcaggaggctgagataggagaatcgtttgaccctgagaggtccagatccatggcctcagactctccagggatggagcccagcaatctgtttccacagccctccgggtgatgctgagggacactccagggtgaggaccatcgttgagctggggaccatcgtgggggtccga

SEQ ID NO: 533096 - DNA, 908 bp, Homo sapiens
ccccatgtctcaccacgatgatggagctacagtgggacttggaatccagatgtgtgaaggatggagggttgaagccgcactcagcttcctgccccaccagaggaagtggggagagacggcaggtgcagtgatggctggcggagtcatggacaaggagtacgtgggttttgctgctctccccaaccagctgcaccgcaagtctgtcaagaaggggtttgacttcacgctaatggtggcaggggagtcaggcctagggaaatccaccctcatcaacagcctcttcctcaccaacctctatgaggatcgccaggtgccagaggccagtgctcgcttgacacagaccctggccattgagcgccggggcgtagagattgaggaagggggtgtgaaagtgaagctgacccttgtggacacacctggctttggggactcagtggactgctctgactgctggcttccggtggtgaaattcatcgaggagcaatttgagcagtaccttagggatgagagtggcctgaaccggaagaacatccaggactcccgagtccactgctgcctctacttcatctcacccttcggccgggggtctggtggggggatcctgggggctggcgcatttagggagggctggggggtctctgccccctgaggctgggcaatgaccaatccctgggtgcaggctccggcccctagatgtggccttcctccgggcagtacacgagaaagtcaacatcatcccagtcattggcaaagcggatgctctgatgccccaggaaacccaggccctcaagcagaaggtgtgagtgatgacctctgactttgacccatgtgaagccaaactgatttcagcttagacttctttgatctggaagtggctatctggagcatggtgcatcaggctacattgt

SEQ ID NO: 533097 - DNA, 855 bp, Homo sapiens
  misc_feature (480)..(480): n is a, c, g, or t
  misc_feature (485)..(485): n is a, c, g, or t
  misc_feature (537)..(537): n is a, c, g, or t
  misc_feature (789)..(789): n is a, c, g, or t
tctacgagatgtacacccagatgaacgctgagcttaactacaaggtgtaggcatgcccactgctggacacgtccccgactcgtggccacatggagaaacaggcaaaccagaatcactgtgaatcaagtcggtgaactgcccctggcctgtgtcccccagagcagcccaggtcctgccagagtctgcaggggacagccctcgttttttaagtctttttttttttttttttgggctctattctaagggaccagtaaataatggatcttactctccaaatctccgtgggaatttccacgacagcacagactgactttatacctctcatttcagcggtggtaaaacaccgatttaacacttctaatgagctcaagctcctagggttttggggtttggtttggtggccaacgaggaacacagcctctgggggaatgggtgtcactccaccctcgctttaaaaataagcacatgatggcttgggcnccggnggctcacgccgtgtaatcccagcactttggggaaggctgaggcggggtggantcacctgaggtcgggagttttgagaccagccgggccaacaggggtgaaaccccatcgctactaaaaatataaaaaattagcggggcatgggtggcgcacgcctgtagttccagcatactcaggaggctgaggcaggagaatcgcttgaacccgggagttgaggttgcagtgagctgaaatcgcaccattgcactccagccgtgggcaacaagagcgaaactcttgtctcaaaaaaaaaaaaacagggggggngggtccactcgggcgcggggtggaaatcaaccgcaccaatgtggaaaccctttctctcaaaattta

SEQ ID NO: 533098 - DNA, 265 bp, Homo sapiens
ggacgatcacgttgaccagataggtctttaacctcccagagttgtagccagcactatgacgatagtcttgcgagatcacatatactgacccacatgcaaaggcaggctaaggcggggctcgggtactaccaactcctgccactattccggttacggtcaaactgcccaattacagtctagaaattatccccaccaaacaattagagcccatccacgtattcctcttggacaaatacctattacaatacagacttcgacggtctat

SEQ ID NO: 533099 - DNA, 908 bp, Homo sapiens
gctcacacctgtaatcccagcatttgggagacccaggccagatgagttcaagaccaatctagacaacacagcaaggccacatctctacaaaaaaaatttttaaattagccaaccacgtgtggtggcgcacacctgtagtgttagctactctagaggctaatgccagaggactggagttggaggctgcagtgaactatgactgcaccactgcactccagcctgggtgacaaaacaagattgtctcaaaaaaaaaaaaaagggaaaattttcttgtccccgagttggcctgatcttcccaagttatctccaagaaatagtattttcccatttaacatgaccctccaatcctaacgggatttggatggtttacatcagactggtacttctttggaagagttccacgtttatggaaaccttaaatccttaggccaaaacttatcaagtctcatcttttcaaaagaaaacaacaaatcctacttcggataaagcagttccaccttttagagacatgagcgagacattcgaccgtcttaaaatttgtccccataagtgattttcggcttggcccgttcgtgggcctaaaaagttcaggaaattccctacggaaggtattcccttttcgtagaaggttcgacgggttagttatacaacggcattgaaaaacccaccgggatatccggctattaacctttaagaacgtgtacacacactgtctggcaggaattctagggtggcaacaatgcgcggagtagatttaccgcaacctcccccactggtactgtgcagtgcggttagacccatgttgcgaacgcatcttatgtgtcgggtgaacacatgcgggagggcacgtacccagtgaggggggcaagagcaaaacaccgggcgccaaaatgggggcgtgctgcagt

SEQ ID NO: 533100 - DNA, 357 bp, Homo sapiens
  misc_feature (44)..(44): n is a, c, g, or t
  misc_feature (73)..(73): n is a, c, g, or t
tgggttctcccgaagcctatccatggtttatagattaagaattnatgaggtagctgggcacagtggctcacgnctacgatcacagcacttcgggaggctgaagcaagcagatcacttgaggtcaggagtttgagaccagcctggccaacatggtgaaaccctgtctctactaaaaatacaaaaagtagccagtcgtgatgacaggcacctgtaatcccagctactcgggaggctgaggcatgagaattgcttggacccgggaggcggaggttgcagtgagcctagatcatgccactgcactccaacctgggcagcagagcaagactctgtctgcaaaaggggtaaaaaaaaattgct

SEQ ID NO: 533101 - DNA, 1687 bp, Homo sapiens
gcacggcctggccccggcgcgccgcctggcgcagcgctgcgcagcctcagctctgcctgccttgccctgctctctgctgcacgccccctgcctgcgccgcctgcgccctctcctgcctgcgcgccccgcgcacacccccctctcacccaccgcactacgccccgccacacctgcgccctgacacacactgcgcctgcactcaacctgcacaccaacgcacctgcgcccctgcccccctgcgcacgggccccaagacacctcctgcctccaactccacacacctcctgcacgcctactctacctctctctgcgcccgaaaccctctcacaccctctactggccccaacgcgtgcaaccaaacgccttctcccttaaacaccgcgaacacccaagccacttacaaaacacccttgggcaccttgaaaccgcggcccctgggcgcttaaccccctcttctgcgccacggcaactacaccttgcaacttaaaaaccactactccaaaaccccacggcgcctctgcaaaacccccgcctcccttaacaccaacaaccaagcaaccctctcctacacctggcgtacaccttctcgcctgccgccacacgccccacttctggcacgccccacaaaactctccccacaagggcggcccaagcaacgaccccctccaacttggggcaaaccacatccacagcccgccacccggaatttaacacaaaacacattaacaacacctcccaccgcaccacgggggctcccttccccccaccagccccacaacaacaacccccccttaaccccccttggcacacccgctggcaacccttggaacttgcaaagcctaccttacccccacacaccttgcactcggctcaccaccaacaacacccacggcaacttccctggcttctcaaaatcacctttccacagcaccgcgcccctctccccccccaaaagcacctggaacttgcccaacaaaccctgcgatcgttgccaacttcgcaaccgactttaccagcagcgccccaccaccctggggccctcctcccccacccaccccaacttcaaaccacacgcggcctccaaagacgcccttaacccctcaccacacctaactttcccccaccgcaaccctctccccccccacaagcaacaacccaacctcatggaccccaccttaccaccaccgcgccaccctctcccctcacaccgcgcgcgcacctcccacacgcactcgccctcacccaggcgctccccgcacctgacctttccctggccaccttaaccgcccccaccttttatggcaaccaccttcccttggctccttcaacccgccaacacacctcctcccgggcctacccgcacgcgcaaaccccccccccttggtgcccccccccccacgcaacacacccccttaccccaccacacagcaacaaacaccccacggaacccccccctgggccccccttcaaccccttcacgcacgctctatgcgcccaaacacggggaccacccgggaacccttgcaaccccgctccctacatggccgccccaacaacacgcgcacaagcacaccctgtcgaacacgcaccaccccccgccacacacgaaccgccaccaccacgccccccttaaaccaccacgccctggactgccaaaagaccccttagcacacgcctctcaacaccc

SEQ ID NO: 533102 - DNA, 100 bp, Homo sapiens
ggcacgaggggacacagaggtttcagtggtttggatggtgccaagggagatgctggtcctgctggtcctaagggtgagcctggcagccctggtgaaaatg

SEQ ID NO: 533103 - DNA, 135 bp, Homo sapiens
gactacaggtgtcgtgcaaactagccttaaatggccaaaatgggtaacggaaatgactcatatccaacattgtccgtccattggacactagattcgggccatgtcccaccatacttgccatctggtctataaatc

SEQ ID NO: 533104 - DNA, 267 bp, Homo sapiens
gtaccggtccggaatcccttgcgtcgacccacgcgtccgagcctgtcctgacctccaatccccacaagatggtctctcttttccccagagtaacactatatccaatcagctcttaattttcctcacagactcttttttttgaggcggagtctcgttcagtcgcccaggctggagtgcagtggtgcgatcttggctcaccgcaacctctgcctcctgggttgaagcgatactcctgcctcagcctcccaagtagctgggattacaagc

SEQ ID NO: 533105 - DNA, 234 bp, Homo sapiens
acccagtaaggcccatactcaagttgaatagtcgcagtgtaggaccaggggctagcttccagagacttgcctgttctaccctgagtttaggatgggagagactcaagggcctggacctcagttttctgtactctgccccagctcaatagcagctgtgcatacaactccatccagaagcacctggagaactcatgccatcggcatccactgtttccgccagaaccacaaatatcg

SEQ ID NO: 533106 - DNA, 156 bp, Homo sapiens
ccaattcctacttcatggatgtgaatttgcccagggatgctataaaatcaccacggtctttagccatgcacaaacggtggttttgtgtgttggtgctccactgttcctctgccagccttaacaggggggaaagcaaggcttacagagggtgttcct

SEQ ID NO: 533107 - DNA, 123 bp, Homo sapiens
cagtatgtgtgtgtgtgtgtgtgtgtgcgcgcgcacgcgctgttaagtgtttatagcagcccctaaggtggtgctaggcctgtggttaaaattaagtcttaagggcatactatgtaaccttgt

SEQ ID NO: 533108 - DNA, 647 bp, Homo sapiens
  misc_feature (518)..(518): n is a, c, g, or t
taaaaatccctcaaaaacggtttattatacaagggagtttggagtcccgaggggcttatcggaaggattccgggtagcgagcgcgggccccagggcctccaaatcttttggggactcgcagcgacgagggtcagctaccagcaggggtccgggtcatactgggatggaggatggtcttggatctccttctgggaagcctcatccacatatttctgggtaataggccaccagggcttgggaagatgggacgggacggatagcataaatctgggcgccacgtgaccaccacccttatacacgggacacgggatggtctacaccagcaaatcggctcctggccgaagaagcaagaactgggctccagcagctggatactggtaagcggggccgcggggctcaatcatctccagggggccgcccggttcacctggatggaagaccatggccgcgttggcagggcggccacagttggtgcgctggtctctctggcggtccagaaagacctggaccggattggnagggggaccctgggacgggcatgggtccgagcgggggactaagactaaatattatactagcatttaccatctcacttctaggaatactagtatatcgggtcacacctaatatctccctagtatggcctg

SEQ ID NO: 533109 - DNA, 242 bp, Homo sapiens
tgtgtcgaccaggatgagtgaagtggataaatttggctaatgtaactctgtctcctgggttcaagaattctcctgtctctactaaaactaaaaaaattagctgggtgtggtgaatgtgcttgtagtcccagctactcgggaggatgagtcggaagaaccgcttgaacccggaaggtgtagtttgcagtgagctgagataacatcactgcaccccggcctggcgacagagcaagactccgtct

SEQ ID NO: 533110 - DNA, 218 bp, Homo sapiens
cacatcatcatgtctggtacaactaacctgtctcacgacggtctaaagcccagctctctcccttcaagattaaaattttgtgcagttggaaacgctgacacgcagtccacacgtgcacggccaccctgattctccgtgtcatggaaatgttctgagggattgctttgttcacatgggccccagcgagacctcaccctaccacctgagccactcttgcc

SEQ ID NO: 533111 - DNA, 100 bp, Homo sapiens
tatatccaagatgtcacagaggtaacttccttttgtaccttctgagctataaaacagttcctgtatcacaatgtccaataaaacataagtcagctgctgc

SEQ ID NO: 533112 - DNA, 431 bp, Homo sapiens
gatctttgatacatcgttgatgctgtgggatacaagaagttgtaaggcgcctctctatgatctggcggctcatgaagacaaagtgctgagctgtagactggacgtcgtcagacatacttctgagtggaggagcagacaataaattgtattcctacagatattcacctaccacttcccatgttggggcatgaaagtgaacaataatttgactatagagattatttctgtaaatgaaattggtagagaaccatgaaattacatagatgcagatgcagaaagcagccttttgaagtttatataatgttttcacccttcataacagctaacgtatcactttttcttattttgtatttataataagataggttgtgtttataaaatacaaactgtggcatacattctctatacaaacttgaaatagctgctgtagt

SEQ ID NO: 533113 - DNA, 367 bp, Homo sapiens
  misc_feature (286)..(286): n is a, c, g, or t
ttttccccagtccccaaaagttaaatacaggcccacttacttctttaacccaaatgatatagtttggctctgtgtccccacccaaatctcatgtcaaattgtaatccccgcatgtcagcggagggacctggtgggaggtgattggatcatggggagggatttcccccttgctgttctgttgatagtgaacgagttctcacgaaatctgatggtttaaaagtgcagcacttctccctttgctctctctctcctgctgtgccatggtaagacgtgccttgcttccccntgtgttccgccatgattgtacctttcctgaggcctctccagccatgtggaactgtgagccaattaaacttcttttctttag

SEQ ID NO: 533114 - DNA, 203 bp, Homo sapiens
agcgtagaccaaagtactgggactacaggcatgcaccgtccagcgccctgctatttttatatttttagtagggatggctttcaccatgctggctctttagtgactccgttcgccttggcctccaaagtgctgggatttcaggcaagcgtcaccacacccgacccctcactagtatttcagcatttgggtactacgctttggca

SEQ ID NO: 533115 - DNA, 199 bp, Homo sapiens
ccttcaccagaccctgactaatcttttttggaatcttttgtagagattgggtttcgccatgatgccctggctagtcttcaactcctggactcaagtgatccgccctgtctctaataaaatacaaaaattagccgggtgtggtggtggggcagaagcaggaagcagcagaagcaggaagcaggcagaagcaggaggcaga

SEQ ID NO: 533116 - DNA, 340 bp, Homo sapiens
  misc_feature (38)..(38): n is a, c, g, or t
ttagagtgatcccaatcgccacgacaaggagctgcaangagccacacagcaggaggtgagcggtgtcgagtgagggagtgagggaagcttcgtctgtatttacagccactcccctttgctcacattcccgcctgagctccaccttctcagatgagcagcagcattagatgctcataggagaacgcaccctgttgtgaaccgtgcatgtgagggatcgaggttgcgctgtccttatgagaatctaatacctattgatctgtcactttctcccatcacgctcaggtgggaccatccagttgcaggaaaacaagcttaacaacgcccactgattctacattat

SEQ ID NO: 533117 - DNA, 862 bp, Homo sapiens
acaggaacacaggaccagatacagaatgcacagtattgctgcggaacagtgtgaagcagtatgcagtatgttgacaggattctaatgcagagatattcttcctttttatagtgtgaagcagtattctggaacagtttcttctaacgacatagtgaagaactgaaggagtccgtgcactctttatatcagtgtagatctgcttctgtggtaaataagccaacatccctcgtgtgtcataggtgttctgcattggaggtgtagtgaaatcttggctgtccaccagatgtaagtgtttcagttccttacaaacagggttgggggggggaagggcgtgcaaaaactaacattgaattttgtgaaacagcagcagagtgagtggatttatatttatcgttatggtggggggtttaaaaaattccccccatgtaattatgtgtgaacacctgtgctttgtgggtcctgtaacattgggggggtgggacagggaggaaaacgtaccatagtccacatgtccctggcatctgttcagagcagtgtgccagaatgtaatgctctttggtacagaacacgtctcgtgatcttcaaacttacaattagtgaacctatttggggcatatttctcaagacagcctttttacatgggtggtaaattcccagccaacccaaattaacactagttcaattcagccccggtggctttagtgccttctgttggctggcaataatgcgaactagtctggatctgaggttgaacctgggggaaaatcacaatatcgccataaagggaatggggttgaaagtgcccacttacctctgttctggtgaacgggcgcacgggtggtttttccgcggggtatacaag

SEQ ID NO: 533118 - DNA, 958 bp, Homo sapiens
aatcctgccatagatatgacatgcgttgtctagaacaacatgtgcctttgcattcacttaacttgagcgcaacctaatactctcaaaggagaatgtcccagtctcctcccgagtccatacaggagtgaggtagaatagcaatgcgtgtacgagtccatgatgttagagctaatcgtagtaagtagatcgtgacgtctgatggcctttctcatggtggtgagtggccccgatcggatgagacgtcgtgtcccccctcgttcacccactgtctggagttgcccgcagacttggagtactgctggtgtacaaggtgtcaagctcttcctctcgcagaggtgcagtgcggagcctgctgggctcaacctgcccaagtgactggaacatcccggtgccgttggttcaaggtagtcttcgtcgtagaaagtgcaacagcaagaactgagcctatgctttcgaagtcctgagtaccccctacaatatggaagaggacacaaatgagagaatattccctcataccaaggattgtcctgaaatccaagaccatattggatgagaagacatacatcagagagagagagattccagtatgcaatctctcagcttgccaacagaaccacagatggactcgcggaacagagaaatgatccagatctgggggactggcagcactccgtcgcgaagtccggccaggacgatctgatctcgcggcccacggggaagcgcctattgatgtccatgagtagatatgttgtctttgctggctgccttgataagcacctttggtctccaggaccacctagaacatatattactctgttgaagacaacctgtaccacaatctggtccaggtgcgatcggactcacagctcaaatccatacagctaccgtgttggatcctagcatttcacagaaattacccggaaacggggagagaagcgtagacttatcccaaaaaagg

SEQ ID NO: 533119 - DNA, 268 bp, Homo sapiens
tcgcagtgctagcagcttcttagatgagggcagtcctgatcataaaccctactgcatttgtacaaaacagtagagttagcctgtcccttcctgccttatatcctgatgcttgcttctctttcttactaaagtgtcctttgcagtcttttattcttccccagaatagggcactttcatctgcattaaaaatcttttcaggctctgcaaggaacgcgtgggttccttgccagaggaggctccgtgtctgcagctaggggtaccgagctcg

SEQ ID NO: 533120 - DNA, 1002 bp, Homo sapiens
  misc_feature (39)..(39): n is a, c, g, or t
tatcttcacgtgctcctggtgagcgcaggcggatcctgngtgaccctgagctagatcggtggtattgattatcagtggtatggagttctgatgtgtgagtacgtgtgacttacgcagcaccttgcagcggaaatgccgtcgcctggaggatcctaggcaccatcagaattgtgctatgtctggtttagaacctgctggtccctagtcctaacctagcagattgctggttcgggtcgagctcactgcacatgaagacttgcttctgcgcgtcgtcgtcgtgtcccatgggagggttgggatgtatcccgtcgtgacagtgatacccgcaacatggtgggcagttcgttattgcatagttaccctatgcatgttttgcttacaggtggtattcctggtcgcacacgttgtagctaggggccaattagtttgggttttacagatacgcgcgtgtatccgagttgagtgacgtgggttattctttgaacaaacctataccttagtcactgttgatcggggctagattaatgtaacctctctcaggcctttattgatgcgctcacgctgcgccatctatactttctaagcgtacacggtaacacgctaggtattgtcctagagtgcattagtttgcacctagtgcaggctcgttctgcctcttggtatgcctctgctttttcccacgtggtcttatgagaccatacttgcattatattcccgttcagtctgaggcattctcgcctcgccggtgcacagtgtttgtcatttgggggccgttcgtcatctgcttgtgattttccgggtgccttgtcgctgagaccctgttaccgtaccgtggatgtaggtactagatccctggcattattgaccttggtgcgactccgttccgttcctggtttcttcctctatgctctgtgtgatgggctcggcatgtttatgcacggtcggtgtggtcctgcctgttcggtatgcgtggggtttgcacctttgtttcctttttttttc

SEQ ID NO: 533121 - DNA, 190 bp, Homo sapiens
agaggtacagtttagaagttcaatagcacctagttggagaagtttcaatagcatagtactctatttcagatttcctcaaagctgggctgttgttagcgagaatgaccaatttcgcttgccttgtctgatcatcttcagagtctgcttgtaccccaggcagcaatgtgctattgaaacttctaaaactagg

SEQ ID NO: 533122 - DNA, 639 bp, Homo sapiens
atgtgtgctatgacccactatgacacagcatgtgcattttctaaaaaatgccatgcaggtgtcttggggagaggtattttttaagcaatgaagattcaactgagtacaaggccccctcttggggggtaggtgaaatctctctgatgaaacacttcacagctgctgctctgaagaaattctctaataggtcgaatcgctgtctaagataatagtacttcaggcctatatatgaatattcgatcatattgagattctcatactatcatttaaccacctggaagcttaatggtgtgaagtactatgctgacagtactttatttaattgctctgacataacatggtgttcagtatatacctataatcggaaagttattactctctatggcactgcatgttatcccgattatgcatataggatcttgacctatgactctatgtatagccatctcacactaagcaatgctgttagcgcgctattaacctgaaagactatcccgatgcctctagggggcgacctgaacccaaattgccttatgaagcagtcgcttacaacttacttgccagcacttacagcaccaatgtctgggaataccgtggtatcgacattcgtcatgtggcatgccaccatttgcacagtcg

SEQ ID NO: 533123 - DNA, 473 bp, Homo sapiens
  misc_feature (232)..(232): n is a, c, g, or t
  misc_feature (378)..(378): n is a, c, g, or t
tgaaggcttgaagaggaaaaaataaagtttacatactcttgatgtgaagtgcatttaaatgtttgttggcttgttgcagttctatgaaacagagctgttaataatggttatgtggattactgtgatttgaaaactaaattcacaataacttacctagtagagatttagtgagttgtttcctttacagaattcttacacctacatatttttaatacgtaaacaggggatcacnttttcctttagcattcagacatgacaccactattctttaaatcatacctcctctcccgtgaagacgctgtttcgtgtagtgatcgccaatatttccttttctcagggtaaagtgtagtcctctcctctataaaacaatgaaattangacacctaatcgctcctcacatttctttatatactttctacacaaataaacaaaaaacacaacacaaggtgcgcgcctgctcctagcagtataca

SEQ ID NO: 533124 - DNA, 540 bp, Homo sapiens
  misc_feature (16)..(16): n is a, c, g, or t
  misc_feature (32)..(32): n is a, c, g, or t
  misc_feature (45)..(45): n is a, c, g, or t
  misc_feature (48)..(48): n is a, c, g, or t
  misc_feature (53)..(53): n is a, c, g, or t
  misc_feature (74)..(74): n is a, c, g, or t
  misc_feature (77)..(77): n is a, c, g, or t
  misc_feature (81)..(81): n is a, c, g, or t
  misc_feature (84)..(84): n is a, c, g, or t
  misc_feature (86)..(86): n is a, c, g, or t
  misc_feature (97)..(97): n is a, c, g, or t
  misc_feature (122)..(122): n is a, c, g, or t
  misc_feature (127)..(127): n is a, c, g, or t
  misc_feature (152)..(152): n is a, c, g, or t
  misc_feature (157)..(157): n is a, c, g, or t
  misc_feature (164)..(164): n is a, c, g, or t
  misc_feature (175)..(175): n is a, c, g, or t
  misc_feature (182)..(182): n is a, c, g, or t
  misc_feature (207)..(207): n is a, c, g, or t
  misc_feature (213)..(213): n is a, c, g, or t
  misc_feature (217)..(217): n is a, c, g, or t
  misc_feature (219)..(219): n is a, c, g, or t
  misc_feature (222)..(222): n is a, c, g, or t
  misc_feature (232)..(232): n is a, c, g, or t
  misc_feature (273)..(273): n is a, c, g, or t
  misc_feature (279)..(279): n is a, c, g, or t
  misc_feature (326)..(326): n is a, c, g, or t
  misc_feature (329)..(329): n is a, c, g, or t
  misc_feature (331)..(331): n is a, c, g, or t
  misc_feature (338)..(338): n is a, c, g, or t
  misc_feature (371)..(371): n is a, c, g, or t
  misc_feature (373)..(373): n is a, c, g, or t
  misc_feature (380)..(380): n is a, c, g, or t
  misc_feature (425)..(425): n is a, c, g, or t
  misc_feature (445)..(445): n is a, c, g, or t
  misc_feature (526)..(526): n is a, c, g, or t
tgtataaaaacggcanattctttattttgcanactttaatttcanaanaaaangaagaaaaaaaaaaaaaccanaanacanaananccaatcctgcngtaaagagtagagagggaatggggnttganacccttagtttactgccttcaacanaaggncaggggngggaaaaaaanactaganaccagcggggggggccagggggganaggggnactngnggntgcggtgggngcccatggggacactatacaagggcacaagttttccaactntgaacncctaacctaatcgacttcttccatgcgagaggcatccccatcgcccncgngnggggggntctcatcaggaactgcagctttgggttcctctncngccactncatcttcatcaatacctagacctagcttgatcatgcgaaaaaggnggttggggtgggtttggggntcctcaagggaaaagccagaagaaagcagggcggtttcaaacagcagccccaccaggtccttaactgccttatcatttttntgggcctcagcctt

SEQ ID NO: 533125 - DNA, 403 bp, Homo sapiens
gggtgcacttgttggatctaagagaaggtacggcccatgctgagtgaggatgggcttgtgtagacgggcaggcgggcagtcggtgagagatgaccgttgctacagccagcaacatgtcggagccaatgacatcggggggggtgataatgtcccagtcttctagggaggggctgtcctcggagggccaaatatctacaggcaatcgcaggtaatggttcgtcatggcagatggcaaaggctgtgcttagaggtcccaggcagatcgaagtgagaggtaaatttccttgtactagcctggtcccggagccaggtatcgtgatgccaaagttcttctccccactcaaatcgaggggtcggatagatggattgtggttgcaccctgtcgagagaatgtgatgggggg

SEQ ID NO: 533126 - DNA, 685 bp, Homo sapiens
tctggtatctagctttgtggtgggaggacagcacatgtaattgttagaagttatagttcccactcaagtggcaatagatctgtggtagtgttgtcggatttaacttgggaattactgtttatttctccttctagtcaaggagtagtgagtgtagagtttcgagtgtttttctacttagtagtttacttgcaacagtcaagcttctgagtgatatccttgtgcatctggcaaggttgtagttatttgaagggtgctaacagaaaaaactagtgagccctagggtctgtctgggtgtgcttgacactgttgccgactgcacagctgttttttggtttctgactaagccacccacaaccacaaatggtttttttttttaggggagggggaggagcatggttgcccagtatctgttccgccaccattcctgacaggctatctcccctagcaacaagccccaggcctgcacattgggcctaaggaacatatctaagacagtcaaacacctagttttgtaaggattgctcagcctgtgtggtaggtttccctgcccagccaccatccagcctagcgcataccttgacactcagactatatgactctatctctgtcacaatggtctcggcgcaagagaccagcacacatgggtgagggtagaccccctggtgttgcacaggccaacagtgct

SEQ ID NO: 533127 - DNA, 473 bp, Homo sapiens
ccatctcaaggcaatacatttcttggcaatcgctagcaatatttctgttagcttcatagtatggctttgcctaagattggtgttagtacagttacccagtagacagacctccgggtctaaagggaatgcaaccccgtgaattgaggatatggtatcgcataccccctgccagaaaccgtgtagttttgaacactgccaagtggaatggaggaatgttccttcatctgagccacatctaaaacatagggaggagatatctgggttgaacttgtgcagtctagatggggtgatatagagctgatggaggaaattaaactggatcagtctgtatctggagttcaatgtggatgtaaccccatccctgcataggtcactccatagatcctcatcaagatcaatacccagatctttctcccatctaagtcggggtttatctagcccaggcagtgttagtcctgacataaggtcgacgc

SEQ ID NO: 533128 - DNA, 381 bp, Homo sapiens
ggtaaatgacgcggcctgattgactgatcgtcaccgtggcattggtctgtgcaataccgctaatttgtggggcgtagccacgcagctcccacggtaacattcgatcgtcactcgccagtgccgcgccggtataagaaaaaccatcgaaaatattggaactgaaatcggtttcgccgagggttaacttagagcctaattgcggtaatggacgaaaaagataggtgcgcgatattccgcctgactggtcatggttatcttcgctatcggtcttattaagctggtaatcactgcgtaagcgccatgccccggcgttaattccggcggtaccgtaggcattcaggttagtgctgctgctgccgtcctgtgggcggtagctgctgg

SEQ ID NO: 533129 - DNA, 120 bp, Homo sapiens
caagttcgttaaatgcaataaatgacaaatgctctgaaactacccacatgcactcgtgtgcgacaaggcccatacggtatggcccccccacttccccctcccagtactagttaattttga

SEQ ID NO: 533130 - DNA, 192 bp, Homo sapiens
gccccccccggggggggggtttttcccccccgggggggggggagacccccccccccggggtattttttcccccccccccccccgggggggccgcgggggccccccccccccccccgggggccccccccggggggtttttttttttttttttttttttttttttttttaaaaaaaaaacccggcccgggggga

SEQ ID NO: 533131 - DNA, 309 bp, Homo sapiens
cctcagagtgctctgtaggagctgtagactgggaagagaggcccaggcgtggtggctcactcctgtaatcccagcactttgggaagccaaggtgggctgatcacttgatcccaggagtttgagaccagcctgggcaccatggtgaaacctcgtctttaccaaaaaatacaaaaattagctgggtgtggtggtgcacacctgtagtctcaactattggggaggctaaggtaggatcacttgatcccaggaggcggaggttgcagtgagttgcagtcacacccctgcactccagcctgggtgacagctaga

SEQ ID NO: 533132 - DNA, 250 bp, Homo sapiens
caccgacagccgactcctagaccactaagagctctgtgactccttacctctctccaattgtccaggaggtgacaactcactctattccacttcattccttctcaggtcggctatctgcagtgacatccgtagatatctgacttgatcaactgcagaagctccttcctcgctgaaatgtactcgttaatgggtaccgagtctcgtaaattacgatacaatcatggttcactaggctgtattccgggagggt

SEQ ID NO: 533133 - DNA, 489 bp, Homo sapiens
  misc_feature (28)..(28): n is a, c, g, or t
  misc_feature (74)..(74): n is a, c, g, or t
  misc_feature (164)..(164): n is a, c, g, or t
  misc_feature (205)..(205): n is a, c, g, or t
  misc_feature (207)..(207): n is a, c, g, or t
  misc_feature (418)..(418): n is a, c, g, or t
  misc_feature (431)..(431): n is a, c, g, or t
taattatttttattttaagaaaacaggnaaagtatgtttataacggcattatttgcaataacaagaattggaanccaaccagtttatcaatgataaactggataaagaaaatgtggcacatatacaccatggaatattatgcagccataaaaaaggatgagttnttgtcctttgcagggacatggatgaagttggaaaccatcantntcagcaaactaacacaggaacagaaaaccaaacgctgcatgttctcacttataagtgggagttgaacaatgagaacacatggacacagggaggggaagatcacacaccagggcctgttgctgggtgggggcaaagggagggatagcattcagagaaatacctaatgtagatggttgacaggtgcagcaaaccaccatggcacatgtatacntatgtaacaaacntgcatgtttttgcacatgtatcccagaatttaaagtataataaaaattatttttcttt

SEQ ID NO: 533134 - DNA, 187 bp, Homo sapiens
  misc_feature (7)..(7): n is a, c, g, or t
agtcagnaattctaggcagctggctggcacagtggcttgtctgtagtccagcactttgaaggctgaggtggaggattgctgagacaggagtttgagacagatgaaagaaatgacatgtggcattgtacaaaaaaaattttttttttttttggggaggggtctaactctatttcgccaggtcccctcc

SEQ ID NO: 533135 - DNA, 212 bp, Homo sapiens
gaagtggtaaaacagaacaaacaaaacgtggtatatccatacgatgtcaatattactcagccttaaaaaggaagaaaattctgatgcatgctacatagactaactttgaggacataatactaagtgaaataagccagtcacagaaggacaaatattggatgattccacttacatgagcagtcaaacccacggagacagatggcgaatgagga

SEQ ID NO: 533136 - DNA, 124 bp, Homo sapiens
ggaacaggtgacagatgggttttgtgcgattttcaatgaaagattcaagaattttacattatgagtggtactgaacaatgtggcagaatttgtgtgcaaatataaacgtcattataagaagcaa

SEQ ID NO: 533137 - DNA, 388 bp, Homo sapiens
tcaggacgcagaaatagaccataatgcaggatctttttattacatagttgaagtgatcaatgtgagaaagaagccttcacttgtatgcgtggttgtagcagagtccgtagccttcctgacagtcttcttgtctggccaggctgggggcccagcattcctggaagggagagacagcccagcatctcagtatttcattgggacaacaagctggatgtggcagggaaagctgagagcgccaaggtccccttgctttatcccaagctcggagggacgcagcctggcatggctctgggctatcaggcaggtgacatggccaggcaccttcctgtacaggcactgtgggctcctggcccaggctcactagaaggtcttctctgctggatacctt

SEQ ID NO: 533138 - DNA, 338 bp, Homo sapiens
tttgagatggagtctcgctctgtcacccaggctggagtgcagtggcgccatcttggctcactgcaagctctgcctcccgggttcacgtcattctcccacctcagcctcccgattagctgggactacaggcgcccgcagccacacccagctaatttttttgtatttttagtagagatggggtttcactgttttagccaggatggtctcgatcttctgacctcgtgatccgcccgcctcggcctcccaaagtgctgggattataggcgtgcagccgcacccggccaggtttgaggctttctaagcctgctggaattctgtttaagcttctaaaaaggggc

SEQ ID NO: 533139 - DNA, 1080 bp, Homo sapiens
  misc_feature (194)..(194): n is a, c, g, or t
  misc_feature (537)..(538): n is a, c, g, or t
  misc_feature (857)..(857): n is a, c, g, or t
agcggaaagagcgcgaggagccgccgccaccgaccagcgcagcagtgcctggagctgtgaggagattcgggccgttcaccctgcgctccacactgcgtcgccgtcctaccggtccgtcattcgtgttccgtcgcgtacccgattgccaagctaactgctcaggtaacataccgaatggtggtagtatacgtcantccgaaggtttcgttagcgctgatggctacggaggaacgaatagcgcgtcatcgcgcagagtggatagttcaaacagagggccatgatcggagaatatctgtgctagctgaaagtagtgcgatgccatggatataacaatccgtgcatgaagtaagagcaaagaagcgagagaaggaaagattcacagcaaagttacgtcggagggcgattatgagagtggcgtggtcgggattgctatagcaaacagggcactaatttctatgagcgaaatactggcatagagaaggacttaacagtggatggaagggacggacggtggatagtccatgtttgacaagtccnnatttgaactcttgggcttctaatatttgctcgatgaacgcgcagacttgactgtcttgcagtgcgaatgtgtctggggtgtgatagggagccctatttatcattttgactctctgtctgaaagaccccttttgatggacttactttgcggagactcgaagtggagtccctcagagcgagagcagaaaggccgtagcggaacgtggcgtcagttcgttgtctgcctgacgttgcaggtgtgactttcccggtacttgtgcggacagtcggactgtgttcgtgtacgtatattggataccagcggatgttgaacttacatntccggagtccacgtaggagtcactggcgtggcgctctagctttcatgtcttcttaccagcgtgtcatttagggtgagttacgtgggcattggcgacagaactctcgaacatcgggataatgcacactttcaagcgtaatacaatcggtttagtggggcagtaggaacatcacttaccaagaggaggaatcgttcgaaggaacggtcaaggaacagagttagaa

SEQ ID NO: 533140 - DNA, 195 bp, Homo sapiens
tctagagtatcccccgcggcagatatcctaatcctccctgggacctccgtgactgggaggggagcagagtccccaggagccgatgggggccacccgaggccatgatggaggtgggaggccgagccaagcaggaggacgttgccagaggggaccagggccagagacgggaccaggaacgaactgaggaccaagaag

SEQ ID NO: 533141 - DNA, 251 bp, Homo sapiens
cgctcatgtgtcaccgcagcacagagagacatctttggattactcctatgtatatgcttgtcatcaggcgacatactgtatctctttatgtcaggtcgcaatatgtacttacggagctttacactacacgcactgacattactgggaactgcaagacctgaaccttccagagccacatatagctgcgaactcgcctgccatcacatatttaacgtcctacgttctcttactggtttgcaggcggtccatat

SEQ ID NO: 533142 - DNA, 190 bp, Homo sapiens
accagattggggccaggtgtagcggccacgcctgtaatcccagcactttgggaggcggagctagcggatcatgaggtcaggagttcaagaccagcctggccacatggtgaaccccatctctactaagatataaaaactagctgggcttacaggcacgtaccacttacctgctaaatttgtatttttagtg

SEQ ID NO: 533143 - DNA, 1084 bp, Homo sapiens
aatagatatagtaccgcaagggaaacagatgaacaaattataaccaagcataatatagcaaggactaaccccatataccttctgcataatgaattaactagaaataacttggcaaggagcagccaacagctacagacccccgaacaccagacgagctacctaagaacagctaaacagagcacacccgctcctatgtagcaaaatagatgggcacagattcatacggtccgcaggccgcacaaaacctcaccgcagcctgcgtgatcacctcgagttgtcccaacgatagcaatcttacacttccaacattaacaatcacagccccacaagaaaaccccaacctaacaatccccctcagcacacaactacaacaccacgacagaagacaccaaacaagaagaccaaccaagcccctccacgggaacacacaacccgacacacacaccctcagaacgaacgaaacaaagaatcatacccaacacactctctacacaacccccccactaacgctcacgcagcccttaacaaacccccaaccacaaatcaaagagtcaacaagcaacaacgcccgatcaccacaagcccatccaacaacaaccctcaccattaccacttcaaacaacaaaattacccaaaacacaccaacatattataaaactttgaacacacctacccaataaaaaacacacccacaaaaatcacgccaacccccacaatctaattacattacaaacacaccacaacatagcacaaagcacaccttaaaaatggatccaacgtcaccttacaacccctcaaacacaaatttgcaataaaacccaaataccactacgcagatacaccggcgaaataaaacaagccctcatgaccagcacacacgaacaatactaccaacaaaacacaaaccataggcaacacccatggcagcaaacccataacaaagcacggtaccgcaccaaaacaacacaccataaacaagaaaactctcacaagcaacacacaagaacaaacacagcaaatcaaacagaacagacaacaccaaccacgcacacaacaacaacagaaacaaagcaaaagaacaagt

SEQ ID NO: 533144 - DNA, 720 bp, Homo sapiens
  misc_feature (651)..(651): n is a, c, g, or t
  misc_feature (674)..(675): n is a, c, g, or t
  misc_feature (687)..(687): n is a, c, g, or t
  misc_feature (691)..(691): n is a, c, g, or t
  misc_feature (704)..(704): n is a, c, g, or t
  misc_feature (710)..(710): n is a, c, g, or t
  misc_feature (712)..(712): n is a, c, g, or t
gctctcccccgtgcccgcgtttctccccccggtgggcggaaaactccacggtggaggctccacagggaacacccgctggggagtggttgcattggcaccgacgtgcgtgccccacagccccacaccacagtggccctaggccacgccgcgtgcacgcccgcttgtcccctgggagacacgggctcgctggagagaatgagcctctcaggccggcttgggggagagaagcccaagatgtggcccaaaactgcaaagttcaacctcacgtgagccatgccacggaggctggggtgaattgtacctagccgtctgcctgtttcgtgtggctcaagcgggcacgttgcccacgaggcccaccaccgcccccccagagggccctcgatggagcaagcctcaatccacaccccacactgggcccagccacggagccccgcactggccaatcacgtaatttattgcctccgtccgtgccgtgccctgggccacctggcctggcgcctgttcccccacgggtctcaagtgccacccacccccggcaggcctttccctgagcccagccacgggacacaaccaaaggggccacaagtgcacacattgctgagagccgtctcctgtgcctcccccgcccatccccggtcttcgtgttgtgtntgccaggctcaggcagaggcgcnntgtcctgcttcntttntgaccgggaaatnaatgcncntgaaggga

SEQ ID NO: 533145 - DNA, 169 bp, Homo sapiens
tcgaatcgagctcgtgtaccgattacgctcctagacgggaaatgaggtaggacagagagagctccagagcggaatatgcaactccggacacaggatgttccagacaggaaatgaggtcaggacaaagggtggcacaaataggaaatgaggtcaggatacacgagtgctc

SEQ ID NO: 533146 - DNA, 105 bp, Homo sapiens
taaaaaaacccagggtttttttaaaagggccccatggggttcccccctggttttccagccccaccggggggcggggcacccctttggggggggacccgggggggg

SEQ ID NO: 533147 - DNA, 114 bp, Homo sapiens
gctcagttcaccttctcacaatgaggcttcctgcttagcttcttgggcttctaattcttttgggcttttggttccattggggtaattttattaattaagcttccaatttccttg

SEQ ID NO: 533148 - DNA, 1087 bp, Homo sapiens
  misc_feature (879)..(879): n is a, c, g, or t
ctcaatgagatctgctgcctctgtggacctgacagccccaggaagagacacacacgcacagtgcccaatcctgagtgaggaacgagcacttcagagcctgtgcacgccagccaggccgtgtggagaggagggggctccactgggagtgggctgatgtgaccttccacatgggtctgtctgggcagacttaccttccaggggtgggtccgtcttggcaggagaggaatgagagagccgtgcacaccagccaggcgttcgggaggagcagcacgcaagttagaaagtccccagtgccgctgtccgtatgagcttctctccagctcattttccccatctgtccagcgggatctcgctgcgtgggaccaatgcaaggattaggatgagatgtgcatgtgagcaagcttgttaaatattaactagtactttgtgcgtggccttccacaacagtcccctcgtgtgcacaggcagggtctgagcagagggagggctttgtggattccaaaggccaccaggcccttggcaggcaactgcagctcgccacctccctcaccgaccggtcagctttccaacaccaacactgaagaggtgtgggagttctgtgccaggagctcccagagcagcttcagggagagtgtggggccccctgggacctggggcatctttgcccaccttaggagtgctttgtccatctggacaagctaggcttggctcactgcacccatctttggtccagctgtccccgggcagtggtgcccaggctgcctgacattgcaggggtgtggacagagcccttgccagggaatccctaccccaggattctggtgtggctccgcctgggtgtgtcctggttaattcctgtgcctactgaaggcctgcccnagtgatctcgctcgctcgctcctagacatgctggcacattgtgctcatcagtctctggggtgggaccgtccagacgggtggtgtcagcattctggggcagagggctgaggcgatggggagcggtcccgggggaggggctgccgggttggggggcctggtgggcttcgtgcgggatgttggccgcggttccggccagggttgggggggg

SEQ ID NO: 533149 - DNA, 1096 bp, Homo sapiens
gaaaaaggaaaaaaaaaaaaaaaaaaaaaaaaaaaaaacaaaaaaaaaaaaaaaaatataggggtattttccctaaaagaaaaaacccccccccctttccccttgggttcgtgttccaaaaattgtggagtaagaaacaagaaaattgtgtgtgtcgcaccaggtgcccctcctgtgtggaaaaccttgctacggttatattagggggtatataagaactcaccgtgtgagatataaagccatttctcccagggttttgtaaccccaggggcttataatcacaaatctacgtgtgccataaaaaagagatctccgggttaaaaatataggtctccgagaggcgccagaggagacctattattagaaaacctctctttagcgaggaaaatggggagagaatttctctctctttttataagaaaaaagaaggaagaggggcgccttttatattctcacaacccctaaaagataatttactttcacacagaaatatttctccttattttatatccgtgtgccaacacacacgagaggggggtgtgagacataagagaggggaccccactacaaaagtgtgtgtgatacactcccggaggggggacgcacacaaatatatctgagtgtgtgtgtctccgagagggttttatagatacttctctctcgggagggagaacatataaagagcgtattaacacccgcgtgtggtgcgcagaagaaagatatacacccagagtgggtgtgggcgcatatatacagagcgcgcgagcagagaaggggggaaaacacacagtagcgagtgtgtcctcctatagtgagtgtgtgtgaggagagagtctcctatgaggagagaaagatatttgttttgtgcgagagagaaaaaaatattttgtgagagaaagatatgtgctacaaaaaagagggaggaatttggggcggaatattgagagacatatatctctcccaaatttataatttttagaaaacaagtgatagagagggggcgaagtggtgggggggcatattatttgagaggaaagaacatgtttataataaagatgtgagggggggccttataaaaagaagaggaggagagatg

SEQ ID NO: 533150 - DNA, 530 bp, Homo sapiens
  misc_feature (322)..(322): n is a, c, g, or t
cacaccttccccaagcacaggatctgggaagtactaccatctgtacgtcaaggagcatggaatggttggtgaatagcactgaagactgccatagacacctccataatgtgtgcccaggagtgctttgtccatctggacaagctaggcttggctcactgcacccatctttggtccagctgtccccgggcagtggtgcccaggctgcctgacattgcaggggtgtggacagagcccttgccagggaatccctaccccaggattctggtgtggctccgcctgggtgtgtcctggttaattcctgtgcctactgaaggcctgcccnagtgatctcgctcgctcgctcctagacatgctggcacattgtgctcatcagtctctggggtgggaccgtccagacgggtggtgtcagcattctggggcagagggctgaggcgatggggagcggtcccgggggaggggctgccgggttggggggcctggtgggcttcgtgcgggatgttggccgcggttccggccagggttgggggggg

SEQ ID NO: 533151 - DNA, 236 bp, Homo sapiens
tcgagctcggccggattcccggggatgtctcagtggatgacccggtgattgttataccccatagctgaaggctagttcagagatgcctgttggcagtgtttcttattttttttgggtttgctgttaattggtttttgcgatcagacaaagctaaatcacttcattcctacatcctggcgacctcgcggggatcctactagaagttcgaccttgcagggcttgtcaagcttgtgcac

SEQ ID NO: 533152 - DNA, 376 bp, Homo sapiens
ctgcgcatcggtctttatttgtgcatagcaagtttatttttttaaaaggcatatagacaataaacaaagtaaataatcagatcttaacttctgtcctagaccttgttcccgtttaagtttctaagtctggggagccccctcggccccccttatttttccctcggagggaaaggggggggggggtttttttttcctttttggaaaaccgggcgtttggcctttttttacccaaaaaaaattttcccttaagagggggtttttttttcttttaaaaaggaaattttcccccccgtttttgggaaataaaaaaaggggtttttttttttcaaaaccccaaaaacttcccccttaacccctttttaacacaccctttaca

SEQ ID NO: 533153 - DNA, 654 bp, Homo sapiens
gtgcccttgggtgtgtagtgtactattgttgttctgctggtagctgatctgacctagccctgtttccttgcaggggctgtgtggcaggagtttcatcagaaggtggttgtggtcactgcgagacactaaaataacctaagaaaatgcataatgatcctttacagggaccagacgagaattaggatagcctttattgtggagatggtccttgtaggtgtcttaaactgcagataattatttttccgtttgatttttctttatagctaagtagactaagtagttaggatgtgtattacttgtcggagtcagttgaaaaatattatgtactgaagtagacgccagcggaagattagttttctactttagattataggctatccaaagaagactcagtaagctttgagttattagtcaagttggtaaatggttctggataacttaaggattttaccagtgctttgggagataagctttacaagcaaaaacttatctgaccgtaatgtaatatattactcaaatgctcccaagctttccccccttgattccattcattgaagaggttggtggaacctggccaagaaaacacccaagaccactagaaccagcaccgtgtgtggggcagcggtggggcccacagaggaaggtgttcaccac

SEQ ID NO: 533154 - DNA, 843 bp, Homo sapiens
ggcagcttcctcccccacagccaagtatttgcacaatattgtgcggtgtatgggggtgggttttcaaatctcgttcctcttggagaagcacagggatctcgttctcctcatgttcagggggtgtgtggggacttctcaggtcgtgtcccgcagccttctctgcagtaccctatctgctcgctggccgggacccgtcgggtaggcgccgatggtctcggatgaaccgagccggccccggtggaggtgagctacaaagacatgcgcttcctcatcacaactcacaacactcaccaatgaccacgctcaagtcaccttcacttgaggaccctgaacaagtgcgggggctatcattgtggttgctgtagtgtgctgaagtgacctatgacagcatgcgccgcgtggagaaggatggcgatcacctgttgtggcagcctggctcgttctgacgatggggcgccctcggtccggccctgtactgggaggactggttgatcctggtcgacggccaagttctgtgtctgcctcgcggcagcttgcgtggttgttgcggtgcctggcggtgctgcgccgggctcagtccttgtggctctggcccttattgagagcgggatgaagtacggaggatcgccatcacagttcgataactgccagaatcgccggggagccatgcaacactcaagctagttcacctacctgtggaaataccggaccaaacagaggctgggtcgaagacccacacacgcgcaagaccggtgcctggtatgtagtcaggacttgctgggctgtcgtatgtcagtcacgacttggctcgactgaggccttgccggccttgtcgccacccag

SEQ ID NO: 533155 - DNA, 302 bp, Homo sapiens
gagacagggtctctctctgtcacctagactggagtgcggtggtgccatcacagctcacggcagcctcaacctctcaggctcaggcagtcttcccacctcagcctcttgagtagctaggactctaggcgtatgccaccaggcctggctaatatcttagcttttttgtagagacagggtcttgctatgttgctcaggctggtctcaaactcttgggctcgagagtttgacttccagctagctgggaatctccccttgacggacccaccagcaccactggccccacgtcgaccgccgcgaattta

SEQ ID NO: 533156 - DNA, 173 bp, Homo sapiens
ccatttcatgtgcccactggcacggcagggagactttctatgtgtctgagatgaaggagaccgagtggaatggcggggcttgtggagggcattgcacccgtggtggcccgggctgaccactggtgcccgcagtttgtgcttggattgcctggacggaattctgcccggtctgg

SEQ ID NO: 533157 - DNA, 298 bp, Homo sapiens
caaaccccccccccccctgttaaactgggataccaatttttttgagaaggataaaggggccttatttttttttccaaggggcccagatcccagttacccttggatccaggtaatttcagatgaattattaagccacccttttaaagggaattcattattaaaaactattcatttttttcccttggcccaaaatggggaattgtccttaaaattttaaggtcctttcccctgttttaagcgggaaatttctttaattctgcttactatttcatggaaaaaaataaattttcccatttta

SEQ ID NO: 533158 - DNA, 343 bp, Homo sapiens
caaaatggatgacgacatgagtgtaacatggaactgcattaacgaaccacgtattagtgggaaaagaatactggcaagacagagaggaggccaaacagcaaagggctatagcatgacatcgcaaaaaagttggactttatcctggtaggaaatgagatgttattaaaaaattttaagcagctatgtgctcatcagttctgcatttgagtcagcatggcatctgggcaccaagtaaagcaaggtggcatggccagcagcaggtaaaccagattgaagggtaaacagttagagggctagcaatattctagggtgaaagcatcacttaggcccgaacttggaccaa

SEQ ID NO: 533159 - DNA, 349 bp, Homo sapiens
gacgcagactagtgaggaaagttgagccaataatgacgtgaagtccgtggaagcctgtggctacaaaaaatgttgagccgtagatgccgtcggaaatggtgaagggagactcgacagtactctgacggcttgtagagcgggtaaaatagacgacccagataaaatttgtaataacgcatgtgcttgaacttacttttggtttcgtgttgttttctattacgacctactggtgacgctcacggtgacttgatactcctgactgcgacgtaataccggatgtgtttagcacgtggagacttctaaaccacctccgacagcagttgccggggtaccgacgctcgacatctcg

SEQ ID NO: 533160 - DNA, 649 bp, Homo sapiens
  misc_feature (479)..(479): n is a, c, g, or t
gggcccgcctgttttcccacacagccggcgcgccatggaattctggtaaccccccgcgggccccaacaaagccgggggcaaaaacagcttcttttactgtaaaaaagtggagaagtcacctgatgcacccctttggccctggaattatattgggcgtgaaccaactgtgccactctttggcgaggacgccccccttttgtgaggttcctttcaacatgaagatatggtcacaagccaacctcctcgtggtcgtcccatattgtcacaacaaaaagtagtcgactgtttctccaagtggggggcgtacttatataaccactggtttctcactctcccaccgcaatacctttcttggcgatccacaaacaccacacggcggtgtgccacctggcggaaccaccaaggagtgggaaattccaccaatattcggcgcactatcagtaaaagatgtttttcttccaccacaggcatcagtgtantctggtcagctactatcataaagaacctctgccgcgctgttagcaccataacaaccccacagatcaggagtggagacgcgctttttttttgcgcctgcttgtttgtcacacctctgctgttttttaaacccattttttttttcgtccaaaaaaaccccttgggttcccca

SEQ ID NO: 533161 - DNA, 854 bp, Homo sapiens
ctcctctccagcgtcaccatggtacatggaagagatgcctatgtgtcccctagtggttatcgttgcagttagtgaacacagaatggaatctcttggcagaaagaggtacggtaagtgctcggaagataaactatggtagacgtggtgagtatgtgtaccaatgacgatcttaacagttgacaaggaattcagattcgaggtagggctgaaacgagcagaccagcgtgaaagataactactagcttgatgctacagcgcaaggactacatgtaccaggttccgagaagtacaactgaatagataagacacgtgccagctggcaagaactctcagtaagagccaataggcaggcgacatgattcgagtgcaccagtatctctgcggtcgtcctaagagcccaggcctccgtaggatcttacttgcaaggagttacgagcacggttggctttgccgcacggtgactagatacgtagtgcgaactagttgcaaggatagcaagatgggcggatagctgatgccaggtcaacgggaccacaggttatcagcaagagcctgggtgaaggttcacagaacagtactaatgacagtctccagggaaagcacagtctgcatgtgtcattacaggcaagcagaagagtatacaatcctccacaggaccactacagatggcactgtcgggagtgggtatttaaaataccggtgaggaccagtcatttcaatgtgcggacagtgagcagaccacgtagaagagaaatagctgaagggtgagactcttgttcctacaagagcatagtcctggcgaacagtgttgcagaaactcttggagaaacttctgaactagaccttgaagatgc

SEQ ID NO: 533162 - DNA, 236 bp, Homo sapiens
ctggaccagccgggcatgcgcccagcagcatcacgttgccagccctccgctgggcgcgctggcacagcgcgacgaacaggtcggaaccggtgatgcgctcgggcagcggctggcccaggaaacggctggcccacaccaccggcatgccgtcggcgaagatgaaatcggccttggcgtagcgctcgcggaattccggcgaggcatccaggcgcaccacatgatcgacgttgggcgta

SEQ ID NO: 533163 - DNA, 243 bp, Homo sapiens
  misc_feature (68)..(68): n is a, c, g, or t
  misc_feature (180)..(180): n is a, c, g, or t
  misc_feature (201)..(201): n is a, c, g, or t
ccctgcctcagcctgccaagtagctgggcttacaggcatgcgccaccatgcccagctaattgtatttnagtagatatggagtttcaccacgttggccaagacagtctcaatttcctgaccttgtgatccccctgcctcggcctcccaaagtgctgggattacaggcatgagccaccacgnctgtccggttatttgattttnataagaaaattttactattattttcagataaaatttatgtca

SEQ ID NO: 533164 - DNA, 208 bp, Homo sapiens
  misc_feature (38)..(38): n is a, c, g, or t
aacagatggtatccagatgccttatggggacatccttntccacacaggcgatttcaccgagctgggacttccctcagaggttaagagtttaatgactggttaggaacctgccatatgattataaatagtgattcctgggattcatgacctacatttggagggattcaggcagcccttttaaccaggtctctccttccctttttcccat

SEQ ID NO: 533165 - DNA, 422 bp, Homo sapiens
catgccttgcaggcggactttaaagagaccctgccactagtggaggtcacaacgattatacccaggccaatagaagccgtcgtaaagagggtattagagcacccgcttgccaataaaggtaaaactcacctgagttaggaagaactgcacttgacacatagtagactacgaaagtggctctaacatatctgaacacacaatagctaagacccaaactgggattagataccccactatgcttagccctacacctcagcagttaaatgaacataactgctcggcagatcactacgagccacagcttagaactcagaggacctgtcggtgcttcatatccctctagaggagcctgttctgtaatcgataaaccccgatcaacctcaccacctcttgctcagcctacactagtggagggtaccgag

SEQ ID NO: 533166 - DNA, 869 bp, Homo sapiens
gccccgagggcaggctctccccgtgaggctcagccccctctgctccccatggtgcagactgcctggcagggctacaatctgcagcgtgtgtctggcgcacatccacctctggtctgtgccactttgatcctgcggactccttggcctactctggcctggtgccttggcagactttcctccgtcaccacacgagtgacttggccgtagccgctaggcctcttgagtatccgcccaaggacttgggtctctttctttgagatcgtttgggccagctgaccctgtgtcccaggaatgggacagtcacagggaatttggcgagggtctcacggtcgtgggcttgctgagcagccttgaacttcgcgagacggtccagacgaggtagacaagacccggactattccaggccatcagtccgtgggacgtcagatgggcattgaacaggatcttctgcaaggacaagctggtccttatcacagccagggtgaccacagaaaggactgccagggaacctgcctatattttagtgctgtaccaggaatcctaccctccagaccagccacccatatcctgctcagaggagggggctggaaatgccaccctgagccctagaatgggtgaggaatgtgtgagtgtcttggagccactgaaggccttgtgctgaccaagctgactcacctacggaggagcttggctctgtgtggctccaggctgctgggtcttgggctccttccttgcttctcttctgtggccttctctgcttgtgtcactgctatgtgcgttccgaccgcgccgggagtccgactggtctagaaccggctctgagggcactggctagttccgagttgtttctcaggtgtgatcacttctgg

SEQ ID NO: 533167 - DNA, 358 bp, Homo sapiens
caggcatccatatcccaagctcgcaataccacaagaccagtagagctggtagtatataggtctaccagtgacaaggaacagtgacagtcaattgctaattggcatgaatcatgcagttagaagctttcttgaactgtctcctgggaggtgtgggtctcttctctcaatctagagcaaccttctgaacattttcaagactgtcaaaagtcagtaataataacaaaaaaggaaattgcaaaagaagattagcaacaattaccatttttcagtacaaatcaaaacagcaacaaaattcaggctcactgtttaaaagtaaagataaatacctctttgggtgtcatttctgtgcccatttcaa

SEQ ID NO: 533168 - DNA, 756 bp, Homo sapiens
  misc_feature (2)..(2): n is a, c, g, or t
  misc_feature (72)..(72): n is a, c, g, or t
  misc_feature (77)..(77): n is a, c, g, or t
  misc_feature (79)..(79): n is a, c, g, or t
  misc_feature (97)..(97): n is a, c, g, or t
  misc_feature (105)..(105): n is a, c, g, or t
  misc_feature (118)..(118): n is a, c, g, or t
  misc_feature (122)..(122): n is a, c, g, or t
  misc_feature (140)..(140): n is a, c, g, or t
  misc_feature (143)..(143): n is a, c, g, or t
  misc_feature (177)..(177): n is a, c, g, or t
  misc_feature (188)..(188): n is a, c, g, or t
  misc_feature (203)..(203): n is a, c, g, or t
  misc_feature (213)..(214): n is a, c, g, or t
  misc_feature (217)..(217): n is a, c, g, or t
  misc_feature (286)..(286): n is a, c, g, or t
  misc_feature (316)..(316): n is a, c, g, or t
  misc_feature (327)..(327): n is a, c, g, or t
  misc_feature (448)..(448): n is a, c, g, or t
  misc_feature (484)..(484): n is a, c, g, or t
  misc_feature (502)..(502): n is a, c, g, or t
  misc_feature (514)..(514): n is a, c, g, or t
  misc_feature (518)..(518): n is a, c, g, or t
  misc_feature (529)..(529): n is a, c, g, or t
  misc_feature (536)..(536): n is a, c, g, or t
  misc_feature (539)..(539): n is a, c, g, or t
  misc_feature (564)..(564): n is a, c, g, or t
  misc_feature (687)..(687): n is a, c, g, or t
  misc_feature (735)..(735): n is a, c, g, or t
angacatttaggacagaggaacagatccatggccactgcctctgcagtatcaaagagaattagttttttcanaaaananattttgggagggaatgtntgggtttntgtggtgggtttngtgnggggtatttgtgatgatnttnggggtgttgagttggtggggaaggtgtttgtttngtgggagttgngtggttatgggtggngaggtgatgnntgntgttgggagggccatgttagcgcatgttaattgaaacagaaaagaaacaaaagaaaagaaaaacaaaanaggtacctgcgtggttcatggatccctagncatccagggancaaattccaaattaggatgacaaagagtttcccttagttcaaaatgacatgtgtttccagtcctaatcccagatgttaatctagccatagtgtcacctgagccttagtggatgtgtatatnagatacttggtctaggtttagaatgacttcacaagntgagaaagggaaaacaancataacccaganttgnatgtaagtatntggggtnaantattaaataatacttaagaggggancttatgagccttagctctttctggaaattcatctgaacaggggtgagggtgggtaggtgggtgcaaatggtgggctccctccagctcagagtgcatttgttaaggtattgccaactttctganagacactagagacaagggaggagaccaagtgctaaagaccttttatcncttttgcaaaaaacaagaaag

SEQ ID NO: 533169 - DNA, 174 bp, Homo sapiens
cactattgcctcgggcgcaatagatattgtaccgcaagggatacagataaaaattataccagcatagtatagcaaggactaacccctataccttctgcattatgaattaactagaaataactttgcaaggagagccaaagctgagacccccgaaaccagaccaggctattgttg

SEQ ID NO: 533170 - DNA, 197 bp, Homo sapiens
  misc_feature (183)..(183): n is a, c, g, or t
cttaacaagggtgatatagacagaaatgccatcctgttctgttcttaggagataattaagaagttaggagtgaattacatggttttgggaacttccttacaaatggttgagaaagaggactaagagtagatgcagaggagtttcaatagcatgttgatgattctgtatttgtacaaaagggtngggtaccgagctcg

SEQ ID NO: 533171 - DNA, 520 bp, Homo sapiens
  misc_feature (66)..(66): n is a, c, g, or t
  misc_feature (80)..(80): n is a, c, g, or t
caacgtcctccggggcatgggggggccctttgtctggttcttgtaaacgagctcaaaaaggttatntaagggccggcgcntctccacacacacacacaccccaggggaaccaagagaaccacgtagaatcctcacccgtggggcccatcacccttcgagaaattccagttgtttttttcccacccgcatcctgcctgtaaatggccggggaaggttttaaaaaaggggggcattgcgatccacccatcggcagccgattccgttttttgatcccggggtgggagggacccgtggggtccctgggtggggcccatgggtgagaccctccagtattgagccctaaagtccaaatgcttgtaggagccaagtggtgttttaagtatttatttaaaacaaaagaatccggttttcccctttgtacttcagggctagcccctgttttgcccacccgaggactggggggtatgttttatgttgggccccctgctgcaaaccaataaacaggggacgcaggggtcca

SEQ ID NO: 533172 - DNA, 185 bp, Homo sapiens
tatggaaaaaccccccgggtttattggcccggggggacgggggccccagagcctctctgggggggggggtccccgttcctttacccacccaaccccaggttttggggcgcccaagatgggcctggccgctgggggagtgtgtttggcaccccgccgctcgtcgggggggccgactatcggctctg

SEQ ID NO: 533173 - DNA, 221 bp, Homo sapiens
tcagtaatagacatggttacctgtcctgcctcttcaagtgtcgactgtataccactgatagcccttgaaatgattatagggtagtgtgggacatgattttcagtagagacacatgcagtattaaaagaacattattactcagctagggcacagatggctcattcctgataatcccagacattgaagggaggccaaggacaggtggatcactatgagtccag

SEQ ID NO: 533174 - DNA, 205 bp, Homo sapiens
  misc_feature (16)..(16): n is a, c, g, or t
accggtccacttcagngtactaggacttctttcccagtcaagttacctgatatttgattaacacagtcactactccctaggaatggctttagtttaaattcaagtattgcattgtatccagttttgtaagaatcactcttaaatctgttgtcatatctattcttgtcatagttggagagtataccatactcgtggaaaggtggga

SEQ ID NO: 533175 - DNA, 799 bp, Homo sapiens
agaatctgatggttttttttctcctggaggtggtggtggtgtggagatcgagtttggctcttgttgtccaggctggaatgcaagggcacaatctcggttcactgcaacctctgccttcggggttcaagcgattctcctgccttagcctcccgagtagctgggattacaggcaccttgccaccacgtccggctaattttggtatttggagtagagacggggtttcaccataagggtcaggctgttctcaaactcctgatctcaggtgatccacccatctcggcctcccaaagtgctgggataacgggcgtgagccaccgcacccggccttgatgtttattttataaagcacggtaatttggtagctgatgacaaagggcagccaaatgttttggataaatcaggggcaacggtattgggtctttggaaataactctgaaaacttcaggacaacatagatttcaacctgatagcacaccacacacaggtgagcggttgcttttaaaattctggaagcctggtcaggttgctctcctaaatttcaggtgtctacaataatcctatctatgaagactgaggatgaagcagatctctgagtgacgtgtaaaaaaaatggcttggagggtgtatggtgggcaacaacggctctctgaattccgtacactgatcccaaagtttttaacctaatcctggtgcaccggggctaaaaggcgcaatatgttccaacctctcgtaaccaccattaatagtttaggggggaaacctttccctgcaggccgcgctggcgagcccgggtgggac

SEQ ID NO: 533176 - DNA, 238 bp, Homo sapiens
ttaactgcataaacctgggcaatgttcaaaactccatctctacaaaaaaacacaagaattagccaggcacggtggtgtgtgtctgtagtctcagctacttaggaggctgaggtgggaagattgctagagccaggaggtcgaggctgcactgagctgtgattgcgctactgtactccaccctgggtgatgaagccctaactcaataaataaataaataaataaataatacaaataaatt

SEQ ID NO: 533177 - DNA, 1228 bp, Homo sapiens
agcggattgcctgtctgtgcaggaagcagctctgagctgccctagtggctggacagctgcacaggtatccccggcccctcccagtcagaccccagaggaaaacttggctcccagtgaagtcacgcgctctccgtggagagcacaggaacggacttgtcgtgtcacggctgtaaggacaacaagatggtccttaaaaaccgaagaggaggacgtgcccatgtggacctgatcaggctagaggagacgtcgaagaactggtagtaacatcctgacggagatacatacaggagctgctggctgaccattccagaggctgcacggatgagatagcagaagtagctgatgaagttgaaaacgctggtggatccacgaaaggaaaggaggaataacgagtgtcacgaggatacaagacaggatagccatgggcaggccagcaattctcctatggaccctaatatcggggagtccaaattctataatatgagaacgaactcgctgaagatacactctgtgaaagacattgcgccagtgtgcttatataaaggcgaaaggggctcatcaagacagtccactcggccgagctacctcggggagagagatgagtttagtatccaggttacttcagtgcatttgtggagctgcatgagtacagcgtgatcttaatctcgtccaggcactacgggaagtatacctgtggagcttccggataaccggagagggccagaagatcgaccggatgatggaggcgtatgcccagcgatatggtcagtgcattaatgggacgatggttccaaggaccacgggatacgctgggtacggtcatcgtaccataggccaatcacatcatgttggaacacccagtatggcacaaacccccaaaaggctcaaagatatagcccccatgggggagaaggtacaatggcaagaaacgcgagagacaaagagagggaacggagagacacataccggcaaagtacacactacggcgaaacacacaccatgaaaaacataaagacaagaaacccctatagaaacaccacaaaaacagccggggaaaataccccaccaacaaacatcatctgaactaaccaaaccatgaacagcatgacaatagaaaacactacgaggtgacaagtcaaatagaagtgactaaaccgaggaaatagcacgacaagcagaaatcaacagtagaacaccagaaataaggacacacagaaccaccaaacaa

SEQ ID NO: 533178 - DNA, 120 bp, Homo sapiens
cgcgaggttgttcccaatatttggtagcactttaaaactcgagcgcggggtggaaaacccgtttgctttgtgtgctgatgaaaggcagaaaaccacatccagtaacccctgccacaacct

SEQ ID NO: 533179 - DNA, 250 bp, Homo sapiens
taaaaggaagtagtagatggttatactcaagtttgggttattcagaattaccaggattgaggaagaaaaagggtgttcaaattcctagggttctgagagtatttatcttcaggtcacgagcatgaaagagagtttcaagtaagtgacccttcataagatttaaaccttctgtccttttcatctgaacctatagttttaatgtcttttcctcagatgatagagatgttttgggaagggtcatgttctgcaa

SEQ ID NO: 533180 - DNA, 1507 bp, Homo sapiens
  misc_feature (825)..(825): n is a, c, g, or t
agcgtgggaggcaggagcagacaaaccacacagccaagggatttgaattaactcagccattttggaggaacttggggaacatgaaaaaaaaaaaaaaaaaacaacaaccttttttaaaagaaaaaacagcggggaagaaaaaaattagctctcctatgggatgagtttttcatcctctcctccacatggaattcctttccctgttccccgtgaatgaaacacagcccgggtgggcccgatgtgggggcacaaggaacgccagaaagggaacccagaaattcccaggtggcccttacgaccgcacaccagccagagaccacatcttcaccacccacaacacagggtttgctacaggaacaacaacaccaaaaacgttgcttgggccggggaatatatacccgaaacgccgatagtatattaactgtggcgtgtggacaggaaaaagaatttcgagatgtgttgagaaagagacaacatttacaatttagcgcagatgtagagagagacatttgtgtggtagaaaaagggggggcgaccagacacagacaagatctcaacatgggtcagttggggagaaaaacagaggagaggggcaatatgttatattatctggtgtgggaaacattgtgggggtgcaacacgtggctgtgtgaagagaacaatgaacgagaaaagagacaaatgctagcaggaaacatagacaacgccccagccgcatagtgcaccagccacacacggcgggaaatctgcctatgttgagggacgtatcactcgttatgttgcgtaccacctgttgtgttgatgacgactcaaaccccgctggtngtttgtggggggaacaacacaccccggcgtgcgggagcacacatggcgggggacacaactgggtgggacaacctctgctagtagggcgcctgtgggaaccacttttgtcacgcacagacaagaggacaacaagacagaatgaggcactctctttaagacacgcaacgcaccagtgtgttgggacagatgtccgaaacacgatgagagcagaggcacagcaagcaatgcagcgacgacgcagaagcgagacagccagcccaacatacgagcacagagagacagatagcagacgagacagagaagcgaggaaacagcaaaaccacgtccaccgagccagcacgcggtgcgagtgtgacgaccgagcgcgccgagagacaggtagaggagggaggggataaacagcaacaacccaccgaaagggaggaggggggaggagcgaaccagcaaccgaacaccacaagcgacatagaagtggggagaggcagcaaccgaatatagcaagaggaaggacggtcgatataagttcagaacacaaacgagactgagatgaggaggaagacaacaaaacgatggagggagaacatgaagcagaagaaagagcactagcaggtgaggaaaaaaacaagacggagtaggtaggacagcgggcaaccacacagacacacccacaaaaacagagagg

SEQ ID NO: 533181 - DNA, 177 bp, Homo sapiens
ttcacagggggacactcaagaattttggacagaggaatggcatgatgatatagaccgaatcttccaggaagctgttcaggacagtgaaccatagggtaagtagcactggctttggctacggcctcctagtgtcaaccaagacaagacttttatcaatagcatatgaatatttagtca

SEQ ID NO: 533182 - DNA, 172 bp, Homo sapiens
cggcgtcacgtacggatgtgggcagtctttctccaacgaacactatgggagctgcttccttgatcccatagcatggtcattgcctactgtgaaggacatggctcccggtgatccatgcattcatcgctcacacacagaaaacacagcactcctcagatgttgtgcctgcagg

SEQ ID NO: 533183 - DNA, 208 bp, Homo sapiens
  misc_feature (12)..(12): n is a, c, g, or t
gctgcgacccgnggttatgtcttacgctgcaggagcagccctaaaaagaaaaaaaaaaacatggtaaatagacccccccccaagatataggcaactgatttttggacaaaagagcaaaggtaatacaagaagacaaagatagtgtctttaacaaatgaagctggaacaacggggcatactcaagtgaaaccgtaagacataaccgcgg

SEQ ID NO: 533184 - DNA, 731 bp, Homo sapiens
actttgggaggccgaggtgtgtgcatcacgaggtcaggagctcaagagcagcctggccaatatggtaacacactccatctctactcaaggaaatacagaaaaattacgctgggtgtggtgtgtacagccgccataatggtcccaggtcgtaccttggcagagctgctggcagaatgcagtatgctggagagtctgggcaggcaggaggttgacagtgatgctagagatcacgccaggctgtattctgagcctgggaaccctatgagctgcgactccatctcagtaatactaccattcacatccactgaagagttctactcatcgcaatatatagaaaccaaagaatactatccaagatgatacctatacccatggatggaggacgcaggccttccgtccgcaaaacaaaaagagcatcgctatttaaataataaccaggtcagcagtggggcgcactccctgctaatgcgacaacaacgccagatagatcactcgccgtgacacgaccctagtaattcccaagtggggtcaccggggcgtaccgggcaaaacgcgagtatggcatatgcgccctcgagaaagtaaaacagctcctaaggaacccacggtacccgtggtctgctgaaaccaacggaatgtgcagtttaccacggaccaatgaacagggagcactacacaacctacggagatccactggcggggaccatcctgaaagtacccccacacgaagg

SEQ ID NO: 533185 - DNA, 157 bp, Homo sapiens
  misc_feature (20)..(20): n is a, c, g, or t
  misc_feature (38)..(38): n is a, c, g, or t
  misc_feature (71)..(71): n is a, c, g, or t
  misc_feature (95)..(95): n is a, c, g, or t
  misc_feature (104)..(105): n is a, c, g, or t
  misc_feature (107)..(107): n is a, c, g, or t
  misc_feature (113)..(114): n is a, c, g, or t
  misc_feature (139)..(139): n is a, c, g, or t
aacgcacaaaatgtctatgnacaattaactacagattngcaaataatgtcactaagctttattcagtcaanacagatggcatgtgaagatgtaanatgcttttnnanaatttnnatatgggttatttgtaaataactanattgctgacaaacataaa

SEQ ID NO: 533186 - DNA, 337 bp, Homo sapiens
caggctgagcaacgagtgcatagctattagcatatcctcagttctgcagctgtacgcgcaggtgtccgtatctacatgcagacagtgtgcacgggtatcagtcgggctgtaggcgtgcatcagcagacagttgtccattggtgtttagcattggatattgatgtgatatgttccaggctatgcgatgcgtgtataagaagattcggtcctggctctctgttcctaccgatcgtaggagtacagacagccagtgcaagccgcagggttctggacaatgctgacgttgtcgcagtgtcttactacggacgtgtatcctttgtattggcgttactgtggc

SEQ ID NO: 533187 - DNA, 353 bp, Homo sapiens
ccctgattgctgcctgctgagcagttctcacttatcgaagtgatccagcgggtagttctccccgtaggtctgcaggtggcgggccagagactcctgctgcttgaggagctgcacgctcatctcctgatacacgtctgagaagagcagcgtgaggttggttttgcgcttccgctcggcctgctcaaagtcccccatcaccttcctgcggaactgcttcctccaggccttctcctgctcctcatcccaccagccttggctcagcagatagtgccgcagccggcagatgcgctggacctgtttatcccagtaattgacctcatccaccgagcgggacgctgaactgacgtcactgt

SEQ ID NO: 533188 - DNA, 168 bp, Homo sapiens
  misc_feature (32)..(32): n is a, c, g, or t
  misc_feature (117)..(117): n is a, c, g, or t
  misc_feature (151)..(151): n is a, c, g, or t
ggaagctcaatgtccggcaggtcaatgcttcncggacacggatcatttttatctgattccagcctgcttgcaaccctggaatcctcttgttccctgctgcctgccccttgggaaggnacagtgatgtctttaggggaaggaggagcccctntcggcagttgtcttact

SEQ ID NO: 533189 - DNA, 264 bp, Homo sapiens
  misc_feature (27)..(28): n is a, c, g, or t
  misc_feature (40)..(40): n is a, c, g, or t
  misc_feature (63)..(63): n is a, c, g, or t
  misc_feature (96)..(96): n is a, c, g, or t
  misc_feature (101)..(101): n is a, c, g, or t
  misc_feature (215)..(215): n is a, c, g, or t
  misc_feature (217)..(217): n is a, c, g, or t
  misc_feature (227)..(227): n is a, c, g, or t
  misc_feature (238)..(238): n is a, c, g, or t
  misc_feature (244)..(245): n is a, c, g, or t
agagcgtctctacacgcagtcgctgcnngaagtatcccantacagaatcctttccagtctttntcttaggcgatagtgtttgactctgatcttgtntagtnctgtctttgtcactttcccgatctttttcttttttatccttttctcgctcagcatcggattctggagagtcagatttatgtctcctcttcttacttttcttcttatgctttttngnctttttatancttctctcagnctctgnnctagaagaatgttctgaag

SEQ ID NO: 533190 - DNA, 878 bp, Homo sapiens
tgtcggtcctaagttcaatttgattattgacgcagtctcagaggcaaggtgcgttctagatgtcatcctagagaaaacacttcatatataattactcactatttctgtataattacatattgctgtttgtgtgttttatctgtttaccatcttatctcgggcgtcgctgtttcacacaaagaccagttcttggcgaccttacagggcgtactgatattaaggataaaacacttggaacatgattgtctcgtgcgttgtccatggtcactcatcatgtcatgactagttgtcggaggctcgaaaccatagtgtctcgctaatgagagaatttttactagaagggactcaacgtagcgaaaatggagggcacgggtgaggactattaagaagacccataggaacggtgcttaagagtgttgcctgataaaactaatgtgatagactgttcccctgggagtttaacgcaagataataatcgcattgcatgtatagttctaccccccctgattgtgcgtggtggccgttgtacagcatgacacaattcgtggtttatataaagggaataggattgttttaacagacgtcgtgaaacacagaataatacaacattactatgataaccaaaaacacaagaagggaggggggtgggggccatccaaaataaattttcgctcagggatgggcggagcacaaaggataggtgaggcgtacctaacaaaaacttttttgtaagcacaggggaggcgcaccccccaaaagcgtgcagtccgcaattttattaacgctgatgccaatggcggcggggttttaagaacagtgcacaattcaatgtggcgacaggtgtgtattagtggggtacaaggcaagaaagaaactgt

SEQ ID NO: 533191 - DNA, 491 bp, Homo sapiens
gagtgatggtaatagtttcacctgaggaccaaaaaaacatcatgcaatacgttgttgtttacgatgagacatccttggtcacagggggggggaggaaacaaatggaataatgatatggctaggttcccaggaccaaggaacagtacagttttactggagcagcccttctcaatggttatgtgggagaaaattaagccctacaaaaaatgatgagtgagtacattctcaattctcccaaggaaaaaacatagctagtatcattctagagatacaggacacaaactgctacctataatctgatacatacaacagatgctttaagatctcaaggtagaattctcccatggaactccagttgagaagggctaaattagagtaaaaacgcatttgagcagaagtggggcagtaagaaaggtaacagaagcgggttatgtgcatggagggtttgtgtgagtgtaatgtgatgcctttgcaagtagtcaatgaggacg

SEQ ID NO: 533192 - DNA, 427 bp, Homo sapiens
cattacaaacacacaacacacaccacttttcttgttgctgagagcttttgactaacacttttctccatttctgtcttcctctttctacactgggctgcatgatacaaattgttggttttgtgagtccttcttagcctacaactactcagctgtgcccatatgctgcaaaagcagctacataggcaatatgcaaataaatgggtgtgtctatatgccaataaaacttatatacacaaaaagaggcagcaggcccgatttggcctgtggggcccgtaattagcaaatccctactccgatagaaagaaagtcaggaaaagaagacctggtaaggcacaggccaagtccattttactgatgctgaacttatgatttctgatgctgcctctaattccttctgtagactcacgcaatctacccatgtataaac

SEQ ID NO: 533193 - DNA, 578 bp, Homo sapiens
  misc_feature (322)..(322): n is a, c, g, or t
  misc_feature (326)..(326): n is a, c, g, or t
  misc_feature (365)..(366): n is a, c, g, or t
  misc_feature (431)..(431): n is a, c, g, or t
  misc_feature (489)..(489): n is a, c, g, or t
agacaaatttatcagaagatgggtgcacaaagaaggctttagtggcttcaagaggtatgtgaccgctgccgaggacaaggagcttgaagccaagatcgcagttgttgaaaagtataacatcaggattccagagctggtgcaaaggatagaaaaatgccatatagaagatttggactttgcagaagtagcattctgggcactgtgcacaaagccaaaggcctggagtttgacactgtgcatgttttggatgattttgtgaaagtgccttgtgcccggcataacctgccccagcttccgcacgttcagagttggaaaggtccanttgntttcctggcagcgcactgcaatggcgcacattctactgnngtatgttgccagtaactcgagccaagcaagcgtctcatcatgaccaaatcattggaaaacatttngaacttggctggggagtacttcttgcaagcagagctgacaagcaacgtcttaaaaacnaggccgtggttgccgcctgggccttggccggcttgggggggaaaccaaaggcttggccaaagcaaaaaattggccccaaatttcccccc

SEQ ID NO: 533194 - DNA, 615 bp, Homo sapiens
gaggacgtaacggaggctttttgaagccgttgccggagccatgacccttggtggccagtgtgagctcgttctacagaagcatatgaaaaagcatagcgactcggatatgggaaagcgccgagatgacgacctttctgctgccgcccgcaagcagagggacttggagatcatgcatcacaagcagaagaaggcaaacgagaacaatgaggaacccaagtcgctttgcagctacgcgttcaaccctcttgccctttgcctgtgtgcctggagccagtcccaccacgctcgcgcttgcttctgtagtgatcacaggtaccagcaccgatagcattgcctttgccctgagtctgcacaggtacccttttgcgcttacttcccctcaggtagcctctgtccccctgtgccactcccgagggcgagggagttaccccttcccagagctttttattcctgagaggctcaccccaatgcattaatagcagctgtgtatacagagacatctggagatctccccttggcggccgcctcgcccagtgccctttagatatagcaggtttatgatgcggctgcattttttgccaacttgaacatttgccccatttcaacgcttcttcc

SEQ ID NO: 533195 - DNA, 347 bp, Homo sapiens
  misc_feature (221)..(221): n is a, c, g, or t
  misc_feature (244)..(244): n is a, c, g, or t
  misc_feature (251)..(251): n is a, c, g, or t
  misc_feature (267)..(267): n is a, c, g, or t
ggtggccggtcgtctccgggcctctagtcttccctgctctccgaggtagagcggggtatggatgcttagtggccctcacttctctcggtctataccggccccatctgagcacccatggctcaccatcagatcaaccttggattttacatcataaggtattcaccacgggagcttcacttggttactaaattattaatttctggctccaaaatggtatctcngaggctgagcattataagaaaangatctcngctccttttcattacngaaaatcaccgggggcttatttcagaacaacttccacttattttccatgggcccccaaactccctaagttaaaagtatgg

SEQ ID NO: 533196 - DNA, 214 bp, Homo sapiens
acgtacccaaaaatctaggccagtgaccccccccaggtctggtacattcaaggggggagctggctcccctgacgtgcaaataaaggggtccaggtccctcgccaagtcagcagcaggtggggtaatggggttcaatgccccaatgcactctcgctctcaaagtggagaaaagggggggaggggctagcgcaaacttcaattccgtgggaagggg

SEQ ID NO: 533197 - DNA, 322 bp, Homo sapiens
gagcccttttgggtccccctttccctgggccccagccctccctttctgggtgcagaaaacgaactaaggttgcctaaagggcagatttgccccccccaagtttttgtcctggcaaacagggttgttttaaaattatgcgctaattttggatgggggccccccaaaggccttacttaaagattgaaatttccaaccatctttagtttttcaatgggaaaatatcagctaggggaaaaccctccagccccttattattttttgatcttcaggtggatttttgggaaaattttaaaacatctttttccatttttgaaaaaaaaaa

SEQ ID NO: 533198 - DNA, 371 bp, Homo sapiens
ccgtgtcaggtacctggtcatccatgatctctcaaggagatgtacaaggaaattcatattattgatatgtctgctaacacaaaatccattccatagcccatagatcaaggagttatttcaactttcaagacttattatttaaggaatacattacataagcctacagctgccatagatggtgattcctctgatggatctgggcaaagaaaactaaaaaccttctagaatgaattctccattctagatgtcattaggaattcatgattcacaggaggaggtcaaaatatcagcacaaacagtttggaaggagttgattccaatcctcatggatgactttgaggcactaacaacggcctcactgacaacggact

SEQ ID NO: 533199 - DNA, 613 bp, Homo sapiens
tctttgtttctggcccatcgcctaataagaagggtaaatcttctgagctcagaagtgaaggacggcccaattgttctccttagggaacgaaaagccaagagattgttttacagcccgtgctctaagggcatttgaaagactgccaggtagggcgagcctgaaatggtctgggggattctctctagccgtgactccgctgctttgaaggtcaactgagaagtcttgtgggacacagacttgagttaggaagccctcagtcccttgccttccacggtggccagccctggtgccatcattgggtgaagccccccccggattcacggcccccaactgcttcagggtacttcgtagactctgcctccctacatggcgaaaaaggtatttgggttctcctccggtttttttttaaatcgtgggtggtgggcaccggtttgaaccctcggaaacccctccgttgacagttgttttggataggttgggggtcccccatggctgcctttgaaggcagtgtctatttttaggggagggcttcccttttttttgtggccattccctttccttttctggaaataaaatgtaaaacctggacaatataaccaagtaaaaaaaaaaa

SEQ ID NO: 533200 - DNA, 165 bp, Homo sapiens
caaaagcatgtaaatgcaacaaatttcattacctcacctaaagcagcattcaaatgctagtggcaaaatcaaagattttttcaatcatgaaagaagtagcatccaagcacccaccctatctttaaaaaatttatttcacagatattggcctaaatgaaggggatc

SEQ ID NO: 533201 - DNA, 862 bp, Homo sapiens
ttagccgggcggtacctttcaccgagctgtgtccattgcccttttgggcacattaggcagttgtccaaaaccgggtggtccctccgatttcccgggttttgtgaccacccctcccccggatactgccacggcctgtggtgaaagttcgtccctcccactgggccacctcccaatgtgtgcgccttcactcctgggaccttctctttagccgatcccggcaccttccgggggaccccggcttctttgtggttactgacccccggggttaccccccagcctctccggaggcattttatgttacctacctacccttgcgctgtgttaacaccagattctcctctgcgctattggaccattgctctccccatgcaccaccagggagctcactccgtgggtttaattggtggatgctggctcgggaaattctgcgccatgcgtggccaccctttcccgtggcacacccctggggggtcattgcctgatctgtacattcttaccagagatcctgaagagattgtaaaagaagagccaggcttctttctgagaaggccagtgacccaggaggaatttcagggtgaatggactgctccccgctcctgagttcactgctactccagccctgaggttcgccagactggtctgaaggtgtcaccaggtgccctctgtgcctattcacgccaattccctactgaaggactggagcgctcagacctccccggaagactggtttgccagactccccctgctcaggcccctgaatgggtaggagccacccctgactggttttaagactgtttttgcataggcttttaagacccagccatggaaaaatggttgatggaaaataaacacccagttttta

SEQ ID NO: 533202 - DNA, 426 bp, Homo sapiens
  misc_feature (174)..(174): n is a, c, g, or t
  misc_feature (177)..(177): n is a, c, g, or t
gacgtaggctttcctaccatacagcctctgaccaaactaggctgtcccgaacccctggtaatagaattgtgtacccttatacccagaaggttgggaaagcacccaaatctgcatgtggtgtgtgccccggcagacttcgaaggggttccgtgctgtaagagacccatataaagntgntttagatgaagagttggtcccacaagaccacaaagagaaacacatggcacgcacacgggcctcattgggtggtgtccacatgtggtgctataaatgtggtcgtgaccacggatccagcgtgcgtttccttatcgaggaccacgaaaaatcggttgtgtaaagattgttgaaggccccagccccgagtccagaaagcgtaaattaaaaaatggaacttttttgagttaattaaaatggaaagacccctgt

SEQ ID NO: 533203 - DNA, 124 bp, Homo sapiens
tattctcattgctttcgcgtttgataaatgcaggctaaaatcagtcccctgctggatctgtgaaaataattaacgtggcaggcaattacactgaggaggctctagtccccggctttctacttaa

SEQ ID NO: 533204 - DNA, 363 bp, Homo sapiens
  misc_feature (40)..(40): n is a, c, g, or t
ttttttgaacagtctgggaaaggaaaatggatttacttgntgattttgtttatggtggaagcaccatgttctgttccttttttaggttcagtttgttgtgtaaatggtggttttttttggtgtgagatttggtgatggtggcagggttcctttgaagagatggtttcactttgtggtttgaagaacaaatcagagaagagtatggtttggccagaggccccatccggtccatgtcaccgtgagtacacccctatgattggtttgttgtcaagaagtaggtttccaccaggtgtatttaacactacaatgcattttttaaactatatttgcatccaagacaataaagacaccttattttttttg

SEQ ID NO: 533205 - DNA, 112 bp, Homo sapiens
cacgagcaagacacgccacgcacctgcaaccaaccgaccgtgtgctgacgaacatcgcggcggcccagacgagccacacgcagtagcacacgcagccatgtcactagcccgt

SEQ ID NO: 533206 - DNA, 342 bp, Homo sapiens
tgcacctcatggaaatcttcacaagtcgaaaagataccagaatgaataatctccgtgagaataaccccgctcagagatcactacacaaaacagacaaggttcatatatgactactcttcggtaaaaatgtatcttcaaaagaaagggagaaaagaagttcactaaacttatactgattcccagtgctaaaccaaaactgattccatttcacgtccgtggggcaaaacttttcgcctctcacaccctgttcatctacccacaacaccctctaacaaaataaagacataagtaaatcaaaatttgaaatcagttaaggaactcttgcaaggaggctcaccacgg

SEQ ID NO: 533207 - DNA, 280 bp, Homo sapiens
tgatctagaggatctcagggcgcccttttttattacatgtatcctattagtctggtccctctagagaaacatgactaatacatggagtaagatagttcctgtcctttttttttttttaaaaaagaaaagggaatttggggatatggccaaggtgggaaggcaggggtaatgggaaggcaaaacaagggaagtgcattgagaccctaaagctcgggggtcaaaaaggttcttccaaccttcagcttccaaaggtaatcgggaaattacaggtgatcccaca

SEQ ID NO: 533208 - DNA, 323 bp, Homo sapiens
ggtagagatagggctttgccttgttgagcaggcggctctggaattcataggctcaagggatccacctgccttggcctcccagagtgttagaattacaggcgtgacacatgcacccagcctaatatttctaattaagtttagcctgtgtatatttcatctagcaacatgagtaaaggaatgtaagtctagatatacaaaggtttaatgtctgcctttttggcgataaagtcatttactgtgtgtggaaccccttttctttctttctttttttttttttttttccaagactggatatcactgtgttgcccaggctggagttcagt

SEQ ID NO: 533209 - DNA, 213 bp, Homo sapiens
gatcccgccggaagcgccaggcactgatggcgtgcacccgggatgacgagatacgagatacgctattcaagaggtggtgctcgactcgggtgactcaggtggtgaggcgacgagcaacctgcgtgatcgtcgcgttcagctccgcaacgatgtttcgagacgcgtgcgagagacaagtagcacctactcggacgatggagcttcgctcaatcc

SEQ ID NO: 533210 - DNA, 377 bp, Homo sapiens
cgtcgaccaagattttatatttacaaaacattgtaagaagtacaaagtcaatagtggtactgttgtagagaagaacatgtttcttttaagtgtcggtctagcttttctacccaaaatctcccaattggcctgtaaagccacatacaagaggaagataaacagcctctcttgacccctcttgacccctaacagtctttgaacagtgagttggtaaaaacagtcttcaagagtacaacaccaaaagagacccgtcaatagtattgtggcaggtagcattttggttatagttttgggccagtaagcgaaatgttgctggttcgaaaaaagccggcaaggtgaaatatctgtctatgtgcccacgagcaaggcgcgtcgac

SEQ ID NO: 533211 - DNA, 1295 bp, Homo sapiens
acccactgtaggaacagcgcagattccgcacatctacagcagcagtcactccactgcaggatagcaggcacagattcccacatctacagtacgggaccacactgcaggaagagtgcagattgcccacatctacagtcacggcatcctcactgcaggaacagcgcagattgccctcgatgctaacagcacagctactccattggagggataggtgcaaattcccacatctacgagcacagcatgccactgcaggaacagtgtacagattcccacatcatacagtacggtaccacacgtgtcagtgaacagtgcagattcccagatctacagtacggcagcccagtgcagtgaaacagcgcagatttcccgtgatctacagtcacagcatctcagtgcagggacagtgctagattcccaacatctagcagcgagcagtgccacacgtgcaggaacggcagcagattgcgccaaatctagcagtgcaagtgacccactggcagcgacacagtgccagatctccgcacaatctaacagacaaacgagagatcgacacctggcaggaacccagtgtcacgaattcacctctgcagtcgcgccacaagcgagtactgccaagtccatcaacatgaacgggaagtcaacaccaggccacggaccgccaaggccatacgccacacggggcacaaagacgaacactaccagtgcaccacacgtccggccgaacgcaacacacctcagacccgacaagtacatcacccacgacaacacaccaccccgcagcccgacccagagccacaccagcgccagaaccagcatgaaacaaccataaatacgcgacacggatgaacgacaacaaagaccgagccacacccacacgcaccggcacaaagcagccaaaaccgaccatgaccaccaggcacaaaagaaacgcacactgaaagcgaatcgagaacacacaccgaacacaaaagcgcaaagagcgaccacacgaacaacgcccccagagtgaccacccggaaacaccagcacaaaaacaaagacgcaaggtgcacacaacgcgacacgccgccacaacggcacccgaaaacaagagcaaaacgcagatgaaagaggactgcaaaagggacgaccgcaaggccaagcaacgaaaaccaagggaacacaaatacacaaacaacacagacaaatacaacaaaggataaaagccaaaacaccagcaagcaggaggtacaacatgccagcaaccacaatacacgagcgcaccggacatcacaacgcgacacgcacagagaccc

SEQ ID NO: 533212 - DNA, 153 bp, Homo sapiens
gccacagacctacgccagagccacagcaacacgggatccgagccacgtctgcgacctacaccacagctcatggcaacgccggatccttaacccactgagcaaggccagggactgaacccgcaacctcatggttcccagtcagattcgttaacc

SEQ ID NO: 533213 - DNA, 169 bp, Homo sapiens
cagaccaaaccaatgtaggttgatcgattgatgtctatgtctccataaaaggtatgcaaccaagctgtatcctgaccaccttgtgcacatgttctcagcatctcctgggtcacagaatattgatgagtcatattcggctcacaataaatctcttcaaatgttaaaaaaa

SEQ ID NO: 533214 - DNA, 700 bp, Homo sapiens
  misc_feature (184)..(184): n is a, c, g, or t
cctgcaccggaagtgctgtcggcctcaccgtaggtggtagtagttccttacaacaatgcctgcatgcaaaagctgaacaagaacagtagtaagggctacggctaagacagattctcgctcgcatacagctgggcacaagtttcctgtggaccgcatcccaagccacatgaagactcgctcctcnatccatgatagggtgggtgccactgttgcagtgtacagtgttcgatgtctggagaacctcactgcacaggtgctgaagctgacaggtaatgcttctaaggatctcgaagtatagcgtatcactccgcgtctcttgcagcttgcaatcagtggtgatgaagagttgtattctcttatcaaggccaccatagctgagggtggtgtgatccctcacatccacatatctctgattggaaagtagggtcagcagatatctgcttagagggatgctttatacgaccctcttcgtccccgtcattgtactgtcagtgggacacaagaaataatggggatatgtggaatttttaacaacagttaaatggagtagcatagacaatgactgtagacgtgataaaagaaacatttgtatgttcttagacccgaagtttgatcaaagtaccgtttcatgtggtgacagtggtgtgttaattgactaggtttccccgtgtgttttatacaaaaatggaattgatgagcc

SEQ ID NO: 533215 - DNA, 967 bp, Homo sapiens
  misc_feature (619)..(619): n is a, c, g, or t
  misc_feature (630)..(630): n is a, c, g, or t
  misc_feature (686)..(686): n is a, c, g, or t
  misc_feature (688)..(688): n is a, c, g, or t
  misc_feature (694)..(694): n is a, c, g, or t
  misc_feature (756)..(756): n is a, c, g, or t
  misc_feature (765)..(765): n is a, c, g, or t
  misc_feature (781)..(781): n is a, c, g, or t
  misc_feature (787)..(787): n is a, c, g, or t
  misc_feature (864)..(864): n is a, c, g, or t
  misc_feature (877)..(877): n is a, c, g, or t
  misc_feature (884)..(884): n is a, c, g, or t
  misc_feature (887)..(887): n is a, c, g, or t
  misc_feature (906)..(906): n is a, c, g, or t
  misc_feature (927)..(927): n is a, c, g, or t
  misc_feature (934)..(934): n is a, c, g, or t
  misc_feature (937)..(937): n is a, c, g, or t
  misc_feature (941)..(941): n is a, c, g, or t
cccaagagtttttgtgtagttgtgtgtgcgcccgggggtttgtgtacgccctggttgtgtgtgtctggtgtcgacctcccagtcttctgggtgtcccttgtggccattcgccgtttcccgacttgtgcctgttatcgtcttccctgctggagagtggttctttccagggccttccggggcccctgttcatctgggggccctggcaccggatgagctcctttgtagtgtgccatgttgctggggatcttcatgctgccatctcccctgcccttgtcaggcgttcccctcttgttctgttgttatggaaacatagccacacgttgataattgaagaacagaatttttttggttcctgtaacgttcagatcttgatgagcaagaccctatactcagaggcgacaagcttatttataaagctgaatcctgctaaagtgctgacatgaagactgctggtgcacagccatctcattttcgcccctccccagatagaagccagttgtccccccaatactctgctccctccactgctggatccctgtagggagaagacctgtcccacagtgaccttccgaacagccttctgataccaagaggattcagtttccatcttctcaacttnttaacacaganacacttcctgcgagcatatcgacaactctcgggccaggcgctgtggctcacacctntnatcccngcactttaggaggccgaggcaggcggatgcctgagctcaggagttcaagatcagtctgggcnacacgatgnaactccgtctctactnaatacnaaaattatccaggcatggtggcgtacgccgtagtcccagctactcaggaggctgaggcaggagaatgcttgaacccnggaggaagaggtncagtganccnagatcatgccacatcactncaacctgggcaacagacaagnacccatntcnaacnaaccttaccaaccaaaaaaaataaaa

SEQ ID NO: 533216 - DNA, 219 bp, Homo sapiens
ttatgtattcatgacgtgggacaagtttataatgcaaatatcactcattaaaaaacttaggtacatattacaacattacagatacttctctttaagctgctttggtttcaccatggagcacttggagcatcaattcacgttcaagacacctaaagtacgcagtcctcccaggtaaatattcactacaaatgggaagcatcttgcctttttcaagtatat

SEQ ID NO: 533217 - DNA, 195 bp, Homo sapiens
  misc_feature (41)..(41): n is a, c, g, or t
  misc_feature (165)..(165): n is a, c, g, or t
tgcctgagagccaggtggtagagatgtaatgtggagatggncgctgcactggcgtggactgagccgattctgaacgagatgcgtgaccagtatgagaagatggcagagaagaaccgcaaggatgccgaggaatggttcttcaccaagacagaggagctgaaccgngagtggccaccaacaggtgagcgtggtgca

SEQ ID NO: 533218 - DNA, 499 bp, Homo sapiens
gcggatcacctgaggtcaggagttcgagaccagcctggccaacatggtgaaacctcatctttaataaaaatacaaaaattaactgggcgtggtggtgcccgcctgtaatcccagctactcaggaggctgaggcaggagaataacttgaccccgggaggcggagtttgcagtgagccaagatcatgccactgcactccagcctggtgacagagacagactccatctgttgatagtgaggtggaatttcaactctatagccaaatccattatgcccaagatcttgatgatgtcattagggaggaagagcatgaataaaagaactcttggaattctgaatctttgcgtagtaaaccaaatcaggaaaagcttattgtcctttcagatagtgaggtcatccaactgtccaatgggacagaggtcattcctttttctgaataaaacagtttttttggttttataggaaaaaatggttgaattttattccaaaaaaattgccctg

SEQ ID NO: 533219 - DNA, 376 bp, Homo sapiens
ttgtcagcacccacttcgatcgctgatccagcagccttggcctcccaaagtgctgggactacagcatagccacagcacctggcatcagctagtttgttttttttggtttgtttgtttttgagacagagtcttgctcctgtcgcccaggctggagtgtagctcagctctctgcaacctctgcctcccgggttcaagcaattctcctgcctcagcctcccgagtaactgagactacaggtgtgcaccaccatgcccagccaatttttgtgttttcagtagagacgaggtttcaccatgttggccaggatggtcttgaactcctgaccttgtgatctacccgcctaggcctctcaatgtgctggatcagcggatcgagt

SEQ ID NO: 533220 - DNA, 249 bp, Homo sapiens
gtgtactcagaccctgttcacctgggtgtcacagtaaaggctgcagaacagcatagattgctgccttctccttcttctggaaacttcatcccaggaggatacccgcccaatgccaactggagcccttttgtatgaggtgtctgtctacccctgttaggaggtttatcccagtcaggaggtttctcccagtcaggagtcacggggaacccacttgaggagacagtctgtctcttagcagagctggtgcac

SEQ ID NO: 533221 - DNA, 413 bp, Homo sapiens
gcacgaggcaccgatcatcaagccgcccccgggagtttcttctacgtcgcgaagtggcagcccggtgatatcaatcaggtgctccgggcggctgatgttctctttcatcaggtccagcagattggtgccaccggcgataaaccgcgacgccgggctgaccaggtgcaccgcctcctgcacgtcggccggcttgctgtaatggaagggattcattgctcacctccctgcacgcggcacgccggcaaggcttcttcgatggcatcgcggatgttgttgtaggcgccgcagcggcaaaggttgccgctcatcagttcctggatctgcgcggtgtcgtgggcacggccttcacgggccaggcccaccgccgagcagatttgccccggcgtgcagtagccacactggaaggcatcgtg

SEQ ID NO: 533222 - DNA, 193 bp, Homo sapiens
atctcggcccctacatacccccatttactcaaaattttcaacatcacccatctatctatccctccctccaaccattcttccatgcatccgtacttccaaataactatccatgaatctataacttaatccatccctccctccatccattcccattcctccatgcatccatctatccatccatccattctaccct

SEQ ID NO: 533223 - DNA, 267 bp, Homo sapiens
  misc_feature (56)..(57): n is a, c, g, or t
  misc_feature (82)..(82): n is a, c, g, or t
  misc_feature (163)..(163): n is a, c, g, or t
  misc_feature (202)..(202): n is a, c, g, or t
  misc_feature (225)..(225): n is a, c, g, or t
  misc_feature (246)..(246): n is a, c, g, or t
  misc_feature (251)..(251): n is a, c, g, or t
gtgggaccatcctggcaaccccggtgtttggctgggttctagcgtagcgtctgtgnngccggtggggacctgcggtggagtnggaggccagtctcaccaagaggtggagaggacgggcttaggctggagcgcctagaggagcatttttccaggcggggcccangcagaggctccgacagggagcctggccatagtcgcgcanccgggaggtggagcgcgtcccanacccgagcccccgacctcagncaaanccatttcttctgtcct

SEQ ID NO: 533224 - DNA, 256 bp, Homo sapiens
  misc_feature (56)..(57): n is a, c, g, or t
  misc_feature (82)..(82): n is a, c, g, or t
gtgggaccatcctggcaaccccggtgtttggctgggttctagcgtagcgtctgtgnngccggtggggacctgcggtggagtnggaggccagtctcaccaagaggtggagaggacgggcttaggctggagcgcctagaggagcatttttccaggatgcctgtttgctttatgtgaccacagagcttacacatctgaatcaggcacaaactctcagattacagacccactatctctgttattgatgtcgtccaatgga

SEQ ID NO: 533225 - DNA, 153 bp, Homo sapiens
acaccgacgagcaggcactggagaccacttcagcgttacgaccttcctgaggtggacgtgtcaggaccggagcacagcgtacagggtaatagtttcatccttaccaccgggctctcgtgctgggctgacgggacctgtgtgagtcttgtctcg

SEQ ID NO: 533226 - DNA, 419 bp, Homo sapiens
ctttgaaggtaaatctaggatgacagtcaacagatcagtgattgccaggagtctggggtagagggagggaagaacagatggagcacagagaatttttagggcagtgaaaatgttctgtatgatactatatataatggatacatgccattatacacttgtccaaatgcacagaatgtacaccaccaagagtgaaccctaatgttaactatggactttgggtgatcatgatgtgtcaatgcaggttcgtcaattgcaacacacgtaccattctagtggagggtgttgataacaggaggctatgcatgtgtgggaccaggggatatatgggaaatctctgtacatgcctctcaattttgctgagaatctgaaactgctcttaatgaagtcttacaaaaataaagaagtctgctttgccttta

SEQ ID NO: 533227 - DNA, 188 bp, Homo sapiens
tctagaggatctccaccacgttgcacccctgactcattaggactagtaagggggaagggacacacaagaagaagggcacctagttctacctcaggcagctcaagcagcgactgcccctcctctagctgtgggggtgagggtcccatagtggtggcacaggccccctatgagtggggtaatctcttgtg

SEQ ID NO: 533228 - DNA, 287 bp, Homo sapiens
tattattcgcatcacccctacacaccgtcgttcacccccgtctcttccttctgcttatcggtttttggaacgggatccatctccaggcagcccaccctggtggggcttgtttcctgaaaccatgatttcttattatcatacataagtctgtccatgagtgcttgcctaccgttgttcggagtctcgctagcctccctcccgcggtgaggtttcttccttctattttgataaattccgttctgtggagatttttcaaacattttttcgactatacataagttatcggc

SEQ ID NO: 533229 - DNA, 93 bp, Homo sapiens
aacatcgaggtcgtaaaccctattgttgatatggatctctatgaataggattgcgctgttatctctagggaacctcaccgttggcaagttatt

SEQ ID NO: 533230 - DNA, 761 bp, Homo sapiens
  misc_feature (48)..(48): n is a, c, g, or t
  misc_feature (67)..(67): n is a, c, g, or t
  misc_feature (73)..(73): n is a, c, g, or t
  misc_feature (96)..(96): n is a, c, g, or t
  misc_feature (416)..(416): n is a, c, g, or t
  misc_feature (438)..(438): n is a, c, g, or t
  misc_feature (449)..(449): n is a, c, g, or t
  misc_feature (731)..(731): n is a, c, g, or t
gtttcagggaaagagtgtttttagccccctccagtgagggtggaggcntctccattcccaatgcagnaaggcngcagcagccacgatgattaggcnttggaggaggaagtgaacggatggggcctcatcctcctgcctccctaaagggtgagggtggaaggatggggctgtgccctcttagggcagggaaaaacagcttggaggggtttctgccatcagagatcccataggaggcaggtcagtcctgcagaatttctccccagtctggcctccagcctccctggcccctttctagaggcctccatcccactggcggcttgctcctgccaccgggcctctgcacagtcacctcctgcagcctggggagtgtcgcctctccacgtcctcaccggcgtatgcctttgcatttcccagangcacgcttcaccccactgagangtaactcagtnttgtgggatcccactgccctccaggtgccgctccgagtgctctacacagattttcattcagtccttgcggcacacgaaggtaggcggccccactgccctcacagaggcttcccatgcaggagccagtgactggcggaggccgctcacactcaggctccgcgaactgcctccctgccctcccctgccccggacagacggtcctccataagaggcaggatttccctgtggtccaaaggtgtgtgtccctgccacattgggagtacagctcactgcggtcctgtncagcttgcccccgtctcccatccacatcag

SEQ ID NO: 533231 - DNA, 681 bp, Homo sapiens
cgtgacgcgtgggtcggcccacgcgtcgctcctctcttctcgtgaacctctcttctctttctcttttcttacatattctactagttgtgttccccttcttcttctcctttctctcctttttctccctcctccttgtctcttttactccattcctgcagaagagagagggctaaacttaaagaaaaaaaaaagggaggaggaggaggaggaggaaccccgcgtacgaatacctatctagatcggttatttatacattttatgattttttttgggagggagggtgtcgggttgcccggctgaagagcaagttatatagaatactaaaaaaagaacattttagggcgatactccagggtttgtttaaactagctcgtgtgtgtatatagcagaagaggcaagaagagaggagcacagacaaggaaggaaccacgaccgaagggatactttatatttcagacctgtctttttgggatttgttcatcttcggctattaccgtgttacccccgttttgttggggcaatctatttaccttcgcgggactgagaaactatagacataattccgacggtggattttcgatcgccgggagttgaatttccccggtatgcggcaccccccttcgcacacttccgaagacaaggcgcgagaccccgggccacggacacacaagagcaaggtgg

SEQ ID NO: 533232 - DNA, 321 bp, Homo sapiens
  misc_feature (117)..(117): n is a, c, g, or t
  misc_feature (194)..(194): n is a, c, g, or t
  misc_feature (309)..(309): n is a, c, g, or t
gagagagaggagggaagccggggaagggggtaggaagaaagctagaggtggcctgcaagctggggctgggggcccccggcgggcggccacacataaatactatggggagtttagccnaatccctgagctccgcgtgtgtctggtggctaaacattctctttctctccggtgcctctgtctcccctcgtgtcccnccctcccacacctccctgaagggacgcccattgggcgctccattcagtggcatgcagggagacctatgggttcagcacacccagagttttatatacaggataatttggtcctganatcaaggaccag

SEQ ID NO: 533233 - DNA, 348 bp, Homo sapiens
ctctattggtggaatactcctcctactgaggccatcaggacttgagggctgtttcatggatcgaagtacctcctccagctgtctggctcggatctacggcacctacaacctttcctaccgagcgctccagctctccttccaggatcaccagcttcctgggcacctcttcatatttgcggtctgaatcctacagcgaagtgctatggcctccttcagctgcatctcctgacaagttccatcttctcctcatccttacatggccccgggtttaccgatgaccttcattcctctatcgctctacatcaggccgccttctcggcctcctccccagcttcttgcagggctgta

SEQ ID NO: 533234 - DNA, 113 bp, Homo sapiens
aaggagctgctatagctctcatcttcacgtcttcactgtcacactcaactctgcctaatttctgagtctttcatttccaagctagggagccagaatcttccatggttcaccca

SEQ ID NO: 533235 - DNA, 163 bp, Homo sapiens
tataagtattcctgatgtagaaaggaatatgctctatatctctgtgaacaaagtacacttgtatcaacgatcacaacacatacaatgagataccatctcacaccagtttagacatggtcgatcgattaaagaggtcagtgaaagaacagagtgcctggacgag

SEQ ID NO: 533236 - DNA, 588 bp, Homo sapiens
actgataatcatgtctaatatgatttgcaaagataggactcatttagtccttctataattgagggaaaaaaggattttaaatacatatgacttacatagctatgaactgatataaatgctgtacatacacacacagaaaacagactagatgaaattgcatcaaaatgctaatacaggttccaaatctgaaaatctgaaattcaaaatgctctaaaactcgaaactttttgagcaccaacatgaacttgaaggaaatgctcaatggagcattttggatttcagatttgggatgcttaaccattaaagcataatgcaaatattctgaatttgaaaaaatccaaaatccaaaacacttctgatctcaaccattccagataagggatactcaacctgtatttattatttctgggtgctaggactgcaagtattttattttctactttcaacttgtagtttccaaatttccaataaataatatgcaatactgtcataatcagaaacacatattatacgaggcaggcagatcacctgaggccagtagttcgagaccagcctgaccaatatggtgaaaacccaactctattaaaa

SEQ ID NO: 533237 - DNA, 714 bp, Homo sapiens
  misc_feature (72)..(72): n is a, c, g, or t
gtatgcatcatttggataaaaaatacatccaaattaagatgttttaacacataggacaaacttgtgcacttntatgccaaaaaaaaaaaaatggggtttctccttcaggggatttctagaaaacacggcctacactttatgaaaacctacataggtattcaccgtgtgacaggtagagctttatcactatctaattcttatgaggctattctatgtactttccaggtgcatccacttagcaacaagctaagagctacagggcaggctaacccttctaaaatctcccttgtgcccgtgaacttctccaatcgtggtcaccagcgtgcgtggccaccaaggccaccacacggggctaactgccctcggatcaactatttacgaacacaccctcacagacacatttacctcagtgaccagctcaccactaaagatcttccccctatggggggcctataacgtgggcaacgccaacggttctaattctagaacttatgaccacctccacaccctccccacaatcggggataacggcgccataaggcccacctcgaaccatctaccccgtcatctactaacccacaccctcgggctagaccgccactcactgatacaagcgacaaactgacacgaactgcccaacacgtggaaccccccacgccctccggcacagcggcaggggtaaccccaccccaaacatcagcgggcaaaacgaca

SEQ ID NO: 533238 - DNA, 214 bp, Homo sapiens
tggggtgttggaaggggtggaggagggggttcctgctgttcccaaaaccctttagttaaaagcgaagggatttcgcggtgctgtagttcagcgcctggggaaaggagtttgctcccaaaaaggcttcggtaggcaggggaggggcttttctcttgtaaagccaagctcatctctcaaagggttttgagctcgaatgtcagaaactgtctattcg

SEQ ID NO: 533239 - DNA, 385 bp, Homo sapiens
  misc_feature (209)..(209): n is a, c, g, or t
tgagacagggtctacctctgtcacccaggagttcagtggcacaatcttggctcactgcaaccttggcctccagggttcaagcagttctcctgcttcagccttctgagtagctgggactacaggtgtgcaacacacacccagctaatttttgtatttttttggtagacacagggtttcaccatgttggccacgctggtctcgaactcttngacctcaactgatctgcccaccttggcctcccaaataaccttaaatcttaaggttgatgcatgcctcttaatctcttgggtttgcccatcagaaactgaatcatggggctcactagggagaaatttgtcagttttaaaaatcctatgctttttcaaaagaggtttttatttttggg

SEQ ID NO: 533240 - DNA, 453 bp, Homo sapiens
  misc_feature (435)..(435): n is a, c, g, or t
cggtgcgctgtcgggcgagtctagagaagacccgacacactgcgctcactgcccctacacacatgcatgcacgcaggcacgcgcacacacacgcacgcacacgcacaaacacacaaacacacatttccctcctatgtcttcctctgataccagacgtgggccagctgtgattctgccttcatatatgttgcaatgaacagagaaccttgggttaccacaaggggatggaggtttattttaaagacactagaggctgtaaggaaacacagcagcacagccaggccctctagagacctggagcagtggcttctggggactcccagagcagccgtggtggtcaggctgtctggttgggctgctctccactttagctatgacttgacttctctttgactcttcctcaatctgcttctctttctattcccacttctcttnatgctgcctttgcttcta

SEQ ID NO: 533241 - DNA, 185 bp, Homo sapiens
cccctcgcttgtcctgcctctggtctgcctgcctcaggcctcccaaatgctgctgggattacatttgtgatgccatctggcctgtcctctagtatcttcttaactttaacgttgtctcacttataaagtagttcccagttctatctttacctaggaacctcgtgcttcaatacaaattgctttat

SEQ ID NO: 533242 - DNA, 107 bp, Homo sapiens
acctgatcaatgacagagccttctgaggacatcccaagacagtatacagtcctgtggtctccttggtaaatccgtctagttaacatttcaaggcaataccgctgttg

SEQ ID NO: 533243 - DNA, 304 bp, Homo sapiens
gggtaaaattttttttttgttgaaacggattttttatgttgcccaggctggtttcaggctcctgggctcaaaaggtcctcctgcctcagcttccaaaggcacaggccaagttgtagctttgtcccctgccctcatgccccccaaaaggttttaaaccctttaaagaattgactttcataaattggttatgttggggggccagttttttaaactggaaattgtaaattccccctgaaaagttttttcatcccgttcccctgaactaaaactccaaaaaaggatggttttgggggtccatttttta

SEQ ID NO: 533244 - DNA, 393 bp, Homo sapiens
gtggaatcatgccgccttccagcgccgccagcatcacgcggggaagttgataaagctcatgccggtacagcgatccccatttgccaccgacggcggtttctatacaaccaatcgctgcgtagtcataagcgtcctgcggttcaataccgagtttaataaattccgggatcacgatttcgtcgttgttgaacgccggcatcccgaagccgcaacggatcacctgtacgcaggcgtcgaggaaatcgttgctcattcctgcatggtaacgcacgctgaggttaggctgagtggaacgcaggcgaccgcaggattcgaggatcgcgtaagagagtggattcaccgcgtccattggttgaccatcaaccagattttgcccgccaatagtgacgttct

SEQ ID NO: 533245 - DNA, 359 bp, Homo sapiens
gactattcactagttctttccatgcctgtggacccccaatcctgggatgccacagaagagcccacaaaaatataggccagtggccgggcgcagtggctcactcctgtagtcccagccctttgggaggccgaggcgggcggatcccaggtcaggaaatcgagaccgtcctggctaacatggagaaaccctgtttttcctaaaaatacaaaattagccgggcgtggtggtgcatgcccgtaatcccagctactcgggaggctgaggcaggagaatcgcttgaacccgggaggcggaggttgtggtgagccgagattgctccattgcactccagcctgggcaacgagcgaaactccatttca

SEQ ID NO: 533246 - DNA, 1227 bp, Homo sapiens
ccgcccgcccgcctgcgctcgcaaccagccgcgaagcggcgccggggccaccagatcgagatgcgtcccacagtgtcctacacagatatgagagagcggcggatcgagaagcggttgttcgtctccaccagattgaggccgagatggatcgagaaagatattcatgtgtatttttttcgagaactcgatattgtgttgtgttgtgatgtagacatgtagcgcttcattttgtataacctaaaatctaaaaagtggccgcgcatgatttgacgcgatcgagcggccggctgggaaccacacgatctctcaaacacaaacaaaggataataaaacaaaacggggcgctggccgctctcaaaagttatctccctcacgaagggccccccgactgaattacacgcgatcccccaccgttactcctgtgatccccacggggcccccataatcggcgcacccgctactatctacggccgtctatgcacgcgcggcccatcatcgctttacaacaagcaggttgctgtcagcaccgtccgggcgggacacaacccctgtcggccaacacaccttcgggagcaccctctctcggtgtccaacgggcaccctctagctcctcgcgtgctctgttaccacacatatgtggcgcaactctcattccccctcaggcggacttttcacacgcccctcacgaggccaactgtcacgacatgctttaacaagacgcgctaacacccgcgtttataaaaccaccttcccaagaccaatgatacccgccccgacgcgtagcaaaacattgccccccaccaccacctatctaccctctccaaaactcctttttctacaccccgcaaccactcttacaatcacatgcccccaacatacactcctccacatcaccaccaccaccatcacaccacagccccgaaacacaaaacacaacaccaccctccacccacctacacacccctatcatagccactacctcacaccatcctctctcatctagcactccgtatccaacacaaccatctcaacacccccctaccaacagaccacccacccccccacacacacaatcatcacaagacacaccacataaaacaaacaacaaaccacccaaccagaccaactcactaccctcaacataactcacccacccatcattcgccctgcctcatcacaacaccgaatcacgaaccctctgccataccacccaccccccttccacta

SEQ ID NO: 533247 - DNA, 144 bp, Homo sapiens
gcaaggttcaatggttgcatcattgctcagtggtggcgcttcccacattcagtgtgcatgagtcaggtgtgctgcagtcacatgttcagcggttcaggctgtcacgtgcccagtgtgctcatatgcgtctgcacatgcagtcag

SEQ ID NO: 533248 - DNA, 168 bp, Homo sapiens
  misc_feature (38)..(38): n is a, c, g, or t
  misc_feature (72)..(72): n is a, c, g, or t
  misc_feature (109)..(109): n is a, c, g, or t
  misc_feature (134)..(134): n is a, c, g, or t
gctgacttcagagtggacttgtgttttttctttttaangaggtaaggttgggctggtgctcacagctgtaancccagcactttgagattggctgggagttcaagaccancctggccaacatgtcaaaactactnaaaataaagaaatcagccatgcttggtgctgcac

SEQ ID NO: 533249 - DNA, 143 bp, Homo sapiens
cagtgagacgaaagagattatatgaggaaatgtggagtccagcttcatttgtgtgctgtctcaaacattttagctcagagtctgaaatacttttggtcaaattaggcactgacttttacattgtcttatattatcacaatttc

SEQ ID NO: 533250 - DNA, 516 bp, Homo sapiens
gtatttatttatttactttatttttgagacagagtttccctcttgtgcccaggctggagtgcaatggtgcaatctcggctcactgcaacctccgcctcccgggttcaagtgattctcctgccacagcctcccaagtagctgggattacaggcgcccaccaccaagcctggctaattttttgtatttagtagagactgggtttcactatgttggtcaggctggtcttgaactcctgacctcaggtgatccacctgccttggcctcccaaagtgggattacaggcgtgagccaccgagcccagcctgaggtatttaattttttttttttggagatggagtttggctctggttgcccaggctggagtgcagtgtcatgatctcagttcacttcaatggtccacctccggggttcaagcgattctcctgcctcagcctcctgagtagtggggattacaggcgtgcaccaccagcctgataattatttacttaatttaattttagtagagatggggttcac

SEQ ID NO: 533251 - DNA, 495 bp, Homo sapiens
cccagccaaacccttttttaatggcatccagggaggggcccaggtttggaggggaggggttgaggaacaaaaggcaattattttgggggggaattcaccacttttccaaaaaaaaggggaaactcggttttttgttcaatcattaaaaaaacaaagggtttgttgaacttaacctcgggggggaaaaacatgggtatggccttaaaaaacatggccccagaagcttaaggcccttttttgtggaggggcaagacaaccttatgcacggccttggaaagcttaagggtgcctcctttgggaccccggaagaggcagccccattgctgaaacccttattgatgccccatggacccaagaccctttttaaaaaaaaagttcccaaaagagcagtttgggtaaatgaaactggcaaaccttttgttttatttttcaagaaactggggaaaatattggggtgaagtaaatttccaagggcgtagtttccccaaaaaaggg

SEQ ID NO: 533252 - DNA, 369 bp, Homo sapiens
  misc_feature (56)..(56): n is a, c, g, or t
tatgggcctcttttgaattccatgtctacctcttgagccaatcactgttgccaggnctggctagtcctggaccacatccccacagacagaggtggggttacctgttgtcactgacagcccatccaaactgcatataatgggttagaagcatttccccaaagagagaaatccagacaaaaaccacatctgcccaggacaccactgaaatctggaacaagagggctgagagaacccagaggattcctggaactgcttggtccaggtggcagcgtgagaaattggccctgaccttgtttttctgcattctatggatgtagtacattgaaattccagagatatatgcacaattcagtatctaatgtttgtaaa

SEQ ID NO: 533253 - DNA, 425 bp, Homo sapiens
gtgttattcagaagacaaggtccctgacccctctggtttctgcttgctggtgaggttccagctgttattgcgctctgaggccctctcctgatccaaatcttttttttgtttgtttgtttgagatggagtctcactctgtctcccaggctggagtgcagtggtgtgatcttggctcactgcaacctccacctccctgatacaagcgactctcctgcctcagcctcccgagtagctgggattgcaggacatgcaccatcagacctggctaatttttttagttttaattaagacagggttttgccatgttgagcacgctggtcttgaactcctgagctcaagtgggactacgggtgtgagccactgcacctagacaaaagtcttctttttaaataccatgtcttttatctcacactgcctggctaacc

SEQ ID NO: 533254 - DNA, 189 bp, Homo sapiens
ctagtattagaagtttcaatagcactagttagactctttaaaatactccaagggttagggcagcagagtggagcgactttagaaagaacattttaaaacaatcagttaatttaccatgtcacattgctgtaaatgataatgtgtacagattttctgttcaaatatgctattgaaacttctaaaactagg

SEQ ID NO: 533255 - DNA, 987 bp, Homo sapiens
attgaaaggaagccaggtggtcccagtgtgacagaagtggcggttgctgacgcctggaaattcccctgaaggtggagcaccagcccaacccccctgggtcccacctccctcaggcctcctccacctccagctccaccccggcgtggccctggccgctcactcctcctggggtctcctaccgtggcgctgccactcgcacctctccaagtggctgtactacacgcaccgactcacgcccgtgccccgccctagagcgtcactccaactgcgcgcgcactcgcacgcggcctgcatcggctgtcaccctgcgcctgactcctccccactcgcacctgtcccccaaccaaccacgagcctgaccccacaccccagcagccaacgggcacccagacgcgactgctacgacagccagcccactgctcccgcacatgccccctccctccaacaccaaccgcacacgacaccccgcccaggcctacctctccaccacactgatcaccccacggacacacccgccccgctgccacaccactccgccccaccccctcccgcctgcacaccccccccgcaacacaacgcggcccagcctccacagcccccgcacagcacgcggcccaacacgcaaccaccccactcacgaaacaactccaagaccactcatacctccacagcagcaccagcgcgaccacgcacacggccccgaagcgacaccctggcactttaccaaaccaacaaagttcgacacagccgacaccgccgccatagcaccgcgagcgcacctcggcgccaccccttagccccacccgtgactcagaccttcccgcttgccccccaccaggcccacacacctgcgaaggcactcgccctcgaccacgcacctccacacagcccctagcacggaggacatcgacagcgaggcgccggcaactaatggaccgacaggacccaacgaacaggcaacagaagtcaactagcaggatgcacgca

SEQ ID NO: 533256 - DNA, 254 bp, Homo sapiens
agaaacttagtttagcacagttttaccctaacgtaaaaactccatggattattccggctagcccaattttctagatggtgtgtatcacttgaatattgagattctgattttttattttttgctctgtgccttaagaggcacattcttgtttccattcgagtttggggacatttacaaagtatactgtagcatacttaaattttggttataattcaaattttcattcgtatatatctttaataatgcgaaaggga

SEQ ID NO: 533257 - DNA, 389 bp, Homo sapiens
  misc_feature (6)..(6): n is a, c, g, or t
  misc_feature (9)..(9): n is a, c, g, or t
  misc_feature (362)..(362): n is a, c, g, or t
  misc_feature (382)..(382): n is a, c, g, or t
cgtgcnccngagcctggcccccatctctacttttaaaaataaagaaaaaagaaaaataaactgaagccaggcacggtggctcatgcttgtaatcccagcaatttgggatgccgaggtgggcagatcatgaggtcaggagttccagaccagcctggccaacacagtgaaaccccgtctctactaaaaatacaaaaattagctgggcatggtggcagacacctgtaatcccagctacttgggaggctgaggcaggagaatcactttgaacccgggaggcggaggttgcagttgggcttgagatcacaccacttgcacttccagcctgggacgattagagcttaggattttgttttcccacaaanttaaaaaattttttaaaaantttaaat

SEQ ID NO: 533258 - DNA, 698 bp, Homo sapiens
  misc_feature (252)..(252): n is a, c, g, or t
tccaagaagcgatctttaattttctggaaagtcctaaaatggttccatttttcaaaagatgatggatgccccagttcaaaaaccatattcttttcctctttcagcaatatccgggagccccaagagggtctggcagcctggatgtggaatgtgggtggactatcaagaacctggccctaccacacccaacaagtctgggatcctgggcgagcctctctggacagggctcgggtgggatggtcgcctgacctncttctctggggacacgatgtcctgtaccatggtgggcgggtactgtgatggcgtgtacgcaaggggctgggctcgtggttggcgtcgtttgggatggtcacaaacctggtcttatagaagattcacacctttttccaccaagggtcctccttccaattggtctcggagcctaacgctcataagaatctcattttctctggcggtaattctcagagggcgcaacctaagaattgaaattatcatgtgactcacagccggaatatttggcataagaggcgtgaaatttcatcctttcgtgaatttacaggggtgggaatccccagaaccgtgtttcagggaaggcgcctcgtccatcacaaccagaaagaagcgggatactcagggagtgctcgaacaaagggactcagtgggctaccctttctaattccctagggccaaaagcccag

SEQ ID NO: 533259 - DNA, 192 bp, Homo sapiens
cccacctgctacgagacacgtcaggcagtggcttgttgtcgaaggtctggccgtttccctgaggccggaaatgtgatgctgtcagcgcgtggcgatgctggcggctgggggtgcggggcttggccgtggctctgctttcggctgtgagtgccagtgacctgtagctgacccccccagctatccgtggtctca

SEQ ID NO: 533260 - DNA, 328 bp, Homo sapiens
tgaaagcacaccccagttagctcgccgtcaggcaccacttcctcgacctgccaaccgctgggccaatggacttccggctcggcggccagcacaaacgggctgcccaacaacacgcacacagcactcaacagtggcctacgaaactcgatcattgcaaaaacacccaaggttccagccgcaaagtgtgcggcccggcacgcgctgactgcaagggttgggcgcgctttttcatttggcgcagccggtgcggcttgcgtatcatggcccgcctgcatggacgcaggccgcaagccaatggaccgctcatctcacattttttctggagggc

SEQ ID NO: 533261 - DNA, 615 bp, Homo sapiens
gtaatattcccccccccgagttttttgaaataactgctcctctctccccccttactgcaccccagggcccgcggtaacccctgttctattgcacccgttgtcccccccgcccccctccttgaaaacaatgtttagaaatatttcttcccacacctccccattggcaattttgcgattaaaaatccttttcttatccacccacaccaacatttatgggctagaaaacttctgtgtaagtaaatccccgggcctcattttggtgcggctatatgtgatatttctggtagaaaaatattgcctgaccactaaacacctgggggcagagcatccggggtgacaacaaaataaccgctctttttgcgataaaagcggcccgcaaaaaaattggaacaccacgcgggtgcaaaagctgatttattatttttcctcacttctttttctttcccgaaggtgagggagtcacactgtttacgattgattatgtagtggtggtttctgtccccgaggcgagaccacagagatcatttttgtttggtgatggttcacacaagcgaggagtcagtttatgtcttgtataaagaaaaaaaaatatttaaacccccacaatagacaaga

SEQ ID NO: 533262 - DNA, 596 bp, Homo sapiens
  misc_feature (24)..(24): n is a, c, g, or t
  misc_feature (27)..(27): n is a, c, g, or t
  misc_feature (111)..(111): n is a, c, g, or t
  misc_feature (214)..(214): n is a, c, g, or t
  misc_feature (232)..(233): n is a, c, g, or t
  misc_feature (334)..(334): n is a, c, g, or t
  misc_feature (347)..(347): n is a, c, g, or t
  misc_feature (362)..(362): n is a, c, g, or t
  misc_feature (366)..(366): n is a, c, g, or t
  misc_feature (381)..(381): n is a, c, g, or t
  misc_feature (459)..(459): n is a, c, g, or t
  misc_feature (476)..(476): n is a, c, g, or t
  misc_feature (479)..(480): n is a, c, g, or t
  misc_feature (493)..(494): n is a, c, g, or t
  misc_feature (521)..(521): n is a, c, g, or t
  misc_feature (523)..(524): n is a, c, g, or t
  misc_feature (534)..(534): n is a, c, g, or t
  misc_feature (548)..(548): n is a, c, g, or t
  misc_feature (552)..(554): n is a, c, g, or t
  misc_feature (557)..(557): n is a, c, g, or t
  misc_feature (567)..(567): n is a, c, g, or t
  misc_feature (572)..(572): n is a, c, g, or t
  misc_feature (581)..(581): n is a, c, g, or t
  misc_feature (591)..(591): n is a, c, g, or t
  misc_feature (596)..(596): n is a, c, g, or t
ttttttttttttggaaaaaccacngcngtcactttattcttaagttggcactttacaaaaccacaagggagaagtccttgaaggggagacaggggtaggggattagggagngggggatggtaaagaggggaagaggaagacccagaaacgaagtcccctccaaccccatctcggggaccaagcagagactaggcctcaggctagcccagcgggnctccgggtgtccgggtgnntacagagctaggccaaaagacctcaggggaagggccagtggccctctagaagacgtgccgccattggagggacagccacgaggccaagtgttcccgtggtncccaaagaagganggtgggcctcccttncccntcccctaggccagantaactcagccgtgaggcaggggtgagggctacccattccagcagctctcaggatgctctcacgctccttcagagtctnccaggccgtggtccttntcnntcctggggggganntccgctctcttcgtgccgggcagccangnntcttgcgaanggcgtccatgaccncgtnnntcngccatgcgcncccgntgcctcagntcctgccggntcacn

SEQ ID NO: 533263 - DNA, 533 bp, Homo sapiens
gttgtatgagtggcatgtgacctgtgtcttttccttcactaagggaggagacacccctcatatgtcttatgcccaatttctgcctccaaagaaagaagtagtaaaaactaaaaggcagaaatgaaatccacaagcagacagcccggcgccacaccccgggcctgatagttaaagatcgacccctgacctaatcggttatgttatctatagattatagacattgcatagaaaagcactgtgaaaatccctgtcctgttctattccattctaattaccggtgcatgcagcccccagtcacgtaccccctgcttgctcaatcaatcacaaccctctcatgcggaccccttcggggtcgtgagcccttaaaagggacaggaatcgctcactcggcgcagctcggccgtaggaggcatgacgtctgctgaagctcccagccgaacgaagcccttccctcttcaactcggcgcctgaggggtcccgtctgcggctcgccccgctacatcacaactgaacacacggtccagcgcgttgaa

SEQ ID NO: 533264 - DNA, 413 bp, Homo sapiens
gaggaagaaaaccacacttactaatgttttctgtatctaatcaaatactcgtcatatataattaagcctcatgttaacctttttttaaatcaaccttttggacctcaactacagtcctaaagtcctggaggtaaccaaagtggaattaaccttttggctccacggattttatagttagtggaaaatgcctttaccaaatgtatttaaaatagccgtcatctcatttgtgaattttgtcgcgtattgtgatatagtgaaccctattgtccctatgaaatggtagctctgtgaaatacattcaccaaaaatcacaatttgaacatctttatgattccttaccagctgaagccagatagacaggtattaattgagctgatgccccacttgagtttatagactgtttgataactgcc

SEQ ID NO: 533265 - DNA, 247 bp, Homo sapiens
tgggctctttttttcttattagaagagcagaaacttcataaatatagctgtgcttagataccagataacaaatattgtgtccctgaagatatgacctactagaactactcacatatatagtccaataattactgagcttaataaggtactggtacaaatagcttgatacgattatgagcagggtacccgagcgtcgagatttcgtgaatcatgtgtcactatgctgttttccctgtgttgaaaattt

SEQ ID NO: 533266 - DNA, 406 bp, Homo sapiens
agggccgaaatccggtaaaggctgggggtcatgtttgcctcacgaggggtggtacaaggcggagggacgtactgtatgccctattcctcaccatcttcactctcccactgagtatcacctcacaatataggtgcccttcgcactgtgcttagcctgtgagggactaaagactcccccacagagtataaattgccatgtctatttcagagtgacagctattaatattattattgttatgactctgaaagcccactcatctttgagtctctggcaagaggtgaaagacaggtgttgggaggtggctcctggagcgtctgtagacagcatttgcctaaataatggaatccacgtgtaataatcatgcttgagataaagagcttccccatccctcatgtccacttgcttt

SEQ ID NO: 533267 - DNA, 110 bp, Homo sapiens
agtactctcctaatggctcttagatttccccggtcatgacttggaggacgcacttgcggcctcaacttcacgatctgccgagaaagctatggagtgattgaacagaagaa

SEQ ID NO: 533268 - DNA, 254 bp, Homo sapiens
tgctaggctggagtgtattggtgcaatctagctcactgcagcttctgcctgctcccgggttcaagctattgtctgcctcagcctccagtagctgggattccaggtgcatgccaccacgcccagctaattttgtatttttagtagagacggggttttaccactgttggccaggctggtctttaactcttgacctccaataatccacccacttcagcctcccaaagtcctgggattatcggcatgagccagtatgc

SEQ ID NO: 533269 - DNA, 301 bp, Homo sapiens
  misc_feature (106)..(107): n is a, c, g, or t
  misc_feature (137)..(137): n is a, c, g, or t
  misc_feature (147)..(148): n is a, c, g, or t
  misc_feature (153)..(153): n is a, c, g, or t
gatctggagagcttttggatcctgggtgatgtcttcaatccgccagtactttacctgtcttcgggaggggcaaacgaacctaggtcggcctgccccccgtgccttnngcctaagtctcttcagccacctcccaggangatctggccnntgtcngtgcccactttagatgtatctaattctcctgactgttcttcccaggggagtgtggaggtcttggccctgttccctgtcctaccaataacgtagaataaaaacataacccactgacaacggccgtcactgacaacggcttgggtaccgg

SEQ ID NO: 533270 - DNA, 430 bp, Homo sapiens
  misc_feature (106)..(107): n is a, c, g, or t
  misc_feature (137)..(137): n is a, c, g, or t
  misc_feature (147)..(148): n is a, c, g, or t
  misc_feature (153)..(153): n is a, c, g, or t
gatctggagagcttttggatcctgggtgatgtcttcaatccgccagtactttacctgtcttcgggaggggcaaacgaacctaggtcggcctgccccccgtgccttnngcctaagtctcttcagccacctcccaggangatctggccnntgtcngtgcccactttagatgtatctaattctcctgactgttcttcccaggggagtgtggaggtcttggccctgttccctgtcctaccaataacgtagaataaaaacataacccactgacaacggccgtccgtagtcacgtgcccactttagatgtctctaattctcctgactgttcttcccaggggagtgtggagttcttggcccgtgtccctgtcctaccaatcacgtagaataaaaacataacccactgacaacgggggtacccgagctcgaaattcgt

SEQ ID NO: 533271 - DNA, 173 bp, Homo sapiens
ataggctgctgctctcgctgacataaagagccttgcgttgcactgaaaaaaaaaaaaaaaaatcccaaaaagttttggtcctctagggttgccccccgaagccttggcattaaaacagcccagcgcccatttcggctaggaaaattttccttggctcttaggcacttcaggct

SEQ ID NO: 533272 - DNA, 160 bp, Homo sapiens
cagagaaagctttgttgagatataatttacccatttaaagtatataattcaatggtttttaatatattcacagatttgtacaattatcaccacattcaattgtagaacattttcgtcaccccaacaagaaacctcgtaccacaccttagcaatcaccact

SEQ ID NO: 533273 - DNA, 416 bp, Homo sapiens
cagagcaatctgtcatcattgcccagcatcagagaagcaaggagtatggagcaataagacaaacaacatgaccatggagatcaggaatggagtcaggtcagttgaacatgagcatacccataaaacaatgtacaaatgtccccatcaccaacacactcacatgaaatggctcccgagccctgagatctgtatcccaagaacctcagttgagaacatatttctggacagattcactgttgctcaagagcctgggtattgtaagcagcctgagggcaggtagtccctaatagtactccaagattcttcaaatcaagccagaatcccatctatgcttgtctccagcaaatggaggtggcccctctgctgacgtgccctctcttccagctctgacatcatgggccgcagttgcctgcaaa

SEQ ID NO: 533274 - DNA, 324 bp, Homo sapiens
ttcagatacatggtttgcaaatattttctcccattctgtgggttgtgttttcactttattgataatgtccttagacatataataaatttgtattttaaaagtgagccaccgcgcccggccaaattgccctgttcttctaaggacagcagccattggatttagggcccaccctaatccagtatgacttcatcttgatagatcaacaaatactctatttccaaataaggtcatattcataggatctgactagatgtgcatttgaggggggacgtaattcagcccatacaccaggctgccttctcttattcccagtcaccccttccg

SEQ ID NO: 533275 - DNA, 938 bp, Homo sapiens
aacaaaacttgaagcataaaaggttaatgttaggctatagagtttccttgtctccctacgtttcccttatcttatgtgccaaatgaaaatgagaggttcttaatacttttgtgccatggaccccttttccaatctggcgaagttcgtggaattcagtctcagaattaaaaaaaaaaaaattaagcaatgtgaacctcaaaagtcttagatttttttttttttgtggaaagggagtctcgcctctgtggtgtgcccgaggcttttcagtgtgccagggggtgactctcccgactctccatgggaaacctctccaaccttccggggtttcaaagggaattcctcctggccctcgagcccggggaagtttcgcggggatttaaccgggcgccaaacaacaaggcccagatagtttgggaattttcaagaacaagtgggggatttccccaggtttgggccaggagggtctggaatccttaaacctcaaggtgatccacccgtctgggtctcccaaaggggcggggatcacgggtgtggacgccacggggccggacaaaatggttatttcttcgccccaaaacaacatgttcaacggattggacacgggaataacctcaatctagaaaatattcggccaacaaatatttctaaatctctaaaatggtaatcactgaattggacaatagtacgggagcgggatactttcaaacggacattcatctggggtcggactaggtgcacatttcctacattttatttgtgggcacaggttaacaaattaagggtggggcgtgctctaaaaggaataaccttcgctgttcgaaaaaatgcttttgccaaaagataatccattggtattaagggggaaccacacgagaccaaggctgtaaaatttggcacaaactagtatcgtgagaaaaacgcttgtatacctgtaagag

SEQ ID NO: 533276 - DNA, 536 bp, Homo sapiens
  misc_feature (23)..(23): n is a, c, g, or t
  misc_feature (51)..(51): n is a, c, g, or t
  misc_feature (152)..(152): n is a, c, g, or t
  misc_feature (157)..(157): n is a, c, g, or t
  misc_feature (162)..(162): n is a, c, g, or t
  misc_feature (179)..(179): n is a, c, g, or t
  misc_feature (204)..(204): n is a, c, g, or t
  misc_feature (269)..(269): n is a, c, g, or t
  misc_feature (325)..(325): n is a, c, g, or t
  misc_feature (328)..(328): n is a, c, g, or t
  misc_feature (345)..(345): n is a, c, g, or t
  misc_feature (362)..(362): n is a, c, g, or t
  misc_feature (382)..(382): n is a, c, g, or t
  misc_feature (386)..(386): n is a, c, g, or t
  misc_feature (389)..(389): n is a, c, g, or t
  misc_feature (402)..(403): n is a, c, g, or t
  misc_feature (416)..(416): n is a, c, g, or t
  misc_feature (423)..(423): n is a, c, g, or t
  misc_feature (425)..(425): n is a, c, g, or t
  misc_feature (429)..(430): n is a, c, g, or t
  misc_feature (437)..(437): n is a, c, g, or t
  misc_feature (441)..(441): n is a, c, g, or t
  misc_feature (456)..(456): n is a, c, g, or t
  misc_feature (468)..(468): n is a, c, g, or t
  misc_feature (474)..(474): n is a, c, g, or t
  misc_feature (521)..(521): n is a, c, g, or t
agctctgacactgcggtactganccacaaccccctaatttgttccccccancccccaggccttgtacagctccatcaagaatgagaagctgcagtgggccatgtcatcaagcggatcagcgggggcatttgcagtggctccagccctttccnggacntgacncccttagcctggtggcngccgtctacaagcacggggccctgnttcgaaaggtgcacgcagaccctgactgcaggaagacacctcggggcaatcggggctggaagagnttccacgggatcctcaagggcatgattctcttaccttcagaagtaggagtacaagnctnggaaggccctttcaganacggagctcaataattncatcagcattcatcatgccnttgnaanttgtgtaagggannaaagtaataggcnccacgtntnctanntgcgcanagcngaatggcgggtcttnctcttccatgcncctagnctggagcagatgcagtcctggtatcactcgcatcaatgtagtatccnctattttctctgcgc

SEQ ID NO: 533277 - DNA, 281 bp, Homo sapiens
  misc_feature (86)..(86): n is a, c, g, or t
  misc_feature (107)..(107): n is a, c, g, or t
  misc_feature (265)..(265): n is a, c, g, or t
atctttgcatccctgggacgatttccagttgagcatggtgaataatctttttgataggctgttggatttgagttgctagtattttnttggggcattttgcatctgtnttcatcagggatagtggccttcagctttcttttcgtgtgtgtgtgtccctgtcttgttctggtattggggtaatattggccttgtagaatgaatttagaagaattcctttccttttgatttttttggaataatttaagaagaattagtattagttctnctttaaatgtttggta

SEQ ID NO: 533278 - DNA, 791 bp, Homo sapiens
aaatcacaaagacagtgcaacactatacctattattcggcgcatgagctggagtcctagggcacagctctagagcctccttattcgagccgagctaggccagccaggcaaccttcataggtaacgaccacatctacaagagttatcgtcgacagcccatgcatttgtaataggatcttcattcatagtaatacccatcataatcggaggctttggcaactgacgtatttcccctaataatctggtgcccccgatatggcgtatccccgcataaacaacataagcttctgactctgacctccctctctcctactcctgctcgcatctgctatagtggaggcgcggcagcaggaacgaggttgaacagtcttaccctcccgtttagcagggaactactcccaacctgagagcctccgtagtacctaaccatcttctccttgacacctagcaggtgtactcctctgatcttaggggccatcaatgtcatcgacgaacaagttatcaatgataaaaagccccgtgccataacgcaatatccagaacgccgccgtcttcgtctgatccagtcctacatcacagcagtcctactctctgcctatctctcccgagtaccgtagccgtgctggcatctaggtatactactaacagaccgaaaccgtcaaaccaacttcttcgaccccgaccggaggaggagagcccattctatacaaggactattctgatttgcgggccaacctgaagttatttgcttatcctaccagggttcggatatttcccttttggtatactatc

SEQ ID NO: 533279 - DNA, 168 bp, Homo sapiens
acatcatccactttaagcctcatttttctggtctgtagaatgaagctagtaataaaatgggctagttctttagactggtgtgaggactaggtcatgccttgtgtgtggcacatagtgggcaccaggatacaatggcaggagtgctttggcactgcatgtggggggaaa

SEQ ID NO: 533280 - DNA, 215 bp, Homo sapiens
tgctgctcatcccaaagtagtctaccttagtttaactcaaaggtagcacttgttgaaactacatgagagaaacatggctgcagagggtggataaggggcatcatgtgcctcttgtcttgatcaatcagtgccacacacagaagccacattatcttgcaacataatctccattatagcgccgttagattccatcatagacgtcatccacttccatt

SEQ ID NO: 533281 - DNA, 733 bp, Homo sapiens
gtgagagataaaagaagaaagaggatcactacagtctgatcttcctagagtgggctttagtggtcagagaaagccaaagatgaagacagaatttaagaccatatagacacgacggggtaaacaagaagaatagggcctagaagtcaggagctaaggcacaaaagtagggcagtgcctgggataccctcagaccccatggatacttgctggtctgagggtatcccaggggtctttgtgtgtgtgtgtttgtgtatgtgtgtgtgtgtgtgtgtgtgtgtaattagctgcccagatatttacatatttcacctaaaagaaatacagatttctgacttcttgaaaataatccagagttctggaccacagctctacattctttgatgacatccatcaatgagctgagatagactgcctcctttagatgagtcatccattctccagtttgccacagtccattgtatcgttgtctctgctgtattatctttggcttgcttcccttattcaccttatcagtctagaatatagattccttggaaataaggccaaaagggtacacttcagaaagattaagattgtgtgctatcagtgctttttttcagagcttaacctttcctttgttcttttatcattctatctaaatttactgcctttcttctttgtaatttctgaccttttcttcttcagtcatctgacttcatttcacttacttacacatttcttcattagtctattc

SEQ ID NO: 533282 - DNA, 832 bp, Homo sapiens
  misc_feature (832)..(832): n is a, c, g, or t
tggctgtaacagggtaatggatgatgagtccagggctccgtggctgaagccctgtgtgtgtggggagggtgcacagagcgaaagggggcgtaagggaatgctgtgaagggctgtgctccgtgatgtcggtgtctggaggcttccaaactatgtgctgatgtgtgcatgggttgatgtgcctctgtggcacacatgccgtgcgcccagtccaccctgtgcccacgatgtgagtggctgtgcctgtgtgccccttgcacaaatgtgcacgtgtgccaatggtgtgtggctctccaacaactctcacgcgccacaactctcacgcataccttgtgagagactctcactgtgtgcccttgtctctcccaacaactctcctaacacacgcgtgccaacatttgaccttctcatggcgtgccaacatttacacatctctcaaagaagtgtgcgacggtgtgtgtgacacacaaagaatgctccgcgtgcgcaggcgccccttgcgaaacctcctctctccaaaacacacaccacgggacaaatgaccgcgcgacaaacgcccccacgaacacccacacccagacaagacacacagacacagcgccagtgaacacacagcacgccaccgacaaaagacaggggacagcgcgtgcggcatgtgcgcgccaccgcgccggccatcccaactcccccccgtccgctgcggcaagcgcacacagccctccactactctcccgtggggcgccaatcgcaagtccgcagcgccgcgggccccgctggcgcgtgacgccccacaaccccggctccccgcccccgacccaggcggcgcagtactgcn

SEQ ID NO: 533283 - DNA, 683 bp, Homo sapiens
  misc_feature (437)..(437): n is a, c, g, or t
  misc_feature (554)..(554): n is a, c, g, or t
tactagccatggcagtggcctgactcggccttcccctgtcgctctgggggctatgacctccgaagagtcggggctccttcaccctgcttcccacacccgggcctgaggggttccctgcgtgagcaggagattcaagacatacagggcgcccagaaactccccgtacgcccaagagccaagggctaacctgcgtcctgagagggcagcgggagttcagtaacaacacgagtgcgacccccttcttcatgacttatggaccacccgccttactccagcccccgggagagaggggagccgcctagaggggtccttcttcgggggaggattcagtccttcctccattgtgtgatcataagcagtccgggtttaaatcctagttaagcctttaagtaactatgtgaccctgggcaagtcgcagcctttctttgaatctcgtntcatgatctgtgaaatgggagaacaatagctaccgttctctgaacgttcgaagaatcagaagaggttagatgggggaaagctccggaggctcaaactgccacgcgggagcgggtttngtcctcttcccccaggattcaaagttcaaggctgaggccgcgccggctctcaggtgacggggaagggcctcttcccctcctgaccccacgagaaggcgccgaggtcttccgcccccgggccgggaagct

SEQ ID NO: 533284 - DNA, 331 bp, Homo sapiens
tgggacgaagctcatgcagaggggtccagatagatatgtgggagaggcttattgcctattgctatacttgtctgtctgttccttttactgctgtgacttacttaagcgctgagaccatctccattttcccatgctgttgatactctataattacatcatagtgggcaaaatgcactatagtgaattaaataaagcctcttggggccaaagcagaatatattttagactcctcttttcttccctgtaactgatatgggctaggagaagtattcatatattgtgtgtttgtgcacatcgctgctggctatcattgcacttgagagtgtaaggt

SEQ ID NO: 533285 - DNA, 321 bp, Homo sapiens
cccaagttgttggtgctttgggtttttataagttgtgaataggaagatgctcattgtcttcattctccatggttgtgcatggcaaatgtgtttgagatgtggatgtataatacatcgagtaatatagaattagctggcttttgaaatacgtgcattgttcgatgcttcaagaggtattatccttttttattagcacaaatttgctagctaattagagtttatctattatagaaaggacaccgtataggttcgtaaaaaatatttacaggacgcaaaatagatctattactactttaccgactttacccccttttccagggg

SEQ ID NO: 533286 - DNA, 377 bp, Homo sapiens
tactagccatggcagtggcctgactcggccttcccctgtcgctctgggggctatgacctccgaagagtcggggctccttcaccctgcttcccacacccgggcctgaggggttccctgcgtgagcaggagattcaagacatacagggcgcccagaaactccccgtacgcccaagagccaagggctaacctgcgtcctgagagggcagcgggagttcagtaacaacacgagtgcgacccccttcttcatgacttatggaccacccgccttactccagcccccgggagagaggggagccgcctagaggggtccttcttcgggggaggattcagtccttcctccatttgggcgtacggggaggggatgctctagagacggc

SEQ ID NO: 533287 - DNA, 235 bp, Homo sapiens
actgagggtcacgttggtgtctcctgcacgactttaccctcggttcctgtcttctgtgcacgcagtacttgccgctgtgcaggcccacctctttggctctttgggtgggagcgtttttcctgcttttagctttttctaggttatggccattttgtgtcttttgcggttctgctgtgggggtttgggtttgacgggacagggagcagggtggcggttgaggaccgcttatccactg

SEQ ID NO: 533288 - DNA, 485 bp, Homo sapiens
  misc_feature (63)..(63): n is a, c, g, or t
  misc_feature (94)..(94): n is a, c, g, or t
  misc_feature (177)..(177): n is a, c, g, or t
  misc_feature (199)..(199): n is a, c, g, or t
  misc_feature (214)..(214): n is a, c, g, or t
  misc_feature (233)..(233): n is a, c, g, or t
  misc_feature (344)..(344): n is a, c, g, or t
  misc_feature (389)..(389): n is a, c, g, or t
  misc_feature (477)..(477): n is a, c, g, or t
  misc_feature (481)..(481): n is a, c, g, or t
agtttaggaaatccccccagtgaaaatatttggcctcagggaatatccaacctaggaaggggncagaatccaggaatttaaaggctttccatantccctaggcccttcattccttggttccttcaaccccatttttaggggaacctttccccccataagggttattgttttccccancccccaggcatgggagggatcnccttgagggcccaanagttccgagacccagcccnggggaacttggctggaccctccgtttcctacgaaataaaaataaaaaaattatccccaggtatggtggtgtgtgcctgtagtcctatctactcaagggtggggcaggaggntcacttgagcccaggaatttgaggccacagtgaattaggattgcnccactgcactctagcccaggcaacagaacaagaacctgtctctaaataaataaataaaaataataataataaaaaagatgttttcccnaaantaaa

SEQ ID NO: 533289 - DNA, 949 bp, Homo sapiens
ggaggcggaggttgcagtgggccgagatcgtgccattgcactccagtctgggtgacagagcaagactcattctcaaaaaaaaaaaaaaagggaattttttattaactatattttccgtgaaaaagggtttgtgggtaacctgtgtacgggtattcatttaaaagggacctttcttagtgggtttcacgtaccaataattctagaaagtgtgattaatggtgggacttttaataggttatctggaagtggcatttccttttgggccacattagaccatatgggctaggttctccaacgttttgggcgttatttttaagataaacccttggctggttcaaccaagtcagagaaacctttaagaatttggggatgtgattcttcacagtggagggtaaagaaccattcttaagataatagggaaagggcaaattacaaaggtcctaacaattttcatacgtaagagtttacaaggtaaaataaccttatccatatagggtaatctccgtggtgtagcaccagtatacaataggggatttcataaatcatggacatcagatgaagcagttataaatccacttttcacttggtggctaggaattatggtaattccgggacacttaataattccctcggagcagttcccattggagggttgagttcccctgttcaaagttcaaatcagtcagtaagggttagagatactcaatagcgagtaacaatacgttagtgtgaggagtcttttcccttggaaaatagtggctgaacttatggtctaactttcgggattcatggggcgcgaacgtgcgctgggttgtaaatcatagaagctaatccctgtgggcggaatataaatacaccgcgaattgctagagtgggagaggaacaatctgctgagacaatggtggctgtgttgggacgcggaagtgtgttacgaaattgacacactaga

SEQ ID NO: 533290 - DNA, 172 bp, Homo sapiens
aaatgatttagatatggttatgtaacttttaaatgatttatttaaaaataaaggcctggcatggtggctcgcatctgtagtcccctccctttgggaggccgaggcaggcaaatccctggagccccggagttcaaaataagtttgggcatcatggcaggaccctgtttttcca

SEQ ID NO: 533291 - DNA, 1058 bp, Homo sapiens
agcggatacgaacccctgaggtgctgcttcgtagcgcgcccggggtctgatgcccagaggggctgtgtaatgtaccgtggcggacccgcatgcaccccctgggttgatcgccctgccccgcgtcctcgttctttcggctttgtccttcccatcgtatgtcagaactgcttgcttggagtcggcgcggtttcacgcgcggcggcggcggtcttcgcgccctcctgcgcgcgctcatggtgtgatacctggtgaccgcgcgcgactggtcgcggcggcgctttggctctcgagcagcgggtctcttgccacgggtctcggcgggggcaagccggtccgggcgcgagcgcaggcgtcgcgccgtgcccgacttctaacgtgcctctagccgcggtcgcattgcttgtcacggcttagcgagtcggttccagtcgtggttgataacaacttccagcgtcgtgtcggtccagttttatccttccatgccttggatagagtgatgtttgcactcgtggacggacacattcttggtagactactcccgtttatgcccgttgtgggccttgtgggaaacttcgcgccgagacacttggccgtcatttttaacgcccacaccattccccgagccacccggtctttcccttgtacaccggtgggttgattctactacgtgacctttccgtgtgcccttggcctgcgacggcgggggcgcgtgtcccgtgccttgggcactggcttcgttcgtgcctggattgtacccgcaatagaaccgtaatggtactggaacagcgtggtggcccggtcccgttctggctttggtcaccctggggatggctcttcgcttctcgttgcgcttcttgggcctcacaacccttagtcccttgggggtgacttggagtgctcatccctttccggaaccccatgaatactaatccgtgggcgttagacgcacgcgggacatattaggggcctcacgagaaggagtacaccctttttaatttttaactggagagaggagacgaaaaaggggggcatttccattgaaaccccgaagtccccta

SEQ ID NO: 533292 - DNA, 328 bp, Homo sapiens
  misc_feature (17)..(17): n is a, c, g, or t
  misc_feature (103)..(103): n is a, c, g, or t
  misc_feature (139)..(139): n is a, c, g, or t
tttctcatctgtcactnctattaggactacagtgcaggctgacagctatctgagtgaggtatcgctgacttcacagctcaggagtggcagcaagtgtagcctnaccatctgtgcagaggaggttataaaattagaacancaccttcaacaggcaggcagccgtgcacaacgctcctccatcctttccccccaggagctatgcagaggggggattgtggacctgctgctagttagcagcacaacccacccccattgtgtatgcagcctgacccaacccaactgctcctgcacctctctcagaaaacggctcaggaggaggaggacatcg

SEQ ID NO: 533293 - DNA, 656 bp, Homo sapiens
tggagacagagtctctctctgtggcccaggctggattgcggggccaatctcggctcactgcagcctccgcctgccgggtcaagcgattctcctacctcagcctcctcagtagctgagattacaggctatgcaccaccatgcccggctaattttttggtgtttttagtagagatggggtttcaccgtgctggccaggctggtctaaaactcctgaactgcaaatgatcagcccgcctcagccacccaaagtgttggggattacaggtgtgagccactgtgcccagcgtgatttttttttttattaaaagcaaacttgtccttgggtttggcaaaacaggcctgttccctctcatttagcccatcatttctgggggcctgaaccccaggggtccaaagttttgcttgtgaactttaaaaatgtgaatatgatggggggatgggcctcttctactttcaccttgggcccagggggcataagcgtggctgggagggattaggtgagccccctcgtgtatttgggaggctctgagtcttcgggaagcctgtgtagtaactctccggtttctgataaccccgtggcgtccatctggccattaagcctcagcagtgagcaagcaatccatactcattctatgtcctgtcctcctcgacccctg

SEQ ID NO: 533294 - DNA, 1352 bp, Homo sapiens
  misc_feature (217)..(217): n is a, c, g, or t
  misc_feature (299)..(299): n is a, c, g, or t
gcgcctggtggtcacctgcgtacgactttggttactgcccgagaggctactgagtggtatcagtgagaggcctttcgtggccggggccagtgcacgcatcgtgatccctgcatggatcaacggctgcgggcacagggagagacgcgggcgagcagctggcccgcgaggcacaagctatccccaatcgggacctcactacagctcataccctgcttcngcacggtctcagcaccacaggtggagaatcactggacctcgacctgtgagcgtccatcatccgagtgcatccggcctctggnacagtgcttctttcgcttgggacgaacggagtggcgtagtatccggcggagtgccgctggtggcccgaggcgccgcggaaggaccagattgctgaagtttctttgccccgttctaaggaggttgcccgcgaggcaaccgcgacggccttagcgattgaggaggtgaagtgccattcagactgggatgtgcacccacgcccgaaaaatgtcggtccagaccatgcgtaggtgatttgactcggtcgagggacgctcagacaggccgcgagacatacaaggctagcatattcctgtggcatgggctcgacattgagcggcccagggagaccccccccaaccgaccacaggctgcgcaacgggagacgagcaacaaggcaacggtgcgaccagtatgcctccccaagaggccgcttgttgccacaggattgtatccgacccgaggggccgaccttgtcaggggaccgtaattggcggtgtggcggctatttgaacgcgcggaaggtgcccggctttgggatgccgcggcgtggtttggcgtttgagcttggcacgtatgcgcttgggaggcgtccccccgcggagctggtgagccttcgtccgtgtcgcgcgtcggaaagccggctgaacggccccggggtcccggccggtgtgggccccctttctcccggcccacgggtcctgccggggttgggacaggaacgcccttcggctgggggccctgaagagcactttgcgggcccggcaacacttgtttcccgcttcagcctgctgtgtccctgggggcccttggcggcggggtcctgggaaaagggtacccctaagcggggccaaagacccttggacaagccgaaggcttgattgggcgcaacccccgggcttaccccccaggtgttgccttcccaaccgggcgagtgcggttggaagggcccgacggctttctcttggctccttgggaagcaggttgcatgaacttgggcgtctcaacggggccaacgcttgcgtggccaaattggccagattgggtttacttttgggccctcaagactgtgatca

SEQ ID NO: 533295 - DNA, 101 bp, Homo sapiens
cgttttacattcaaggaggtgtgttctgtgacgcacactggcgaaatgcaaggagtgtaagaggctagacggtattgcgatgtgctcacatcagtgataac

SEQ ID NO: 533296 - DNA, 806 bp, Homo sapiens
gcctttagctctgttcctccagtaataaaaaagttaaagttgtgcgtctctgaggctccatgaacttgaagatattatgaatagataggacgagacataatattataatagcagaagatccaaaatagaagataaaatacagacaaaaacacgtaagcagacaacaggagtaagaagacaaacaagagaacacagagacaaaggagaagtagatgagaagcaaagaatagaagaagtagaatacaaaagcagaaaggaaacaaaaaaaacacgaagaataaggaaacaaagaaataaaacaggaaacaggaaaaagaaaagaaaaagaaacacagaaagggagaaaaaaaagaaaaaagaaagaaggaaaagaaaaaaaaagaagaaaaaaagaaaaaagaagaaaacaagaaagaaaaaaaaaagagaaaagaaaaaaaaaaaaaaacagaacaaagaagaaagaaaaaagaaaaaaagaaaaaaacaaaaaaagaaaagaaaaaaacaaagagaaaagaagagaaaaaaaaagagaaaaaaaaaaaagaaaagaaaaaaaaagaaaaaaagaaaaaaaaaaaaaaaaaaaaaaaaaaaagaaaaagaaaaaaaaaaaaaatacaaaagaaaaaaagaaaaaaaaaagaagaagaaagaaaaaagaaagaaagaaaggaaaaaagaaaagaagaagagagagaaaaaaagaagaagacgaagagagagaaaaagagaaacacgaaaagagaaagagaagagaaagagaagaagaaagaaaaaaagaagagaaagaagaaagagag

SEQ ID NO: 533297 - DNA, 462 bp, Homo sapiens
tgtggagtaccaaaagaaccaaatttagaggtgacttcaaaagtactgaggtcatcaaagacaaagaaagaatgaggagctcctctcaggaggagactaacgagatataattaaaggcaatatgtaacctttttttttttttattttggaaataaagtctggatctgtcgtcaaggcgggagtgcaggggtgcgatctcggctcagtgcaacctcgtgcctcccatgttcaagcagatctctgtgcctcagcctcccaagtagctgggattataggcgtgagccaccacgcccagttattttctgaatttggggtaaagatggtgtttgccatgtgggccaggctggtgtcttgaactcttgacctcaagtgatccggcggtctcggcctcccaaagtgctaggattacagttgtgagccaccgcgccgggcctattataattcggagacagggtacactac

SEQ ID NO: 533298 - DNA, 377 bp, Homo sapiens
tcagaggatccccgtccagtaaggtgtgccacagagtagctcgacttggcctctgggcagcaaagcctacagtatctggcccgttggagaggtatcaagcccttttcttcatcatttaacgaataacattactggaggagtctaagtcatttggcatacttataaatatagaatactaactagtaagtagacggacctcataggacagaaagcatcagaaatgagaggcactaagaggaaaatcatagtaagccctagcatacaggaagtaaccaccctgagcaaccacacctcaggaagcacccaagagcaagctccacggacgagcggaagcacccacacaggacccacctcttatgtgggcacacattatggag

SEQ ID NO: 533299 - DNA, 1012 bp, Homo sapiens
gactacaaagtatgttgcaggtggggggagcatagacaaacgcatggagcatattaagaagagagtcggggcgggcggggtggctcatgcctgtaagccccagcctcccaaaagtgctgggcatttataggcagtaaaggcacaccgcgagcctgtgggcataagccgccgagctgtctttactgagagtactatttcttcttgccctagggcggctattggtggcgagcaaaaaaagggtctagttgttctgaattcgccctgttacgcccatggtggctccttgggttttcccacgcatgctgctcctgcagctccacattctgccccctgggacgggctctcgtgtggttgcccctagcatggggaggcagtggcacgaatgagagttcattgctcgcagacctagttctccctgcaagttaggaaggagcggattgctcgccattcgatgtctcgcaagtgcaaatgctttggaaggccacgtgctccagaggccaccaggaggccagtgctagggaacagggcccccactgtgttgactggccgctgtaataaagagtggcatgacctctatagagacatgctctgaagggatcttggaaaccatggggtaatccaacaaagtgttcaaagggtacatggcttcactttcagtagggcataagcttggtaacccctgatatatagatcggagtctggatatgcttagatctcagaatggaagggtactaaagaaaaattccagaaatacccggattcagatgtacaaaactgtgtgacgatcacggacagagccaggcgaagcaaagggagttgataaccatttcatataaaggcaggatttcccccattaaggacggcaagtaaccggcacgacctattggaggcaaggctctccaaaaagagccacgggatacatgcatgagcaaatctggacagtataagagcacaaaagaagtaaaacatgtatcggacacactaccagaacggctaaaccatctgcgcggga

SEQ ID NO: 533300 - DNA, 424 bp, Homo sapiens
  misc_feature (34)..(34): n is a, c, g, or t
  misc_feature (70)..(70): n is a, c, g, or t
  misc_feature (77)..(77): n is a, c, g, or t
  misc_feature (84)..(84): n is a, c, g, or t
  misc_feature (109)..(109): n is a, c, g, or t
  misc_feature (137)..(137): n is a, c, g, or t
gcctctagaggggtagaggggtccataggtaaancggccctattcaagattttaggggattaatctaggncgatggncatgaanctgtgtttgcccacagatttcagancattgccgtagaaaccccggtcgtgtancggtgaaagtggtttggtttagacgtccgggaatgcatctgtttttaagcctaatgtgggacagctcatgagtccagacgtcttgtgatgtaattaataaacgaatgggggcctcaatcgggagtactactcgatttccacctcaaggagtcgcaggtcgcctggttctaggaataatgggggaagtatgtaggagttgaagattagtccgccgtagtcggtgtactcgtaggttcagtaccattggtggccaattgctcgtgccgaattcctgcagcccggggatc

SEQ ID NO: 533301 - DNA, 346 bp, Homo sapiens
  misc_feature (21)..(21): n is a, c, g, or t
  misc_feature (23)..(23): n is a, c, g, or t
  misc_feature (197)..(197): n is a, c, g, or t
  misc_feature (307)..(307): n is a, c, g, or t
  misc_feature (315)..(315): n is a, c, g, or t
  misc_feature (334)..(334): n is a, c, g, or t
tctttggctcactgcaacctncngccgttccaggtccaagtgattctcccgcctcagtctcctgagtagctgggattacaggtgcccaccaccacgcctagctaaattttttttgtatttttagtagagacgggatttcactatattggccaggctggtcttgaactcctgacctcaggagatccacctgccttggnctcccaaagtgctgggattacatgcgtgagcaaccgcgcccggcccttgtcctgtttttttaatcttaaaagttgctgggcacatagtagtttgtcttttaagtgtccantgaatgantatttgtggcatatagtantttcatagggtt

SEQ ID NO: 533302 - DNA, 272 bp, Homo sapiens
  misc_feature (262)..(262): n is a, c, g, or t
caaacattgtatgcttatcccagctacttgggagactgagcaaaaatcacttgaacccgagaggcggaggtgcagtgagccagatgtgccatgcattccagcctggacagaggagcacagctgtctcaaaaaaacaaaacaaaacaaaaaagaacatatgaggctggccatgatggcactttatgaggctgaggtggacagatggcttgaacctaggagttcgagacaagcctgggcaacttggtgaaaccctgtctctacnaaaaatacaa

SEQ ID NO: 533303 - DNA, 133 bp, Homo sapiens
ccgagtctggggtgatgtagggtaggacggaagaacatgtggaacgggcagacagcagatggcgaaggtgcacaccacgacaatcatcatttgaccacctggcaagagggtgagacaggtgagaccaccagat

SEQ ID NO: 533304 - DNA, 136 bp, Homo sapiens
ccggccgcagccacaggacgaggcgctgctcgacgatctttttgcgcgctatacgatggagcgcgagcgcgaggtccaccgggacttcttgcaagccctcgggctctcatcgagcgccgccgcccgccgggtcgag

SEQ ID NO: 533305 - DNA, 160 bp, Homo sapiens
aaatagttaagagattttattctaatagctataattacagcgcttgtttctcgaaatgaaaactgaaaacaagtatacaaacagttgattactaatcgcgtattggaaagcagtaagaggttccacgacaccaatagacagtctgaggattccaagataa

SEQ ID NO: 533306 - DNA, 381 bp, Homo sapiens
tggggaaagatcacatgggtcgagggtttctctactggtcaggatgcttttctcataagggtcgacttttttcaccagtcacataaacactatgtggactggcagtggttctctgctcctccacatcctggagcgtcccagcacctccccacctacttttgttcccaatgtcagccaccatgccttagcagctgaacaatcgagcctcatgctcatgaaatcatggtcccaggcggctccacctcaaagagaaagcctggaaggaaatgttccaactccttagaagggtcgtgcaagctgctgtgggagggtaagcacccctcccagcacagaaacctttcctttgaatcaataaagttttatgtcggcctgaaaaaaaaa

SEQ ID NO: 533307 - DNA, 662 bp, Homo sapiens
ctctgcttgaatgcccgtccttttccagagtccggctatgcactttgcctatgacacgccctttcgtggtttcatgatgctcacagatacactggtccattatgctggacagagctcattcaagtgaggcaagagagtagctcttcaagtaccgctagggcaggagtatgagtacaggttacatggcctaggttaaccagagtccctggactcatgaaagcatggtcgcacacttgagattcgcatgtgctttacactgtaaccgtgccctataaggttatacagggccattgcacagccagagacacagtgtggattccatggacagtcctcgctcgatatagatgccaccgatggtccagctgcatttccagccatggccctaggccacactctctgtgtagacatgctattcagtgacagggtcgtaataccttgggccctgtgggtttatccaaggcaataggactgcctggaccactctcggttggagatctgtcactcatctttcaagtcttagcacgctcacagcactctgtgtaggcctatgcagaggaagagcttggatatagccgtgtaggaaagcctttcggcacactatgcacagtcatcctgatatccttacacacctctctccatgcggtacaggcagtgcgtggccc

SEQ ID NO: 533308 - DNA, 893 bp, Homo sapiens
ggaccgtctcaatcagtggttcccgtcccccttctacagaagtgggtccgcccaccggcggttccgagaagtttcctgcccgcgtggtgcccccccgcaatgttctttgccggggtgcaaccaataattggggtggccacccctttctgggcgacgaaaacattgtttgggcgcgctggtaccgccctagggtggcgttgccggcggccgttactctagctctggtattagtcgatctacagggggtttttatattcttgtgtgcgctgcaaccccgggaactcttgaaccagtcgtggcccgcgggtgtgggccccaccccattccggtgggggcggcgctgacccccccacgaacgggccccacaaaatggggccaggcacacggcaatgcgccgccaagtaggagagttggtgtataacaggcaggtggcccgcacaataggccgaggcgccggttgggccaccggaatgttccctctgtcccatcgggattaagcgcccccccctgtgtctgtcctacaggcaagagcatactgggcccgtcgttcttccccacaatgcccaacaccagggggggtggcaatggcccaacgcgtcttcgtgctataattgaccgttggaagcgccaacctcggtgtggatttggtgtctcccccgtaaaacaggtggtgttttaattcttgcgtcccgtcgtatgacggacgttgccatcttttgtcccccccccccctgtcccccgtttgtggtgtcgccccactcactcgggggaatgtcatggagggagccttgtgcgttcgcccccgtggagctggggcgggcggagacgccccgggcgaccctccccctcccggggccccccggtaaaaaaaggcccccccccacataacaaaa

SEQ ID NO: 533309 - DNA, 1646 bp, Homo sapiens
  misc_feature (127)..(127): n is a, c, g, or t
  misc_feature (134)..(134): n is a, c, g, or t
  misc_feature (432)..(432): n is a, c, g, or t
  misc_feature (1216)..(1216): n is a, c, g, or t
gggggccctccgtgctggggtgaggtcctcagcatcatggacaaggaggatgtgggagcccgaggagggtggagggtggttatcattggacgatgagggcgcgcgcttgtgcaccaagtctaggctnatgtgcntcgcccgcgtacgcctggtggcggaggccgtcctcctgttcacaaggcgatgataggctgagggctgggcccagacattgtgctcttcactctcgccgtcgcacatgcgtctgagaggcatgaggtggtggtgcatgcaagcgtgacacgctaagccccactgggcatcagtgcgcgactagctatggcgacaagtgcagcaacgcaaacatggggggaaccagatcgtcgtccactcatcacacgtctggtaccatcgaagggctgtccctgtgagggcacgccggcaggccgtgcncctatctcgggtgggtcgaggcagaggggccccggtgatagcctgtacatcgaaacgaacagggacgaaggaaaaaggtgagttcatcacttactagggtgtagtagaaggcatgtgagggcagggcactcgagaaatattggtgctgttggacgcgattcgcaagaggcccggtggtcgtgtccaccctgcgtaacggctcttcaggggggtcggcaatactatcttgcgccattttgctccactagggacccgtacttgagtaggaaccgtggggtccaccctcaacgaagcgggtgcgcgcaatcgtacagaggagcgccttatgggcctctcgtacgcaaccccatgggcacactcctgtggacggtttctggtgaacactttgagaggttggggcaccggggggaacccttggaccccaggtacgtgaactccttctactgggaaagggaatccgctacgaggtggagagtcgcgagaggtgttaggcttggctttgccaattggaccctagacggtgacagtttgcgtgtgaacaacttctggtcggctggccagaactatttcgagaggggaggaataaggggttggttgactataagcggttctgagcctggttggaaagcgtttccggaggcgcaatagcgaggatttgggggccatactggtgtgggagagttcctcacgtttctttttttccatggggaggagaagaagtccttaacataggaatggcccagaattgtggcacagaggggtcaattaaacctagttggagaanttataagcgcgaggtaccgggggttattcaccggaaaagaggaggccatggtttcaaaaggccatagcggtgtactaggggacatttgcagagatttcgccgggtgcgtcccacggaaggagcgcggccctttttacaggtgccgccccagtacaagggtgtggcggcgggcgaaataccggctataaacaggtgagtcgacaacaagcggttgtttctagttaaggagaggacacacaggtagtatactgaggctcgcagcagagagatattaagggacacatcgtcagtgtgtgcactgtgcacaaattaacagtttgtgcccaacagagctgaatacctgtggagaagcagacgtacgtatagagaagctcccgagatgatcagagagaagagatccgccctacgccgattcacagctgactctggt

SEQ ID NO: 533310 - DNA, 220 bp, Homo sapiens
  misc_feature (15)..(15): n is a, c, g, or t
  misc_feature (46)..(46): n is a, c, g, or t
  misc_feature (143)..(143): n is a, c, g, or t
  misc_feature (155)..(155): n is a, c, g, or t
  misc_feature (180)..(180): n is a, c, g, or t
  misc_feature (210)..(210): n is a, c, g, or t
  misc_feature (220)..(220): n is a, c, g, or t
tagggggcctgagcntggggtattggaccgattgtatgggcacccntgccacaatgtctggctgtcttcagggagctcccatcccttggctaagaactgggtgatgcggatggtctttcttgggagcaagccttttgccacangctggctggtangctcctgttgggtaaaagaaggganttcagcaaggctcagggaaggaaagtacangggcttgctn

SEQ ID NO: 533311 - DNA, 141 bp, Homo sapiens
gccactttaatttacacttaagagccttagttggacttaacactttcgtagcgcttctcatcgtgtataagttgtgtatgtgtgcatatagcagatagtctgtagccgaggtgggtagagacacttactagtatcatgtcg

SEQ ID NO: 533312 - DNA, 176 bp, Homo sapiens
cgtgtgcacgcacgtgatgaggttggactccgtaaggcagtcacggcatttctcatagtaggatgcaaagaggaacgctcttctcagagaaaggctccaggttgaggttgagcaggtacttggatgccacactcgggccccaagatcccattgtagctgacggtgcgttggcccaa

SEQ ID NO: 533313 - DNA, 259 bp, Homo sapiens
  misc_feature (17)..(17): n is a, c, g, or t
cctccaacgccctcggnagatcgcaccaagcagaggcttccaggtaagtgacgcctctgcaccgagttcaggaaacaggtttcccctgttgactgttacttgcgtttgttttctggggttcttgaacttccagaggtctatttctcttaagaccaactactaccatctctttaaccatcttgggtaggccgtggggatttcagcctttgaaggaaattcccacgggtaggtccggcttaagggggaagtttggggggtc

SEQ ID NO: 533314 - DNA, 153 bp, Homo sapiens
tctcgcgaagctctgaggtccaggtgccttctcctgcagcatgtgaagatctgctggtcttgcaggcaagctacggcagaatgtcgttgaactctagctcatctgtcacgagctcatcgaatgtgcacggagctgctctccacttcctcgtgc

SEQ ID NO: 533315 - DNA, 268 bp, Homo sapiens
gcgtcacttttaagggataactagtatatcgcgtcaaccacctcatatcctccctgactaagccttagaagggattaataactatcgcgtgtgtccattgataagctactttccataccacctccacacccactcccttttaacccatattgtgcctattgccaaaataatttttgccgccttcgaaacaacggtgggcctaaccctaatagtttcaatttcccacacaaatggcctagactacgtacattaccttaacctactccca

SEQ ID NO: 533316 - DNA, 188 bp, Homo sapiens
tactaaattgctgttacctaaattgctgttacctacaattgctgttacctaaattgctgttacctaaattgctgttacctaaatggctgttacctaaatggctgttacctaaatttgctgttacctacaatggctgttacctacaatggctgttacctaacatggctgttacctaaactggcttgtac

SEQ ID NO: 533317 - DNA, 177 bp, Homo sapiens
tgtggatgacctggtggagctataggggaactattgcagaggtgtccgggacagcaggatgacgcggcatcagggcgtgtgcagcgacatgtacaacactctgcgtctggctgagcacaaagccagggaaatagccaggtgctacttgacggcctatccagttatcaaagataacgg

SEQ ID NO: 533318 - DNA, 1210 bp, Homo sapiens
  misc_feature (393)..(393): n is a, c, g, or t
ggtgaggaggacgtccatcgtgaagcagatacattctgcggcaagtagacgcattccctttggggactactccacgaggtaccaagggttgccggggacgtctaacatcgatttacgaaatactgcaatggggatttggcaccaagtggccaggcaagatggatggacatcgatgaccgcttcaactagaggtagtagaggcatagcggtacggtagtgggcacgaatgccatttgtgtcgccggaaaaaagcaagtgggactacccacatgtgttgcaaacctagtcgtgccaatcaggcatattgactctgggagcgagagccatagcacgtgccatgactcacgtgcactgtcgtagtcgtagtctctgcgctcacgaacgttagctagnagggtcaccagtgctgggaacccagatgcatcgagaggacgctaggaatgcgatattctatcccacgcgagaaagtcgggcggagctatctagagttcggaaatcccctgtcgtaacgcgcaaattcgttcgggccacgcatgcgcgagccgtttgagccgatcggggttgggcgtcaccctgggcagggagaggggtctctgcgctctcctcgtacatcttaggaacgtctcatgtggggttcgtagttagtactccgtggaggtgccttgactttgttcccattggtttgttcgttgttgtgtgtcccccctgagtaagggtcggaggtgggggttgtgagcgaaggccaaggagggccatccggcgttctgttcgcggaggccgatctgtccgttggaggcaccaatcaggcctctgtggactctcgggattctcggcttcgcattacccccacatagaggggcccaacgcgttcgcagcgtatagcggggggcccctgggtttaggtgtggcccctgtccccgaagggttctgccgagtgagcagggatacgacgtggttccaaccttatgggcaccccgattgcgtataccgggtgtggagacacaccccttgtggggggttcgcagggggttggccctccaaggttaaccctttgggacctaccttacggaaggggaagccccaaacaattgactcgcccttccacctatcaggttaggctacagggggggggaacaataaaaacaaggctatctagacctgggggaggtttgacagggggagccccaaaaacaagagcgtagtcccaaag

SEQ ID NO: 533319 - DNA, 329 bp, Homo sapiens
gatgctatgtatcccatgcagcgtgttgaatgcagtggatgtatgcagagtggtgcaatgtatctctattgaatgaagtggattccattcagcttggtgtaattgataccgattgaatgcagtggattccatgcactgtgtctgaatgcaaccgattccatgcagcagtgtgaaatgcatcgcgaagtgaatgcagtggattccatgcagcgtggcccaatggataccgactgaatgctttggattccatgaagcatgattgaatgcagtggattccatgcagcactgtgagaatgcataccgcagtgaatgcagtgcgattgcatgca

SEQ ID NO: 533320 - DNA, 113 bp, Homo sapiens
gggcccaaaaattttttgtttgtcctgggaaaggaaaagggggaaattaaaacccttccggttagttttggaaagcccgggatttttccaaaaaatttaaaaatgggctggga

SEQ ID NO: 533321 - DNA, 131 bp, Homo sapiens
  misc_feature (20)..(20): n is a, c, g, or t
gcacaaggctgttgcatggnctaatgaagatcatatacgtgaaaattctttgaaaacatataaagcactatacagattcgaactccattgagtcatatcctcgctaggagatggtgtttgggaatgagggg

SEQ ID NO: 533322 - DNA, 115 bp, Homo sapiens
  misc_feature (4)..(4): n is a, c, g, or t
cggnctcatcctcccaagcagcggggactacaggcgtgagccagcaggccggggtaactttttggtacttttggtagggatgggatttcaccatgaagtagagagccgggtaccg

SEQ ID NO: 533323 - DNA, 1020 bp, Homo sapiens
gagggctattcgagaacacggggctgggtagggccagagaggcccccgacgtgctggcccttccctctatggacgttgcgcttgtgcctgcgctctatgctctctgccgttatcgcccggctagtcagtcgtcctaactcactcacagagaagtccggatcgtggctagagcgcctgcgttcgcacccatgtgacttgtacacggcggcgccactcgcttgaggcttgtccccgtgccaccaccagcccgttctctgctttccggacctggtcgagtcaggaggcgccagtcatgggagtggacatccgagcataacaaggaccgaaagggtgcggcgcaaggagcccacggagccacggagtagtgcgtaccgtgagcgctggttggctcaaggttagtacagcgtatactggcgcagaagaatcaacataccgcagtatcgaacccaggatgaggtggcaacgaggtcggtgcagtgacggtcgcacgcaaacgggccgacgtctgaaaccctgtatcccggaatgaatccgcgaaggatgccaggcattcacgggggcggggagaaaacagagaactggccggggtggctgaggggaagcagtaacgggatcgaatgtagcggggctgcaggcgaggggtatcccaaacacatggcaacgcgtaatgtggcactgggaacacgtggtatcacgcgcgggggccgcgcaggcccggaatcgatcattgggcaacaggggacaacggaatccattcagcgtgaacaggaaccaacgtatgggcgccttggggacttaaacagtagatggtgccatgtgggcaaggtgttacactggcgctgatcccgggaccctcggacaagggggccccgaaccaagggtggttaaccggggcaacaaacgggggaaaggaaccccagggtagacccgcgggagcaagccccagcaccccagaggcccgcacgggtggcgaactcccagaggggccaggacactgtcaccgaaccgtgtgccaggaat

SEQ ID NO: 533324 - DNA, 544 bp, Homo sapiens
atccgccggtccgatggtctgaatcttagctctgccacttactagcatgtgactggggtaagttactgtcttctggtcaggtgcggtggtcacacctgtaatcccagcacgttgggaggcaagggtgtggatcacctgaggtctggagttcaagacaagcctgatcaacatggagaaaccccgtctctactaaaaatacaaaaatgaggccgggcatggtggctcacgcctgtaatcccagcactttgggaggccaaggcagggggatcatctgaggtgaggagttctacaccagcctggacaacatggtgaaatcccgtctcagctaaaaatacaaaaactagccgggcgtggtggcaggcacctgtaatcccagctactcatgaggctgaggcagaagaaccgcttgaacctgggaggcagaggctgcagtgagccgagatagccccattgcactccagcctgggcgacaagagtgaaacttggtctcaaaaaataataatcaaacaaaaattgaaaagatcaccaagcgacaggcccattg

SEQ ID NO: 533325 - DNA, 200 bp, Homo sapiens
tccaagagcagacctttaatctcacttgaagtcattcaggctagctaagactacacgattacacgactcctcccagacaacagataacaattaaaacatcatcctcactcaatcctcgctctacaaactactacttcaccactctgacgtcctttgacttagcgatattaacaaattacacctcatttacactgcatttt

SEQ ID NO: 533326 - DNA, 915 bp, Homo sapiens
aatattgtctgagatcatactatttgggcctgttcccagttcagttgtgaacatgagtcaatatgttttgtggtattccaatccacgcagcgtggactagtgtaatgactgtcaaactgatatgtagaagtgatgaatgggtggtgtagtggactaaatagatgccagatgggattgttggacgtctaataaatggtgttcttgttcgattagtcacgccgggagtagcatctgatgtgaccttagagcacaaggaaattgctaaaaggcacatgccgaagaggaatatggtataattttaaattttaatgcaaaattttaattgtctttattttttatcatttgaactgataagcacttttgtgtgtcaatataaaatatactaaaactgatgaaatgctaagacatgtctgtgtgaaggaaggtttctgtggagaccacttttatttactcatgagaagtggaagctcctagtatcagaagaagctgatacatagtgtcatgtgctcagtggttgccaaagtctaccaacttggggggagctgcagggttcttttgggaggtgggaggaagggagatgagttcgttattgggggtttcaagcattggaaccaaagggcaaataataaacagctttaagttttaaagtaaattcattttatttggagaggtacacttgttttggtagactgctaacgaccactttatgactattattgcccttataatggtcactctgcgtttggttaattaaaaaaaattggggaagcccctttgataggggaaagaaaaggcaagatggttctctaaaatgagagaatggcggggattggatggcggcttggaggagtaaaggataaggagggtgttctataaacgggggggggtctgcaaggtgggaaacgggataaaagg

SEQ ID NO: 533327 - DNA, 744 bp, Homo sapiens
tgcggccgtttgcagcttggcggtagggaggcgtggtggtctgaagcctccgagcagccgtggcatggcggatgtaaccgcccgtagtctgcaatactgagtacaaggcgaactcgaatcttgtgctccaagactgacctgtactctcattgaccggacccgccgtggatgaacccacaggagaggtgctgtcccttgtcgggaagctggagggaacccgtatgggagacaaggcgtcacgcggaccaaagcgaagatgcaagagagtggaaagaaggatgccaaagacgaatgaaagcgtgatagaggaccggcatgaaatcacccacgatgaagggcttactactactgctgtcggaagcgcattgaacgagaatggatgggccatacatcaacatgccctaaaaactaccacgagaactcgcggcagcagcgtagtgaaggtgctactcaccataacataacactgctgtctctagtgtagaacagaccaacggatgatatcccaatttgcaggggggccaaccctgaacctaaaataccatcagcctggaacaatacgagaagttgccgcaagcatagcatagacaaagtcagcggctcaaaagaatgaatcgaacactgctgcatgcatccaaaacgcatcactcccgaacataccatgatcgccaagaatacccagagacaacaacacatcacagaaccagagagcaaaacgacaacaaaaataagctccacacaacc

SEQ ID NO: 533328 - DNA, 356 bp, Homo sapiens
cctctcctagcacattgccagcccccgcaccctccagccgtcatctctcttccccgcctggcgcaggaatggttcatcgtttagcaatggtggctcctcccagtctaccagagtaactgccctctagacacaccatctctggagttcccgtcgtgactcggagacccccgactcctactagcgaaccatgaggttgcgggttcggtccctgcccttgctcagtgggttaacggtccggcgttgccgttagctcgtggtgtatgtagcagatctggctcggatccagcgttgctgtggctctggcgtaggctggtggctacagctccgattcaacccctagcctggggtgctaggag

SEQ ID NO: 533329 - DNA, 350 bp, Homo sapiens
atcttttagggatggagttttgctctgttactcaggctctcagctcactgcaatctctgtctcccgggttcaagggattctttcacctcagcctctcaagtggctgggactacaggtgcattgtgcccccatacccaacatggtgaaaccccatctctcccaaaaaaaaaaaaaaaaaaaaacccccaaaaattagccaggcgtggtggcacatgcctgtggtcccagctactcaggaggctgagtgaggcaggagaattgcttgaacccgggaagcggaggttgtagtgagctgagatggcatcattgcattccagcctgggcaacaatgcaagactctgtttcaaaaa

SEQ ID NO: 533330 - DNA, 373 bp, Homo sapiens
tgtaaccactcgagacatcgcccctgtgttcggtatgataagttaggtttgagcagggagaggtctacttcccagaacgaaccacagtacagtagtacggtagagctgggtatcctgcccggtccatccaaaggttacatccctatgtctcttctctggacctctctggaaatgcttctcaactttgatgatggctccagtgacaggcagcagccaccaggactgtgatctccctgggatttaaagtgggaggttaaaccaggctccacgccactgcggaattgtgcaattgtaagtcaagtctcaattgtgagccaagcttctcccagggtcagaggtggagttagaaaggccccatgtgaccctgagcaag

SEQ ID NO: 533331 - DNA, 748 bp, Homo sapiens
gtgcccggctcggggtcatgcttgtcggctggggcgggaacaaggctccacactcaccgccgcggtggttggccaatcgacgtgcgttgtgtcctggccccacgcgcagtggcggcagtggagcgcccaccttacttacggcttcgcttgcacttcacggggggccacgtgtgaagcctgggcgcctgggacctggcctggatggcccgcgggcgggttgttcggtcaccccttttaagccgcggttcgttgcccccatttgttgtgcggccccatgagtaccctctccagtagactccacactcgggcctggggaccaattcctcggtccggcttgagcccccttggcccagaggcctaaatagcagggcagaggcaaaaagggttgctcgaacctggggcgccttggcagtgcagcacacctgtgggtgcccctggatccattggacaatcgccccttgcgggacccggagagcagtccgtggtcacaacgtcccccgggaagttacatcggcgggcaaaacagatgaacgccgcccgcgaaaaaccgtattccacaggaccggggatggcgaaagcacgacggaggagcagaccgcgcgaggaaccacccagggaaaaactcccccgggtcacacagcgccgggctctggaccacagcagccaacacaggcgggcgcgagcaagggagcacacaacgggaagcgcgcaccggggagcggacgcaccccaagggctacacaagagt

SEQ ID NO: 533332 - DNA, 216 bp, Homo sapiens
caatcacttgagctgggaggcgggaggtagtagtgagccaagatcgtgccattgcactccagcctaggcaagcaagagtgaaactctgtctcaaaaaaaaaaaaagaaagaaaatgcacaccccatttttaaaaataggcaaaagatctgaacagacatttcaccaaggatataggaatggaaaataagcatctgcacgcacagctgtacaatcac

SEQ ID NO: 533333 - DNA, 787 bp, Homo sapiens
ccaactcagatctggtgtaataactctcagcttccagttgatcacagtcctggcaggctctttcgaatacagccatgcggctccgttcatgaccacatgtaggggtaatccacgtttggcccctacaagcaactgttcctacagacatacgcccgcaggtcctgcaccaatcctatctaggctctgccctgcctaccctccatgtatggctatccttaatcgcaactggaaggatgcagggctgaatgatatggtgtacctaggtctgttgggccgtgaagcttaatgacctcatcgcagactggtttgcatgcatgtgctaccagcgtcagccgacagttggcacatgttgaggaggctgtggtatggtgccgttccatccttctcagttgttgccatcttcttgttgtggatcacatacactcacatgcacgtacttgctgaggcgcctgcggctcatcaccatgtgccgtgcgtgacattgtgggtttgtccgtggagactgacaggaacgtaagctgcccatgagaggactctagaacagcagaagcgcatctgtgagatggcacgcctatttcagccactcaaacctgtcagccgtgtgcactatgatccgtggtgctgcgtacagccctcaaatcgtgtgcttcacgctcaaagaacttcacagaacaggtgcaccttttgtcggggcctattagaatctgggccaagcctggggtggccggaccgaaaatcttgttgccttggaaaacccaatgcacagtatttctgcaccttgtttggg

SEQ ID NO: 533334 - DNA, 106 bp, Homo sapiens
agccagtaatcctcttagcctcagcctcccaagtagttgagactacaagatgtaccactatgccgtgctagctttttcatttttgtagagagacgggactatcatt

SEQ ID NO: 533335 - DNA, 908 bp, Homo sapiens
agacttcggctgacggaaacgggtattccatgtctcagggagtatgtttgtgcagttactgcttattctgtgtggtatgctataattaataaattggaagctgcccaatgtcatgattcggtgtacaatgagatggatcggtcatgaaagtaatcattggtaatggccacaggattgttgatccctccgtgtaccttggaacgcagacaattttagtaaggacttggaagctggatgtttggtgccagcctattcctgctgctttctacttgtacaggctattcagcatagtaagcgtaccatgcctatattgcctgtgggcctgctctctggtcgaccatccagctttagggattcttacacaggtgtgttgtatccaaaagctatcaccagaaatctaggattgcaaggcctacccattcatagtggctatatcttgcgcatatcttggaagttgctatatctagaggagcttggtgttccagcacatgtatccacgtacattgctcgctctttggggcatagtggcagctgcactgattaataggaactcgaggcgccctcttcttagttggactgagtattagtatgatcctctgaagagtttgcagctgtgcgatgtcgggttattataacctaatgtggtgcctgtgttcaatgtgtctgacaactactggattttcggcctctccattttcacctcttacagtgtacccctgttttttttatgaacgggcctctaggtcccagctttgatccattatctagggaccttgcctactaaggaatgttaaagatgcatgggtaaaaagttcaagaaaaaatccctggattgaagcgcaaagtggcatgacaagggccaaaatattagtggaagtcacttaaggggaaatccatggaaaaccgga

SEQ ID NO: 533336 - DNA, 631 bp, Homo sapiens
  misc_feature (624)..(624): n is a, c, g, or t
aaaattctttatatgacacctagatctttttttggtgccacttttaactgtggaggaaaccccactgcccacatgttcattcaacacagagtgattatccacttagttccaaaaaagttgtgtttggttatgggatttgatcccacttgtccagggtttaggtcagctactgaagattaggatatctgggtacctcttactggagaatccattcctgttttcatttcattcctgggggcaatattcaatctggtgtggccctctgtattataaaatgtttcccagattgtgtttatctgaaatacaaatccaagaagaagcatggtgttaattgccatgtaaaaaagattccagagtcaagagcttgagaagttctattccttccttcataggttcagttgtttaactcagcatttttcaaacatattttactcctagaacctgtttttcctcagacatatttaagaaaaaagcattttgtagaacacatttggacaaatgatactttatatcattgctttgttttttaaattttagtttgactcaattttacagtttcaggattttgtttctgtttcaggttttaagcttttcttttataaatagttactttcctagtctganaaaaaaa

SEQ ID NO: 533337 - DNA, 90 bp, Homo sapiens
gatccacccaggcctttctgtaaataaaagcacccaagttgggtacaaaccaggatattggagctactctatcctggagttaactaggat

SEQ ID NO: 533338 - DNA, 1008 bp, Homo sapiens
gggaagatggcggacattcagactgagcgtgcctaccaaaagcatggcgaccatctttcaataacaagaagagggtcctgctgggagaaactggcaagggagaagcgtcccgcggtacttatcaagaacatctggtcgtgggacttcaaagacagcccctaaggaggctatttgagggcacctacgagttgacaagaaatgccccttctaggtggtaatgtgtccattcgagggcggatcctctctggctgtggtgacctaagatgaagatgcagaggacgcattgtcatccgccgagactatctgccactacatcctgcaagtacaaccgcgttcgagaagcgccacaagaacatgtcttgtacagctgtccccctgcttcagggacgtccagatcggtgacatctgtcgacagtgtggcgatgtgccggcctctgtagcaagacagttgcgcttcaacgtgctcaatggtcaccaaggctgccggcaccaagaagcagttccagaagttctgaggctggacatcggcccggtccctcacgaatggcaataaagttattttgctcgattccccagataaaacaaaatgaccacaatgacaagacccggagggcatctcaaagtcgggtgtctcgcgaacatggggtcccgggcactggtggcccacggtgtcaattaccttgctcagggacccccaagagtatccggggacaaccccaaggggccgaaatcacgggggtaccgcgctaacatggaagggccgcaatgaaagttggagaaaagcgcaggtacacccgtgcggtgaaggaaatgcaggaaaatgagaggccacccacggggtaacatggaacaattcgacaagaaacttggtgacgttacgggggtcagccccaacaaggactgcaagacacagaggggtcatggagggcaaaaccaaaaaaccccgggaacctgcttcaacccctgacagtccgacagggctgaagtgaagaaccggaacgcgatacc

SEQ ID NO: 533339 - DNA, 312 bp, Homo sapiens
  misc_feature (273)..(273): n is a, c, g, or t
cggcctttctgctcactgcccctccccaggctcctggggcaggcgtctggcaggtcggcgtccactggctgcatagacgactcacagaccacagggtccaggagcttgctctcctcggggggtgctgctgacatgcccactgcccaccctcacctgggtccaccccagactccatttctctctatataaaatgtgagctagtcatgaccctggggacctaggggacatggaggtgtggcccgccccaggggcatggggcaggacgtgtggcanagggggtcctccagggacctgcatccagcctggcattgg

SEQ ID NO: 533340 - DNA, 838 bp, Homo sapiens
atatttagtgagtaactcctatctacacacagtgggaggacagactgattttgccctttctgaagttcgaacgggagatgggaaaagaggagcataaaataatacctgtaaccaggcatcagaataactatcgagcctgaaggccaaatccaggtttttccattttttttttttttaaggatccagaaaaaaacaagaaagaggccaggggcgggggctcagtgccgtggtaataccagcacttggggaggctgaggcaggaggactcactgtgagggtcaggagttcgagaccagacgggccaactagtgggtgaaaacccgtggtttctactaaaaatacaaataattagcgtgggcattgggtggcaggcgccgtggtaagtgccagcatacattggctgggctaagtgcattaagaaattacctggaacctggggaaggtggcggggtgggcaattggaggctggagagattggtggcacacttggcgactcttaggacctggggtggacaagacgtggaagactccagtcctgcaaaaacaggtcgaacactgggtattaatccatggcaaccactcagaaacactggtcccaccatttcacagtctaactatggtgcttaacactggtgacacagagtgctcccggggccaaacttggtacgtcttttcacgtgcaaaaatgcgtctccccaaaacctgggtctttagaattacgacatgggctcgaaccgttaacttaaaacttcacaacaactcttagggggggtaccagacatttttggggcccataaaacccctgggagactctccaccttcttataagccacacccc

SEQ ID NO: 533341 - DNA, 779 bp, Homo sapiens
  misc_feature (585)..(585): n is a, c, g, or t
tagtgtgacaccagaactcttctggtcagccacagaacacatacagaaaacagacatgacagaactgttcctgccgttgccgccactgctgccattgctgtggttatgggcatttacaaaacttgaaagtcagcactaaaggatgggcagaggttcaacccacacctccagctttgcttctgaaggcccattcattagaccagcttgtgaacatgattactccaacctcgatggttttctcatatctcttggttctaaacatcgagcatgtctctacctcacaactgtaagtgctctgatacaagagtccaaagtataaacatgcgtccttatctctctcttggctgctacctcttgcgtatttggacagttaccactagtggttctgcgagaagacctgcttgtataatctgctaagacacttcgtctaagtgtgttcgtcaaaggcaggaaagtgtatcgcccttctagtcgtcgctcattctgtcctatttgagggaaggttcctacatttgtttcaacagcatgcgagtcactttgggtttaacatgtgggaacactggtgggtggactgattatggacantactgtagccacagtggtcattgtactttgcgtgctgacagctgcactacagttacatgctgtcgtccaaacaccacagtgatgcttagggaaagaccctgctcaggaccagcaggtcagcagcccagagcagactgataggtccgtgggacccatgttagagcacgaaaattggggctcagcacagtttactg

SEQ ID NO: 533342 - DNA, 576 bp, Homo sapiens
  misc_feature (15)..(15): n is a, c, g, or t
  misc_feature (37)..(37): n is a, c, g, or t
  misc_feature (142)..(142): n is a, c, g, or t
tgggagtcatgtgcncctttattagctgagccattanttgaaagggatgaagcgggaggagtgggtggccccgatgccgggccggccatgctttacgggcttgtaggtgatggaaaactcgcccaggtagtggccgatcatntcgggcttgatctccacctggttgaaggtcttgccgttgtaaacgcccaccatgtgctgcccaccatctcgggttaggatgactcattgttcccgcaggtgtgcgtttttcaccatttccggcttcctccagtgggcggcgcctccttctgtggccttgcgccaggcgcttcagcgagggagtgtgcgtgcttccgccgaaggccccggtttcagccgccgccgcgtggcgcgcatgtgtctccagtgtgcttcagcgtgcctcgtaggactgtgtccagcagctgtggtctcgaggctccacgccgcggtaggtgacacttgcgagaaggctccgttcttcattcggctctacttctgccattgtgccccattgcactccagcctgggccacagagtgagactctgtctccaaaaaaaataaaaacaaaagag

SEQ ID NO: 533343 - DNA, 913 bp, Homo sapiens
agcggaggggcctgcggcgccccgctggtccgaagacgcccgaacccgcggctggcgaggacgcgggcgggggctggggcgggggctgggcccgctgcgtgtgcgcctgcgcctccatcttgcctgtacggctgctggactgcctgctgggcctggcccactgtccctgagccgtgtctgccgcctgctgctccctccctcggggcggtccgcgggctgggctgggcggctagggcctgtgtgggcctggctgctgcgtgctgtggcccaatggacccgcgactggtgatctgctgtgcgggccgtgaactggctccaatcggcagggaaagggccgagaagcgccgcgtactccttccacaggttccccctaaaaggacctcaaaacgtgctaaagtccaactgcgttaaagagctgttcagaaggggatacacctggacctccaagcctaacgtatccactctcctcatgtagttgagcattttcagccacagacgcagctttctccaaaggaaggcttgggagggacccagccatcgcctgctggacagccccacgggagcggtggccatcacaatctttcccaagcctgtaacccggagaacgaagcaaggagcgagcgcttgggacacggcccaatggcgcccgcaaccccgggagcagcacagactgcgcgggcacagggaccaccaagggggccgtggtgacaggtgagaacaaccttcagactcgtgccccgcgccacccggcaccagaagcgcaccctgcaccgattcgggacacaccggtcccgcgtcgaagtggaacgaccccggcatgcgccaacagcaccagagggtccccagaacgagggcttcgcaaggcaagagggcttgccccatagcacaggttgaacgagccacaccccaaagg

SEQ ID NO: 533344 - DNA, 840 bp, Homo sapiens
  misc_feature (1)..(1): n is a, c, g, or t
ncactattttaaacccccggccaaaaaaatattgcttcccccctgtcttggtgtaaatcctcctttggcgcataatttatttaccacacgcccccacttccgcgttcgacccaacccaaagcccgtatatgtcgttcctgtgcgaaatatttttcaaatcccgcccccactacggcgcctcttttggtaaaagccaccctgttctgacccccaacccccccgtatgtttcttacccgtgcgccaagcatatttttcaaaatttctccccccggaggcttcaaatccgcctcattaataatttctgcctttgactcacgaatctccaattttcgctgaacgccaaattctccccaagtctgctgactataacatactccctttcttcaaagaggacacttctccaacatctttacttctcccccactaaaaaaacccgttttgtagaggacatttcttttgaccaaacacctctctcgttactcatctctcccttactccccccctacgatttacccaccactgtgggaggaacactttctttggtatataaacaccgctttcttgtagccctaataatctactctctctatatactagggactctcacacatatcttatcttccacccccctataaatctccctctttacaataagatgtgcccaccaacaccacaatgggcgctacaacccacccccccaccacttgtaccaacacatattaccactttcttttcacacgcagagaacaacccctccatgtttcaaacaacacctccccccatttcctccctttcccccacccccacaacaatcccgggttttcttttaccaaaaaaaa

SEQ ID NO: 533345 - DNA, 372 bp, Homo sapiens
  misc_feature (54)..(55): n is a, c, g, or t
  misc_feature (143)..(143): n is a, c, g, or t
acgtagaagccccagaggggttttacaatcactggtttacacactcgggtaganntttttatttttacgttttatacccgagttatttctacttgttctacgcagattttctaaagtatcctttcaatgcctttgagaagatngagaaaaaagtttgtatatattttaaaaattgttttaaaagtcagtttgcaacatgtctgtaccagatggtactttgccttaaccgtttatatgccactttcatggagactgcaatacgttgctatgagcactttctttatccttggagtttaatcctttgcttcatctttctacagtatgacataatgatttgctatgttgtaaaatctttgtaaaaaatttctatat

SEQ ID NO: 533346 - DNA, 903 bp, Homo sapiens
ggtggaattcctggataacagtcttgcctgaccgcttgacggccgccgaacgatccatggggcagccgctgaaggggagggtgacactagagattgccctaaatgaacacaacaccgaaggctgcaacagcaactgactctaccactccgaaggaataagccgaaacacggcctgcggatggatagcccattacccacacatgagccattccgaaaacggaagcaagcctgttacactcagctgaagttttatcaactaaggatactgaaagaggccaagtgctccgctgcattagaacaatggtcacagggatcctcaccaggagtagcccccatcgccagaaaccacctaagaggcccctacacgaacaagcaacgccccatggggtcacgctgaatcatgagaatgcagcaccccaggccatatgcaggtcacacggctaaggctagacaccatgctattcacaccgcatctgcaggtacactgtccaccacaggcttgaacccgtcacggatcatgcctcagaggcgacgtccctggcggcagaacacccgaggatgctgataccttgaccctcacccctgagagccccaaaacccccaatggcagtctagcacggagaccccctcacaaagccttccagccgctttaaacacaaccaaccctagggcagcccccaggctctacagaatgtaagccccaagacaatacgtgaaaagcccaatgacgtcgttgacccatggccgaaacgggacccccagaacggacggccaggcagcccccctaaaaacattaaatccctgcgaacaatgtcgtcagaacgccatgagcggacaagaccccttaacatcctccctgcaagggttcgaccctaacctttattcgccgatctcgcgccatcc

SEQ ID NO: 533347 - DNA, 614 bp, Homo sapiens
  misc_feature (180)..(180): n is a, c, g, or t
ggtataacaaatttctacaacaaggtaaactagcctattgacctatgagttaccgaatttcgaagctcggttaaccatgtggctaacctgctggaggagtgggtggccccgatgccgggccggccatgctttacgggcttgtaggtgatggaaaactcgcccaggtagtggccgatcatntcgggcttgatctccacctggttgaaggtcttgccgttgtaaacgcccaccatgtgctgcccaccatctcgggttaggatgactcattgttcccgcaggtgtgcgtttttcaccatttccggcttcctccagtgggcggcgcctccttctgtggccttgcgccaggcgcttcagcgagggagtgtgcgtgcttccgccgaaggccccggtttcagccgccgccgcgtggcgcgcatgtgtctccagtgtgcttcagcgtgcctcgtaggactgtgtccagcagctgtggtctcgaggctccacgccgcggtaggtgacacttgcgagaaggctccgttcttcattcggctctacttctgccattgtgccccattgcactccagcctgggccacagagtgagactctgtctccaaaaaaaataaaaacaaaagag

SEQ ID NO: 533348 - DNA, 141 bp, Homo sapiens
actctagaggcatccccgagaggagaagatgtacaaggagaagagacgagatgctggtggcagggcattgaggacagcaagtggttgtatcaactataaagagctcgtccgcatagtgctgaagtggactgaggaccttcc

SEQ ID NO: 533349 - DNA, 339 bp, Homo sapiens
aagatcacaccattgcattccagtctgggcaacagagtgagacaaggtttcaccatgttggggcaggctggtctcgaagtcctaaccttgtaatcccaccactttgggacggcgaggtgagtggatcacttgaggtcaggaggtcaagagcagcctggctaacatgtgaaaaccccatctctgaaatacagaatactaaaaatacaaaaattaactgggtgttgaggtgtgtgtctgtaatcccagctactcaggacggtgaggcaggagaatctcttcaaactgggaggtggcggttgcagtgatgccaaaatgggctcagactcccaaggtgtgggg

SEQ ID NO: 533350 - DNA, 162 bp, Homo sapiens
agatcccctgattatatttttaatacctgtaaatattttattacgggtattttggatatttgttgatataagggcattttgggcataggtaccattgtgcatgttgctgattttgatagtcacttttttaatgaatgtaaaaagcttggtcacggaagatca

SEQ ID NO: 533351 - DNA, 255 bp, Homo sapiens
gatatacaggagaaatagaatgtgcatagtggggattatatcttaagttcgaggttaggtagtacgcaggtctagaggctgttagaagtcctaggaaagtgacagcgagagctgtgagttagaggtagaggggattgttgtttggaagggggatcgcgggagacatgtagttagtattgagaaatcctgcgaataggcttccggctgccaggcgtaaaatggggtttagtaagggtggggttattttcgtcaatg

SEQ ID NO: 533352 - DNA, 374 bp, Homo sapiens
  misc_feature (335)..(335): n is a, c, g, or t
tccactagcttcaaactttttcttcttgcagcttccccatctctctcagccttcagagaattgctctgcactaggctttggcttaagggaattttgtggctggtttgacctgctatccagaccataaaaatttacccatataagcaataagactgtttcattttcttatcattcgtttgttcactggagttagcactattaatttcctttaagaacttttcctttgcattcatgtcttggctaattgtgtggcacaggaggcctagcttttggcctatctgggcttttgacacaccttcctcaataagcttcatcatttcttaacttctgatttnaaaattaaagatgtgtaaattctttctcacttgaacatt

SEQ ID NO: 533353 - DNA, 1389 bp, Homo sapiens
  misc_feature (1389)..(1389): n is a, c, g, or t
tcagcaaactgggaggacgatggagaagatctggcaccacagcgcgttctacaactgagctgtgtcgtggctcgcggaggagtcacccaagtgtctgctgagccgagggcccccctggaagccccaaggtccaacaggagtagaagattgatctcagtagttagtgtttgtagacacttctagagcatcacctcggacacactgctacgtggtcaatccgaggactcgttgctgtcctctctacgcctctgggactgcactcactgggcaattgttcaatggtactcatggaaggcacggggttcacactcacatctgagttgaccgcatcttacgaaggtgctacgtgccctctcgctccaccggcctatcgcctgccgtttttggcactcttgttcatggcgcgtgcgactctgtaccggatctaaacgcttcatggtacagactccttcgagcgggagccgagggcgtgaccacggcttccaaccagcctaggtgcctgtaggcgggtgactagtctggtgccgctgaccaatcgaatggatgaaacgctcgtgcttacgttcgcccctgggacgtttgcagcagggagtatggctcgacctgacctgcattatcttctctactttcttcctggaagtaaagagtcgtaacgaaggcatggcccacggatgagtcgacgggtacagtcaggacattggcgaagtgaagcggggtttcccgggttgtcccgggaagagtcgcatggtactcacaagccctttgctttgcactgggcgtaatggaaatctttgccagggcattgccacagatgatccaccatatcaaacaattccagttcattggaaagttgtgagcggtgggaccattccggcaataggaactggtacggccaaaagaagggagagctaggtcgggggccggacgccacccaatgttattcccgggctattggccgaccaggagttcccgacacacggaggatacaacggcctgagggggcaccagagaccaagttgtaagagtctacgaaaacatgtagaaacacccacgaaaaaggcaagaaatccgggggaaccacggagagacacacaacctgggaggacacgtgtacccccatcacgggacatggtgttaaaacacacgagagctcaacaagagcgggggccccatatggacagcgcaaggtctaaaaaggacgctcaaaaaccgacctacgaacggagtatacaaacaaaaaagccggagaacaccacgagacgcggcgaggaaagcgtaagaagcaagagtggacatatcaggcaaaaaacagacgacgagtacgcgacacgaacaactactcaccgagaagaaagagaacgacgccacgcagcgtggcgcactgtcgcn

SEQ ID NO: 533354 - DNA, 823 bp, Homo sapiens
  misc_feature (213)..(213): n is a, c, g, or t
acccactccagccttactagcccagtacaatccttaatccgaaaccatttacccaaataaagtataggcgatagaaattgaaacctggcgcaatagatatagtaccagcgagaggcgaaagatgaaaaagttataaccaagcataatatagcaaggactaacccctataccttctgcatcaatgaattaactagaagatgaactttgcaaggnatgagcccagagctaagagcccacgaaaaccagaacgtagctaccataagtaacagctaaaaggagcacacccgtcatatgttagcaaaatagtgggaagattctatagggtagaggcgacgaaacctaccgaggcctgggtgatagctggttgttccaagatcagaatctttcgttcaatcgtattgataattgtagcgccacagaaccgctctaaatccccttgctaacattattaactgttgacgtcctgggatgaggaacgagtctctgttggacgactgagtgaaagaaagccttgtgagtagcagagtgaatagaatatttgaacaccccatcagtaggcctaagaagcagcgcacccagatttaagaaagcgttcagagctccaaacgagccactgaccttaaaaagatcccagagacatataagctgaagctccgtcacacccagattggaccagggtctatcacgcctataggaagaactaatgttgagtataaggtgacatgggaacattctccttccgtagtaagcctgcgtcagattaaaaacgctgaactgacaattaacagccaatatctacgagtcacaacaagtcattattacc

SEQ ID NO: 533355 - DNA, 181 bp, Homo sapiens
accttacccctacaaaaactaaatatttagctgggtgtggtagctgtgtacgtgtggtcccagctactcagtgaggctgaggcaggaggatctgtgtgagcccagtgaggtcgaggctgcagttagcctgtgatggcaccattgcattcctgcctgtggtgacagacggagacccatgtct

SEQ ID NO: 533356 - DNA, 254 bp, Homo sapiens
tgtggctcagttgatcctcctaggataacactgaataggaatatacacaaaagggctaagagggctgggtgcagtggctcacgcctgtaatcccagcactctgggaggcatgggcgggtggatcgtttgagctcaggagctcgagaccagcctgggcaacacagtgaaaccccgtctctacaaaaattacaaaaaaattagccaggcgtggtggcgtgcacctgtaaccccagctacttgggagactgaggcgg

SEQ ID NO: 533357 - DNA, 646 bp, Homo sapiens
  misc_feature (529)..(529): n is a, c, g, or t
  misc_feature (618)..(618): n is a, c, g, or t
caccatctactagggtccaccatgaccctggtgttatcatctcccaggatccatgaggtccagtgttgtcaccatctattaggatccaccatgaccctggtgttatcatctcccaggatccatgaggtccagtgctgtcaccacccactaggatccaccataaccctggtgtcatcccagagtccactgcaaccatgtgccatcatcccccaagagccatcatcttaggagccaagtaccgtgacgggctgtatttcagttgtcctctggggccgcatggtacttacagttgttcacttaaggggaaccagcacaacaggccatattcccgtttccactaaaaggacaggggtggggccagctgtccccctctgaagacttcacccctactctggccctccttatgtcactgcctcactcctgaccgaggatgatgcctgcatcaatcccaccacagatgtggcctcagccaacctcaccttaccccccggtgagggcacccggggccccccctggacaggcaggcgtntttcccttcacccaggccatcttgattggggtggacagggggtcaaacccaggcaacctcttcatttattcaccagaggaggggaggcntttttcaaccctcaggggtggacgggcc

SEQ ID NO: 533358 - DNA, 407 bp, Homo sapiens
gatatatcatataagcagctgagatgtaagcacactattctcacatctctatatatgatgagagacacaatcagccataattcaacaagggaagaacataattaagcatcagttataatacgcaccaaaataagcaggtagaagctctctaaattaaatatatacaaaaagctttgggaaaaggtctccacatttattacctaggcacatcaggaggtataaacagaattctactgcaaagaatgtaaataacatgaacagcatcttagcagcttaatcacggaagcaaattctcaacaatcccatatgacacattagcaagttacctatacacactctaggattgagcaggactattagattgtgcacaataacaaaatcccagaaatccacatccaggcaaactg

SEQ ID NO: 533359 - DNA, 119 bp, Homo sapiens
ccggttgcagtgagccgagatcgcatcacagcactccagcgtgggtgacggagtgagacttggtctcaaaaaaaaggaaaagaaaaattacatcttgcaacatagcgttcaatttgggg

SEQ ID NO: 533360 - DNA, 145 bp, Homo sapiens
attagctggtaccgaattctggatctctgggaagttgtgttctcatgaactgctcctcagctggtgacatggcatggctcaccacctgcccttcagtgttcaatgcaggggacatgcaccctttagtaaccttggaggggaccca

SEQ ID NO: 533361 - DNA, 502 bp, Homo sapiens
  misc_feature (135)..(135): n is a, c, g, or t
  misc_feature (347)..(347): n is a, c, g, or t
  misc_feature (352)..(352): n is a, c, g, or t
  misc_feature (359)..(359): n is a, c, g, or t
  misc_feature (361)..(361): n is a, c, g, or t
  misc_feature (368)..(368): n is a, c, g, or t
agcatattttttgcatcattaaattttctttgaggccctgattttaaccattgcatagtattcctacatatgaatagatgtattatgatttatttaaccagtcccttgttggtcatttagattgttttctatttntcagtataatgagtatgatgaatatcactgtacataagtctttatgcacatctctgatatttccttaggataaatgaggagctgattcttaatcctgtcacattggtaaggattatatacattccttattaagaatataaagtgcttgtttcttattgtttcattgtgattgcatagaagattctttggattctgaacaatttggtggtatnttaancaaagtntnagagagntttctaatgcctcatgctcagcaccttcatgatggaattcctattgtgtaagcttttggacaggaaaaccactgctgatatcagggagtttggaaagtagatatacttgtggaaacctgagggtggtaaaaaaa

SEQ ID NO: 533362 - DNA, 732 bp, Homo sapiens
  misc_feature (597)..(597): n is a, c, g, or t
tagaggatcccggcagctatcggttcataagacaaaagttaacaggatatcgaggaatgaactcagctctggacaaggcggactaatagacatttacagaactctacaacccaaattaacagaatatacattttttttcaaggacaaaataaaactaattcaaaattgaccacatagttggaagtaaagcactccttcggaaattttaaagaacagaaatttataacaaactagtctctcaaaccacagtgcaatcaaactagaactcaggattaagaaactcattcaaaaccacttaactacatggaaactgaacaacctgctcctgaatgactactaggtacataacgaaatgaaggcagaaataaagatgttctttgaaaccaacgataacaaagacacaacataccacaatcctgggacacatccaaagcagtgtgtagagggaaatttatagcactaaatgcccaccagagaaagcaggaaagatctaaaattgacaccctaacatccaattaaaagaactagagaagcaagagcaaacacattcaaaagctagcagaaggcaagaaataactaagatcagagcagaactgnaggaaatagagacgcaaaaaacccttcaaaaaatcatgaatccggagcgggtatttgaaagatcaccaaattgttgaacggatacttgcgggtacgagccgatcgtatctggctattcgagagaaaatcaaaaaa

SEQ ID NO: 533363 - DNA, 280 bp, Homo sapiens
agaactggtaaaatcttaatcgcaaaattagatgaagggtttatgggtattctctgtgttattcttgcaactttcctgtagacttcaaatttttcagcataaaagtttacaagtatataagctaagtcagtgcaaatgaaataacagttttaaataacccaaggatctaagaataaatatcaagagaactgagaaaatatcttgaactgaatgaaaatgaaaacacaacttattaaaatgtgtctactaaagtttataggaacatttatagctttaaaca

SEQ ID NO: 533364 - DNA, 770 bp, Homo sapiens
  misc_feature (44)..(44): n is a, c, g, or t
  misc_feature (133)..(133): n is a, c, g, or t
  misc_feature (136)..(139): n is a, c, g, or t
  misc_feature (144)..(144): n is a, c, g, or t
  misc_feature (150)..(150): n is a, c, g, or t
  misc_feature (159)..(159): n is a, c, g, or t
  misc_feature (186)..(186): n is a, c, g, or t
  misc_feature (190)..(190): n is a, c, g, or t
  misc_feature (193)..(194): n is a, c, g, or t
  misc_feature (200)..(200): n is a, c, g, or t
  misc_feature (203)..(203): n is a, c, g, or t
  misc_feature (331)..(332): n is a, c, g, or t
  misc_feature (347)..(348): n is a, c, g, or t
  misc_feature (352)..(353): n is a, c, g, or t
  misc_feature (355)..(355): n is a, c, g, or t
  misc_feature (361)..(361): n is a, c, g, or t
  misc_feature (364)..(364): n is a, c, g, or t
  misc_feature (390)..(391): n is a, c, g, or t
  misc_feature (394)..(394): n is a, c, g, or t
  misc_feature (411)..(411): n is a, c, g, or t
  misc_feature (415)..(415): n is a, c, g, or t
atattatagtcctgatcacatttaaaaagtcgtattattaaaanacagagggtgtacattgggaactcaactttttggtttcgtagattgtgatataaatgtatatgtatactgtaagtgtgcgcatagaatnggnnnntgggntgtgtncttttttantccactacctggggggagattggggangtgnggnngggagngtntgcataatggagattcctttggcctcttcaaggccacccttgctcctcagtcccctatgactacatttaatatatcttctcattaattcagtcttgcactttagctactggccaaagccaatttaaannaaaaaaaaaaaaagnnggtnngngggggngtngggtgggggggggggggggggggggnngtnacctgtatccgcatttntatngctattgttaattaccaagtgaccctgttgagatgggtgtccaggccccatctatcatacggaattatgatacttgcactctaaagcaaaacccaatctcaagattggagggagcaaagaggaaaaacctcttagggccagagagacttaaatctcagttgcttgctaaactgggtattttgagtatgggatgaaagaggctactttgcaagagggcttcgtatttggtttacactccaacaatgaggattttcactgggacggctaatccaagaagttgagtttccatgcagaaataacctctacagaacacacatcatatgtgattctgacagaaaaatgcagcattatcttt

SEQ ID NO: 533365 - DNA, 464 bp, Homo sapiens
agagatctgctgtacagcatggtgcctatggttaactatacagcattccatacttaaaaatttgctaaaagtgtagatattatgttaagtgttcttattacaaaaaataatgtggaaatatacaatggaatattattcagctttacaaaataaggcaatcctgctatatgcagcaacatgaataaacctggaggacattatattaactgaaataaacaagtcacagaaggacaaatactgtataattccacttacatgaggtatctaaaatagtcaaacttaaagaaacagcacagaatggtgggtgccactggctgggcgggggagagaaaaacgggaaattgttgttcaatgggtataaagttttagttatgcaagatgagtaagttcactgccaatagttaataatactgtactgtacacttaaaattttttaaaggtcatatattaagtgttcttatcac

SEQ ID NO: 533366 - DNA, 373 bp, Homo sapiens
ggacgagctcgatcactagtacggcgcagtatagctggaatcggttgattacggtctatggggaccgagcagcagacagcacctaactactcagaggctggcggaagcctgggagcggagcaatcggtggagaagcctgtgtcctcgattctgtcccagaacccgtctagtaggcaaagagcctcgaagctaagagccccctccagtcgcagcctacactctaggtaccgaacaatcctcctagctcacatgtacaccagaggtaaggggactcctactataccccgtaccgtgactaacacccttgcacgctgtctcacgtcctggcatttaacaaattgctctgcgaaggtggtctgttctttcagaccca

SEQ ID NO: 533367 - DNA, 225 bp, Homo sapiens
  misc_feature (67)..(67): n is a, c, g, or t
  misc_feature (96)..(96): n is a, c, g, or t
  misc_feature (109)..(109): n is a, c, g, or t
  misc_feature (162)..(162): n is a, c, g, or t
taaaaccaccttgggggaaaagggtagttgggagcatttattaccaatttcttgtttaatgtcttancgggggccttttatttggtaaaccctganataattgtgggcntgggaaaaccatttacctatttccttgagaggttttaaaagaccagtcccttntttagcatgtgtgttgtgtccagcatgtggtcgtcttaactaataaatgtgatttttctcccc

SEQ ID NO: 533368 - DNA, 351 bp, Homo sapiens
gtgggggaagagggcttggtggtgtttgggtagttgggtttacttttcggtagctggggtctggcatggtagccgcgttggaaagctacagctctgaacctctctcggcgaggtcttttggacaagcggttgggggcaccgcgcagacgtctggcgccgggagccagagctcgggcccgtggctgagcccggggttcctgcaggcgatgaagctaggggcggggggaggaagggaactcgggagggggaaaggacttggcggtacgcgtgcggcagggactgggggttaacttaatatggtcttacgccttccagaactggctttaaaggcagaccattagcaggacgata

SEQ ID NO: 533369 - DNA, 220 bp, Homo sapiens
gaggaatagcaacagtccgccctctccggtcctctatgaaccaaggaagggctggtgcccagagaggtgggggggccagggagcaggcaacacaggaggtactcgagccagtgcacctgccagctcctggactcctctctggcaaccagtgcccgctgtgctgcaccatttcccacgagcggctgggcacaccattttttcagttccgtcctccttggaa

SEQ ID NO: 533370 - DNA, 321 bp, Homo sapiens
  misc_feature (14)..(14): n is a, c, g, or t
atttcggcacagtnatcataactcaccgtaacctcgaactcctgggctcaaccgataactcctccctcagtcttctaagtagctaagactgtaggctcatgcacaatgctcggcttttattttatttttttgtagagatagggtctcgacatgttgtccagactggtcacaaactcctggcctcaagtgggtgctcccaccttaggcttcctaaagtgttgggaattatagggcatgagggcactgtgcccagcccattctctttttaaacagtggggcaaactgtttggcattaaaaacaagtctgtttgttttctcttt

SEQ ID NO: 533371 - DNA, 200 bp, Homo sapiens
gcccactgtctggcactccctagtgagatgaacccggtacctcagatggaaatgcagaaatcacccgtcttctgcgtcgctcatgctgggagctgttagaccggagctttacctatttggccatttggtctcctccccccaaggaccttaaatattaggattctcggaaaccaaattggaggaatcatgataaggataag

SEQ ID NO: 533372 - DNA, 366 bp, Homo sapiens
  misc_feature (20)..(20): n is a, c, g, or t
tcaggcaggtcgtcagaggntattctaaagaaggcattactatcacaggagatgacaactccatggcgtgttattgcccctgaagacctttcagtgggatacagtgtggaggtggaagacagtgatactgatgatcctgaccctgtgtagacctatgctaatgtgtgcttgtgtcttagtttttcacaaaaaaggtttaaaaataaaaatacaaaagaataaaaaaggttatagaataaggatataaagaaagaaaatacttttgtacagctgtataagtgtttgtgttttaaattaagtgttattacaaaggagcaatagagttttcacaaattaaaaagttaataaatattaaaagtcactgta

SEQ ID NO: 533373 - DNA, 904 bp, Homo sapiens
  misc_feature (55)..(55): n is a, c, g, or t
  misc_feature (67)..(67): n is a, c, g, or t
  misc_feature (116)..(116): n is a, c, g, or t
  misc_feature (129)..(129): n is a, c, g, or t
  misc_feature (894)..(894): n is a, c, g, or t
accaggtcggacccccacacagggtactgcaatgaataagatcatagcgacggtnttttccgagttnccacacaccaacataactagtgtatgccagctggctctgcaacgacctnagcaagcaactgnactcatggaaggaatgcagtttcaacatcctgatgattacatcccccttaccctgaccaatcaacaatccaaatttttcagcttctcatcctccacagtctccttaaaggaccccttgatggagcaaatttgtggcttgagattacctctcatttactagatcaaaggccttgtgattattaaactcattctcggctgtaccaaaaacaaaaaatataccaccaatacaattacactaaatcaaaatagagaaagaagaaacacgagagacacgcaacagcgtgacacgtaaagataaaaatggagactttaggcctgaggtgtaagacacccgcccccctccccttcttgggagagatgcatagagctccatattcagataccttcgacgtagtactcggagcgctacgagcgatagcgctatactccaccccctcggacccgaccataaccacgtcagctagggccatcagcaccttatttaatctcagctctgacgtcgatgtgagagacattccttaatccgcgcatctttgagccttttgcatacttgcccatgcagcggttttaatattcgtacaagtcctcccccttcactcaatcacgcaagtcctgccactcgacgcttcgtcaggccaccattcacacacaccccgcgcatctgtcagaagatataacatccagtatcattactcccgtacgacaacacccacgtatacgacacggtctgtcttccactccgtaccaataacagagctatagtgnatatcccgat

SEQ ID NO: 533374 - DNA, 102 bp, Homo sapiens
tgatcacaagaggaatttgtacgcccaggatcagccctcacatcctgcccaaatgtaggcagaatctgggtctaagactagcataagtgaagtctggggagg

SEQ ID NO: 533375 - DNA, 777 bp, Homo sapiens
  misc_feature (369)..(369): n is a, c, g, or t
tcctcccgcatttctggattggtgcaaccattgcagatacaccaaagccatgcctttcccgaactacaatcatcccgggggccaaccacatggacaagggtccccgttacctgagagatgacacgatggaatgtgaactagagcccagcttgcttggcacacatggatgttaatatgggaggaagaatgccgaggagcttatatttggaaccgacccatattaccaccggtgcttcccagtgattttgataatgccccttaaatagccaagcggatggttacccaatttggaatgagtgaaaagcttggagttatgacctaccagtgataccggggaactaagtcccagaaaccccatctgccctcganccagaaataaggatccttctaagggactccatatgacgagccaaacatatcttgagactcatgccaaggagcataagaatctcgccgaagctttattgacctatgagactttggatgcccacagagattccaattgttcttgaggggaaaaagttggaagtgagatgataactctcttgatatggatgcttgctggttttattgccagaatataagtagccttgccgtagtctacttttaccacgctttcccctcattcttgatgtggtgtaattgaagggtgtgaaatgctttgtccatcctttgtcacctttatcccgtttgggttattctccttatgacccctattgccaattagcatcccctggccaatatattttgaaaaaataaagaactatcccggattga
